United States Patent Application Publication US 2026/0193644 A1 - sequence listing, part 3

SEQ ID NO: 4964 - protein, 658 aa, Homo sapiens
MTPGVRVSTDPEQVTFEDVVVGFSQEEWGQLKPAQRTLYRDVMLDTFRLLVSVGHWLPKPNVISLLEQEAELWAVESRLPQGVYPDLETRPKVKLSVLKQGISEEISNSVILVERFLWDGLWYCRGEDTEGHWEWSCESLESLAVPVAFTPVKTPVLEQWQRNGFGENISLNPDLPHQPMTPERQSPHTWGTRGKREKPDLNVLQKTCVKEKPYKCQECGKAFSHSSALIEHHRTHTGERPYECHECLKGFRNSSALTKHQRIHTGEKPYKCTQCGRTFNQIAPLIQHQRTHTGEKPYECSECGKSFSFRSSFSQHERTHTGEKPYECSECGKAFRQSIHLTQHLRIHTGEKPYQCGECGKAFSHSSSLTKHQRIHTGEKPYECHECGKAFTQITPLIQHQRTHTGEKPYECGECGKAFSQSTLLTEHRRIHTGEKPYGCNECGKTFSHSSSLSQHERTHTGEKPYECSQCGKAFRQSTHLTQHQRIHTGEKPYECNDCGKAFSHSSSLTKHQRIHTGEKPYECNQCGRAFSQLAPLIQHQRIHTGEKPYECNQCGRAFSQSSLLIEHQRIHTKEKPYGCNECGKSFSHSSSLSQHERTHTGEKPYECHDCGKSFRQSTHLTQHRRIHTGEKPYACRDCGKAFTHSSSLTKHQRTHTG

SEQ ID NO: 4965 - protein, 312 aa, Homo sapiens
MPSINDTHFYPPFFLLLGIPGLDTLHIWISFPFCIVYLIAIVGNMTILFVIKTEHSLHQPMFYFLAMLSMIDLGLSTSTIPKMLGIFWFNLQEISFGGCLLQMFFIHMFTGMETVLLVVMAYDRFVAICNPLQYTMILTNKTISILASVVVGRNLVLVTPFVFLILRLPFCGHNIVPHTYCEHRGLAGLACAPIKINIIYGLMVISYIIVDVILIASSYVLILRAVFRLPSQDVRLKAFNTCGSHVCVMLCFYTPAFFSFMTHRFGQNIPHYIHILLANLYVVVPPALNPVIYGVRTKQIREQIVKIFVQKE

SEQ ID NO: 4966 - protein, 988 aa, Homo sapiens
MPGGKRGLVAPQNTFLENIVRRSSESSFLLGNAQIVDWPVVYSNDGFCKLSGYHRADVMQKSSTCSFMYGELTDKKTIEKVRQTFDNYESNCFEVLLYKKNRTPVWFYMQIAPIRNEHEKVVLFLCTFKDITLFKQPIEDDSTKGWTKFARLTRALTNSRSVLQQLTPMNKTEVVHKHSRLAEVLQLGSDILPQYKQEAPKTPPHIILHYCAFKTTWDWVILILTFYTAIMVPYNVSFKTKQNNIAWLVLDSVVDVIFLVDIVLNFHTTFVGPGGEVISDPKLIRMNYLKTWFVIDLLSCLPYDIINAFENVDEGISSLFSSLKVVRLLRLGRVARKLDHYLEYGAAVLVLLVCVFGLVAHWLACIWYSIGDYEVIDEVTNTIQIDSWLYQLALSIGTPYRYNTSAGIWEGGPSKDSLYVSSLYFTMTSLTTIGFGNIAPTTDVEKMFSVAMMMVGSLLYATIFGNVTTIFQQMYANTNRYHEMLNNVRDFLKLYQVPKGLSERVMDYIVSTWSMSKGIDTEKVLSICPKDMRADICVHLNRKVFNEHPAFRLASDGCLRALAVEFQTIHCAPGDLIYHAGESVDALCFVVSGSLEVIQDDEVVAILGKGDVFGDIFWKETTLAHACANVRALTYCDLHIIKREALLKVLDFYTAFANSFSRNLTLTCNLRKRIIFRKISDVKKEEEERLRQKNEVTLSIPVDHPVRKLFQKFKQQKELRNQGSTQGDPERNQLQVESRSLQNGASITGTSVVTVSQITPIQTSLAYVKTSESLKQNNRDAMELKPNGGADQKCLKVNSPIRMKNGNGKGWLRLKNNMGAHEEKKEDWNNVTKAESMGLLSEDPKSSDSENSVTKNPLRKTDSCDSGITKSDLRLDKAGEARSPLEHSPIQADAKHPFYPIPEQALQTTLQEVKHELKEDIQLLSCRMTALEKQVAEILKILSEKSVPQASSPKSQMPLQVPPQIPCQDIFSVSRPESPESDKDEIHF

SEQ ID NO: 4967 - protein, 309 aa, Homo sapiens
MGAKNNVTEFVLFGLFESREMQHTCFVVFFLFHVLTVLGNLLVIITINARKTLKSPMYFFLSQLSFADICYPSTTIPKMIADTFVEHKIISFNGCMTQLFSAHFFGGTEIFLLTAMAYDRYVAICRPLHYTAIMDCRKCGLLAGASWLAGFLHSILQTLLTVQLPFCGPNEIDNFFCDVHPLLKLACADTYMVGLIVVANSGMISLASFFILIISYVIILLNLRSQSSEDRRKAVSTCGSHVITVLLVLMPPMFMYIRPSTTLAADKLIILFNIVMPPLLNPLIYTLRNNDVKNAMRKLFRVKRSLGEK

SEQ ID NO: 4968 - protein, 530 aa, Homo sapiens
MAALRRLLWPPPRVSPPLCAHQPLLGPWGRPAVTTLGLPGRPFSSREDEERAVAEAAWRRRRRWGELSVAAAAGGGLVGLVCYQLYGDPRAGSPATGRPSKSAATEPEDPPRGRGMLPIPVAAAKETVAIGRTDIEDLDLYATSRERRFRLFASIECEGQLFMTPYDFILAVTTDEPKVAKTWKSLSKQELNQMLAETPPVWKGSSKLFRNLKEKGVISYTEYLFLLCILTKPHAGFRIAFNMFDTDGNEMVDKKEFLVLQEIFRKKNEKREIKGDEEKRAMLRLQLYGYHSPTNSVLKTDAEELVSRSYWDTLRRNTSQALFSDLAERADDITSLVTDTTLLVHFFGKKGKAELNFEDFYRFMDNLQTEVLEIEFLSYSNGMNTISEEDFAHILLRYTNVENTSVFLENVRYSIPEEKGITFDEFRSFFQFLNNLEDFAIALNMYNFASRSIGQDEFKRAVYVATGLKFSPHLVNTVFKIFDVDKDDQLSYKEFIGIMKDRLHRGFRGYKTVQKYPTFKSCLKKELHSR

SEQ ID NO: 4969 - protein, 528 aa, Homo sapiens
MAAYQQEEQMQLPRADAIRSRLIDTFSLIEHLQGLSQAVPRHTIRELLDPSRQKKLVLGDQHQLVRFSIKPQRIEQISHAQRLLSRLHVRCSQRPPLSLWAGWVLECPLFKNFIIFLVFLNTIILMVEIELLESTNTKLWPLKLTLEVAAWFILLIFILEILLKWLSNFSVFWKSAWNVFDFVVTMLSLLPEVVVLVGVTGQSVWLQLLRICRVLRSLKLLAQFRQIQIIILVLVRALKSMTFLLMLLLIFFYIFAVTGVYVFSEYTRSPRQDLEYHVFFSDLPNSLVTVFILFTLDHWYALLQDVWKVPEVSRIFSSIYFILWLLLGSIIFRSIIVAMMVTNFQNIRKELNEEMARREVQLKADMFKRQIIQRRKNMSHEALTSSHSKIEDRGASQQRESLDLSEVSEVESNYGATEEDLITSASKTEETLSKKREYQSSSCVSSTSSSYSSSSESRFSESIGRLDWETLVHENLPGLMEMDQDDRVWPRDSLFRYFELLEKLQYNLEERKKLQEFAVQALMNLEDK

SEQ ID NO: 4970 - protein, 494 aa, Homo sapiens
MAWPNVFQRGSLLSQFSHHHVVVFLLTFFSYSLLHASRKTFSNVKVSISEQWTPSAFNTSVELPVEIWSSNHLFPSAEKATLFLGTLDTIFLFSYAVGLFISGIVGDRLNLRWVLSFGMCSSALVVFVFGALTEWLRFYNKWLYCCLWIVNGLLQSTGWPCVVAVMGNWFGKAGRGVVFGLWSACASVGNILGACLASSVLQYGYEYAFLVTASVQFAGGIVIFFGLLVSPEEIGLSGIEAEENFEEDSHRPLINGGENEDEYEPNYSIQDDSSVAQVKAISFYQACCLPGVIPYSLAYACLKLVNYSFFFWLPFYLSNNFGWKEAEADKLSIWYDVGGIIGGTLQGFISDVLQKRAPVLALSLLLAVGSLIGYSRSPNDKSINALLMTVTGFFIGGPSNMISSAISADLGRQELIQRSSEALATVTGIVDGSGSIGAAVGQYLVSLIRDKLGWMWVFYFFILMTSCTIVFISPLIVREIFSLVLRRQAHILRE

SEQ ID NO: 4971 - protein, 305 aa, Homo sapiens
MVATNNVTEIIFVGFSQNWSEQRVISVMFLLMYTAVVLGNGLIVVTILASKVLTSPMYFFLSYLSFVEICYCSVMAPKLIFDSFIKRKVISLKGCLTQMFSLHFFGGTEAFLLMVMAYDRYVAICKPLHYMAIMNQRMCGLLVRIAWGGGLLHSVGQTFLIFQLPFCGPNIMDHYFCDVHPVLELACADTFFISLLIITNGGSISVVSFFVLMASYLIILHFLRSHNLEGQHKALSTCASHVTVVDLFFIPCSLVYIRPCVTLPADKIVAVFYTVVTPLLNPVIYSFRNAEVKNAMRRFIGGKVI

SEQ ID NO: 4972 - protein, 1064 aa, Homo sapiens
MMKFRFRRQGADPQREKLKQELFAFNKTVEHGFPNQPSALAFDPELRIMAIGTRSGAVKIYGAPGVEFTGLHRDAATVTQMHFLTGQGRLLSLLDDSSLHLWEIVHHNGCAHLEEALSFQLPSRPGFDGASAPLSLTRVTVVLLVAASDIAALGTEGSSVFFLDVTTLTLLEGQTLAPGEVLRSVPDDYRCGKALGPVESLQGHLRDPTKILIGYSRGLLVIWNQASQCVDHIFLGNQQLESLCWGRDSSTVVSSHSDGSYAVWSVDAGSFPTLQPTVATTPYGPFPCKAINKILWRNCESGGHFIIFSGGMPRASYGDRHCVSVLRAETLVTLDFTSRIIDFFTVHSTRPEDEFDDPQALAVLLEEELVVLDLQTPGWPAVPAPYLAPLHSSAITCSAHVASVPAKLWARIVSAGEQQSPQPVSSALSWPITGGRNLAQEPSQRGLLLTGHEDGTVRFWDASGVALRPLYKLSTAGLFQTDCEHADSLAQAAEDDWPPFRKVGCFDPYSDDPRLGVQKVALCKYTAQMVVAGTAGQVLVLELSDVPVEQAVSVAIIDLLQDREGFTWKGHERLSPRTGPLPWPAGFQPRVLVQCLPPAAVTAVTLHTEWSLVAFGTSHGFGLFDYQRKSPVLARCTLHPNDSLAMEGPLSRVKSLKKSLRQSFRRIRKSRVSGKKRAANASSKLQEANAQLAEQACPHDVEMTPVQRRIEPRSADDSLSGVVRCLYFADTFLRDGAHHGPTMWAGTNSGSVFAYALEVPAAAVGGEKRPEQAVEAVLGKEVQLMHRAPVVAIAVLDGRGRPLPEPYEASRDLAQAPDMQGGHAVLIASEEQFKVFTLPKVSAKTKFKLTAHEGCRVRKVALATFASVACEDYAETCLACLTNLGDVHVFSVPGLRPQVHYSCIRKEDISGIASCVFTRHGQGFYLISPSEFERFSLSARNITEPLCSLDINWPRDATQASYRIRESPKLSQANGTPSILLAPQSLDGSPDPAHSMGPDTPEPPEAALSPMSIDSATSADTTLDTTGDVTVEDVKDFLGSSEESEKNLRNLAEDEAHACAILIK

SEQ ID NO: 4973 - protein, 322 aa, Homo sapiens
MGFDVLLDQVGGMGRFQICLIAFFCITNILLFPNIVLENFTAFTPSHRCWVPLLDNDTVSDNDTGTLSKDDLLRISIPLDSNLRPQKCQRFIHPQWQLLHLNGTFPNTNEPDTEPCVDGWVYDRSSFLSTIVTEWDLVCESQSLKSMVQSLFMAGSLLGGLIYGHLSDRVGRKIICKLCFLQLAISNTCAAFAPTFLVYCILRFLAGFSTMTILGNTFILSLEWTLPRSRSMTIMVLLCSYSVGQMLLGGLAFAIQDWHILQLTVSTPIIVLFLSSWYEQSPHSLPVSEAMVDIERKILTPGICSVSGLVLSHDVHSTYCVT

SEQ ID NO: 4974 - protein, 229 aa, Homo sapiens
MWAAGRWGPTFPSSYAGFSADCRPRSRPSSDSCSVPMTGARGQGLEVVRSPSPPLPLSCSNSTRSLLSPLGHQSFQFDEDDGDGEDEEDVDDEEDVDEDAHDSEAKVASLRGMELQGCASTQVESENNQEEQKQVRLPESRLTPWEVWFIGKEKEERDRLQLKALEELNQQLEKRKEMEEREKRKIIAEEKHKEWVQKKNEQVRRGKWIHTLTSLLQNISSYYTSLPRF

SEQ ID NO: 4975 - protein, 971 aa, Homo sapiens
MQTACQAVQHQRGRRQYNKLRNLLKDARHDCILFANEFQQCCYLPRERGESMEKWQTRSIYNAAVWYYHHCQDRMPIVMVTEDEEAIQQYGSETEGVFVITFKNYLDNFWPDLKAAHELCDSILQSRRERENESQESHGKEYPEHLPLEVLEAGIKSGRYIQGILNVNKHRAQIEAFVRLQGASSKDSDLVSDILIHGMKARNRSIHGDVVVVELLPKNEWKGRTVALCENDCDDKASGESPSEPMPTGRVVGILQKNWRDYVVTFPSKEEVQSQGKNAQKILVTPWDYRIPKIRISTQQAETLQDFRVVVRIDSWESTSVYPNGHFVRVLGRIGDLEGEIATILVENSISVIPFSEAQMCEMPVNTPESPWKVSPEEEQKRKDLRKSHLVFSIDPKGCEDVDDTLSVRTLNNGNLELGVHIADVTHFVAPNSYIDIEARTRATTYYLADRRYDMLPSVLSADLCSLLGGVDRYAVSIMWELDKASYEIKKVWYGRTIIRSAYKLFYEAAQELLDGNLSVVDDIPEFKDLDEKSRQAKLEELVWAIGKLTDIARHVRAKRDGCGALELEGVEVCVQLDDKKNIHDLIPKQPLEVHETVAECMILANHWVAKKIWESFPHQALLRQHPPPHQEFFSELRECAKAKGFFIDTRSNKTLADSLDNANDPHDPIVNRLLRSMATQAMSNALYFSTGSCAEEEFHHYGLALDKYTHFTSPIRRYSDIVVHRLLMAAISKDKKMEIKGNLFSNKDLEELCRHINNRNQAAQHSQKQSTELFQCMYFKDKDPATEERCISDGVIYSIRTNGVLLFIPRFGIKGAAYLKNKDGLVISCGPDSCSEWKPGSLQRFQNKITSTTTDGESVTFHLFDHVTVRISIQASRCHSDTIRLEIISNKPYKIPNTELIHQSSPLLKSELVKEVTKSVEEAQLAQEVKVNIIQEEYQEYRQTKGRSLYTLLEEIRDLALLDVSNNYGI

SEQ ID NO: 4976 - protein, 508 aa, Homo sapiens
MVELVISPSLTVNSDCLDKLKFNRADAAVWTLSDRQGITKSAPLRVSQLFSRSCPRVLPRQPSTAMAAYGQTQYSAGIQQATPYTAYPPPAQAYGIPSYSIKTEDSLNHSPGQSGFLSYGSSFSTSPTGQSPYTYQMHGTTGFYQGGNGLGNAAGFGSVHQDYPSYPGFPQSQYPQYYGSSYNPPYVPASSICPSPLSTSTYVLQEASHNVPNQSSESLAGEYNTHNGPSTPAKEGDTDRPHRASDGKLRGRSKRSSDPSPAGDNEIERVFVWDLDETIIIFHSLLTGTFASRYGKDCDQIHVDDVSSDDNGQDLSTYNFSADGFHSSAPGANLCLGSGVHGGVDWMRKLAFRYRRVKEMYNTYKNNVGGLIGTPKRETWLQLRAELEALTDLWLTHSLKALNLINSRPNCVNVLVTTTQLIPALAKVLLYGLGSVFPIENIYSATKTGKESCFERIMQRFGRKAVYVVIGDGVEEEQGAKKHNMPFWRISCHADLEALRHALELEYL

SEQ ID NO: 4977 - protein, 686 aa, Homo sapiens
MADRRRAWNTEDDLPVYLARPGSAAQTPRQKYGGMFAAVEGAYENKTIDFDAYSVGRRGSARTPRSAGRPDAVGLPGPGGSEDTASDVSEPSGSAVSSPGERDERPPTLRIRRPAPRDLPLGRDNGQSDRLLIKGGRIINDDQSLYADVYLEDGLIKQIGENLIVPGGVKTIEANGRMVIPGGIDVNTYLQKPSQGMTAADDFFQGTRAALVGGTTMIIDHVVPEPGSSLLTSFEKWHEAADTKSCCDYSLHVDITSWYDGVREELEVLVQDKGVNSFQVYMAYKDVYQMSDSQLYEAFTFLKGLGAVILVHAENGDLIAQEQKRILEMGITGPEGHALSRPEELEAEAVFRAITIAGRINCPVYITKVMSKSAADIIALARKKGPLVFGEPIAASLGTDGTHYWSKNWAKAAAFVTSPPLSPDPTTPDYLTSLLACGDLQVTGSGHCPYSTAQKAVGKDNFTLIPEGVNGIEERMTVVWDKAVATGKMDENQFVAVTSTNAAKIFNLYPRKGRIAVGSDADVVIWDPDKLKTITAKSHKSAVEYNIFEGMECHGSPLVVISQGKIVFEDGNINVNKGMGRFIPRKAFPEHLYQRVKIRNKVFGLQGVSRGMYDGPVYEVPATPKYATPAPSAKSSPSKHQPPPIRNLHQSNFSLSGAQIDDNNPRRTGHRIVAPPGGRSNITSLG

SEQ ID NO: 4978 - protein, 726 aa, Homo sapiens
MSPAPDAAPAPASISLFDLSADAPVFQGLSLVSHAPGEALARAPRTSCSGSGERESPERKLLQGPMDISEKLFCSTCDQTFQNHQEQREHYKLDWHRFNLKQRLKDKPLLSALDFEKQSSTGDLSSISGSEDSDSASEEDLQTLDRERATFEKLSRPPGFYPHRVLFQNAQGQFLYAYRCVLGPHQDPPEEAELLLQNLQSRGPRDCVVLMAAAGHFAGAIFQGREVVTHKTFHRYTVRAKRGTAQGLRDARGGPSHSAGANLRRYNEATLYKDVRDLLAGPSWAKALEEAGTILLRAPRSGRSLFFGGKGAPLQRGDPRLWDIPLATRRPTFQELQRVLHKLTTLHVYEEDPREAVRLHSPQTHWKTVREERKKPTEEEIRKICRDEKEALGQNEESPKQGSGSEGEDGFQVELELVELTVGTLDLCESEVLPKRRRRKRNKKEKSRDQEAGAHRTLLQQTQEEEPSTQSSQAVAAPLGPLLDEAKAPGQPELWNALLAACRAGDVGVLKLQLAPSPADPRVLSLLSAPLGSGGFTLLHAAAAAGRGSVVRLLLEAGADPTVQDSRARPPYTVAADKSTRNEFRRFMEKNPDAYDYNKAQVPGPLTPEMEARQATRKREQKAARRQREEQQQRQQEQEEREREEQRRFAALSDREKRALAAERRLAAQLGAPTSPIPDSAIVNTRRCWSCGASLQGLTPFHYLDFSFCSTRCLQDHRRQAGRPSS

SEQ ID NO: 4979 - protein, 1966 aa, Homo sapiens
MSESEGGKDTTPEPSPANGAGPGPEWGLCPGPPAVEGESSGASGLGTPKRRNQHSKHKTVAVASAQRSPRALFCLTLANPLRRSCISIVEWKPFDILILLTIFANCVALGVYIPFPEDDSNTANHNLEQVEYVFLVIFTVETVLKIVAYGLVLHPSAYIRNGWNLLDFIIVVVGLFSVLLEQGPGRPGDAPHTGGKPGGFDVKALRAFRVLRPLRLVSGVPSLHIVLNSIMKALVPLLHIALLVLFVIIIYAIIGLELFLGRMHKTCYFLGSDMEAEEDPSPCASSGSGRACTLNQTECRGRWPGPNGGITNFDNFFFAMLTVFQCVTMEGWTDVLYWMQDAMGYELPWVYFVSLVIFGSFFVLNLVLGVLSGEFSKEREKAKARGDFQKQREKQQMEEDLRGYLDWITQAEELDMEDPSADDNLGPQLAELTNRRRGRLRWFSHSTRSTHSTSSHASLPASDTGSMTETQGDEDEEEGALASCTRCLNKIMKTRVCRRLRRANRVLRARCRRAVKSNACYWAVLLLVFLNTLTIASEHHGQPVWLTQIQEYANKVLLCLFTVEMLLKLYGLGPSAYVSSFFNRFDCFVVCGGILETTLVEVGAMQPLGISVLRCVRLLRIFKVTRHWASLSNLVASLLNSMKSIASLLLLLFLFIIIFSLLGMQLFGGKFNFDQTHTKRSTFDTFPQALLTVFQILTGEDWNVVMYDGIMAYGGPFFPGMLVCIYFIILFICGNYILLNVFLAIAVDNLASGDAGTAKDKGGEKSNEKDLPQENEGLVPGVEKEEEEGARREGADMEEEEEEEEEEEEEEEEEGAGGVELLQEVVPKEKVVPIPEGSAFFCLSQTNPLRKGCHTLIHHHVFTNLILVFIILSSVSLAAEDPIRAHSFRNHILGYFDYAFTSIFTVEILLKMTVFGAFLHRGSFCRSWFNMLDLLVVSVSLISFGIHSSAISVVKILRVLRVLRPLRAINRAKGLKHVVQCVFVAIRTIGNIMIVTTLLQFMFACIGVQLFKGKFYTCTDEAKHTPQECKGSFLVYPDGDVSRPLVRERLWVNSDFNFDNVLSAMMALFTVSTFEGWPALLYKAIDAYAEDHGPIYNYRVEISVFFIVYIIIIAFFMMNIFVGFVIITFRAQGEQEYQNCELDKNQRQCVEYALKAQPLRRYIPKNPHQYRVWATVNSAAFEYLMFLLILLNTVALAMQHYEQTAPFNYAMDILNMVFTGLFTIEMVLKIIAFKPKHYFTDAWNTFDALIVVGSIVDIAVTEVNNGGHLGESSEDSSRISITFFRLFRVMRLVKLLSKGEGIRTLLWTFIKSFQALPYVALLIAMIFFIYAVIGMQMFGKVALQDGTQINRNNNFQTFPQAVLLLFRCATGEAWQEIMLASLPGNRCDPESDFGPGEEFTCGSNFAIAYFISFFMLCAFLIINLFVAVIMDNFDYLTRDWSILGPHHLDEFKRIWSEYDPGAKGRIKHLDVVALLRRIQPPLGFGKLCPHRVACKRLVAMNMPLNSDGTVTFNATLFALVRTSLKIKTEGNLEQANQELRIVIKKIWKRMKQKLLDEVIPPPDEEEVTVGKFYATFLIQDYFRKFRRRKEKGLLGNDAAPSTSSALQAGLRSLQDLGPEMRQALTCDTEEEEEEGQEGVEEEDEKDLETNKATMVSQPSARRGSGISVSLPVGDRLPDSLSFGPSDDDRGTPTSSQPSVPQAGSNTHRRGSGALIFTIPEEGNSQPKGTKGQNKQDEDEEVPDRLSYLDEQAGTPPCSVLLPPHRAQRYMDGHLVPRRRLLPPTPAGRKPSFTIQCLQRQGSCEDLPIPGTYHRGRNSGPNRAQGSWATPPQRGRLLYAPLLLVEEGAAGEGYLGRSSGPLRTFTCLHVPGTHSDPSHGKRGSADSLVEAVLISEGLGLFARDPRFVALAKQEIADACRLTLDEMDNAASDLLAQGTSSLYSDEESILSRFDEEDLGDEMACVHAL

SEQ ID NO: 4980 - protein, 763 aa, Homo sapiens
MEASLTRRLLFKDRHFTCSKIIGRRFACFAQRLSHRRKQSQCDLLNESTGQLPTTCSSAASNSINWNCRVKMTQQMQNLHLCQSKKHSAPSSPNAAKRLYRNLSEKLKGSHSSFDEAYFRTRTDRLSLRKTSVNFQGNEAMFEAVEQQDMDAVQILLYQYTPEELDLNTPNSEGLTPLDIAIMTNNVPIARILLRTGARESPHFVSLESRAMHLNTLVQEAQERVSELSAQVENEGFTLDNTEKEKQLKAWEWRYRLYRRMKTGFEHARAPEMPTNVCLMVTSSTSLTVSFQEPLSVNAAVVTRYKVEWSMSEDFSPLAGEIIMDNLQTLRCTITGLTMGQQYFVQVSAYNMKGWGPAQTTTPACASPSNWKDYDDREPRHKGQSEVLEGLLQQVRALHQHYSCRESTKLQTTGRKQSVSRSLKHLFHSSNKFVKTLKRGLYIAVIFYYKDNILVTNEDQVPIVEIDDSHTSSITQDFLWFTKLSCMWEDIRWLRQSIPISSSSSTVLQTRQKMLAATAQLQNLLGTHNLGRVYYEPIKDRHGNILIVTIREVEMLYSFFNGKWMQISKLQSQRKSLSTPEEPTALDILLITIQDILSYHKRSHQRLFPGLYLGYLKLCSSVDQIKVLVTQKLPNILCHVKIRENNNISREEWEWIQKLSGSESMESVDHTSDCPMQLFFYELQMAVKALLQQINIPLHQARNFRLYTQEVLEMGHNVSFLLLLPASDDVCTAPGQNNPYTPHSGFLNLPLQMFELGIVACFT

SEQ ID NO: 4981 - protein, 1001 aa, Homo sapiens
MIFPVARYALRWLRRPEDRAFSRAAMEMALRGVRKVLCVAEKNDAAKGIADLLSNGRMRRREGLSKFNKIYEFDYHLYGQNVTMVMTSVSGHLLAHDFQMQFRKWQSCNPLVLFEAEIEKYCPENFVDIKKTLERETRQCQALVIWTDCDREGENIGFEIIHVCKAVKPNLQVLRARFSEITPHAVRTACENLTEPDQRVSDAVDVRQELDLRIGAAFTRFQTLRLQRIFPEVLAEQLISYGSCQFPTLGFVVERFKAIQAFVPEIFHRIKVTHDHKDGIVEFNWKRHRLFNHTACLVLYQLCVEDPMATVVEVRSKPKSKWRPQALDTVELEKLASRKLRINAKETMRIAEKLYTQGYISYPRTETNIFPRDLNLTVLVEQQTPDPRWGAFAQSILERGGPTPRNGNKSDQAHPPIHPTKYTNNLQGDEQRLYEFIVRHFLACCSQDAQGQETTVEIDIAQERFVAHGLMILARNYLDVYPYDHWSDKILPVYEQGSHFQPSTVEMVDGETSPPKLLTEADLIALMEKHGIGTDATHAEHIETIKARMYVGLTPDKRFLPGHLGMGLVEGYDSMGYEMSKPDLRAELEADLKLICDGKKDKFVVLRQQVQKYKQVFIEAVAKAKKLDEALAQYFGNGTELAQQEDIYPAMPEPIRKCPQCNKDMVLKTKKNGGFYLSCMGFPECRSAVWLPDSVLEASRDSSVCPVCQPHPVYRLKLKFKRGSLPPTMPLEFVCCIGGCDDTLREILDLRFSGGPPRASQPSGRLQANQSLNRMDNSQHPQPADSRQTGSSKALAQTLPPPTAAGESNSVTCNCGQEAVLLTVRKEGPNRGRQFFKCNGGSCNFFLWADSPNPGAGGPPALAYRPLGASLGCPPGPGIHLGGFGNPGDGSGSGTSCLCSQPSVTRTVQKDGPNKGRQFHTCAKPREQQCGFFQWVDENTAPGTSGAPSWTGDRGRTLESEARSKRPRASSSDMGSTAKKPRKCSLCHQPGHTRPFCPQNR

SEQ ID NO: 4982 - protein, 473 aa, Homo sapiens
MSTELFSSTREEGSSGSGPSFRSNQRKMLNLLLERDTSFTVCPDVPRTPVGKFLGDSANLSILSGGTPKRCLDLSNLSSGEITATQLTTSADLDETGHLDSSGLQEVHLAGMNHDQHLMKCSPAQLLCSTPNGLDRGHRKRDAMCSSSANKENDNGNLVDSEMKYLGSPITTVPKLDKNPNLGEDQAEEISDELMEFSLKDQEAKVSRSGLYRSPSMPENLNRPRLKQVEKFKDNTIPDKVKKKYFSGQGKLRKGLCLKKTVSLCDITITQMLEEDSNQGHLIGDFSKVCALPTVSGKHQDLKYVNPETVAALLSGKFQGLIEKFYVIDCRYPYEYLGGHIQGALNLYSQEELFNFFLKKPIVPLDTQKRIIIVFHCEFSSERGPRMCRCLREEDRSLNQYPALYYPELYILKGGYRDFFPEYMELCEPQSYCPMHHQDHKTELLRCRSQSKVQEGERQLREQIALLVKDMSP

SEQ ID NO: 4983 - protein, 805 aa, Homo sapiens
MAFSPWQILSPVQWAKWTWSAVRGGAAGEDEAGGPEGDPEEEDSQAETKSLSFSSDSEGNFETPEAETPIRSPFKESCDPSLGLAGPGAKSQESQEADEQLVAEVVEKCSSKTCSKPSENEVPQQAIDSHSVKNFREEPEHDFSKISIVRPFSIETKDSTDISAVLGTKAAHGCVTAVSGKALPSSPPDALQDEAMTEGSMGVTLEASAEADLKAGNSCPELVPSRRSKLRKPKPVPLRKKAIGGEFSDTNAAVEGTPLPKASYHFSPEELDENTSPLLGDARFQKSPPDLKETPGTLSSDTNDSGVELGEESRSSPLKLEFDFTEDTGNIEARKALPRKLGRKLGSTLTPKIQKDGISKSAGLEQPTDPVARDGPLSQTSSKPDPSQWESPSFNPFGSHSVLQNSPPLSSEGSYHFDPDNFDESMDPFKPTTTLTSSDFCSPTGNHVNEILESPKKAKSRLITSGCKVKKHETQSLALDACSRDEGAVISQISDISNRDGHATDEEKLASTSCGQKSAGAEVKGEPEEDLEYFECSNVPVSTINHAFSSSEAGIEKETCQKMEEDGSTVLGLLESSAEKAPVSVSCGGESPLDGICLSESDKTAVLTLIREEIITKEIEANEWKKKYEETRQEVLEMRKIVAEYEKTIAQMIEDEQRTSMTSQKSFQQLTMEKEQALADLNSVERSLSDLFRRYENLKGVLEGFKKNEEALKKCAQDYLARVKQEEQRYQALKIHAEEKLDKANEEIAQVRTKAKAESAALHAGLRKEQMKVESLERALQQKNQEIEELTKICDELIAKLGKTD

SEQ ID NO: 4984 - protein, 1058 aa, Homo sapiens
MDLGPLNICEEMTILHGGFLLAEQLFHPKALAELTKSDWERVGRPIVEALREISSAAAHSQPFAWKKKALIIIWAKVLQPHPVTPSDTETRWQEDLFFSVGNMIPTINHTILFELLKSLEASGLFIQLLMALPTTICHAELERFLEHVTVDTSAEDVAFFLDVWWEVMKHKGHPQDPLLSQFSAMAHKYLPALDEFPHPPKRLRSDPDACPTMPLLAMLLRGLTQIQSRILGPGRKCCALANLADMLTVFALTEDDPQEVSATVYLDKLATVISVWNSDTQNPYHQQALAEKVKEAERDVSLTSLAKLPSETIFVGCEFLHHLLREWGEELQAVLRSSQGTSYDSYRLCDSLTSFSQNATLYLNRTSLSKEDRQVVSELAECVRDFLRKTSTVLKNRALEDITASIAMAVIQQKMDRHMEVCYIFASEKKWAFSDEWVACLGSNRALFRQPDLVLRLLETVIDVSTADRAIPESQIRQVIHLILECYADLSLPGKNKVLAGILRSWGRKGLSEKLLAYVEGFQEDLNTTFNQLTQSASEQGLAKAVASVARLVIVHPEVTVKKMCSLAVVNLGTHKFLAQILTAFPALRFVEEQGPNSSATFMVSCLKETVWMKFSTPKEEKQFLELLNCLMSPVKPQGIPVAALLEPDEVLKEFVLPFLRLDVEEVDLSLRIFIQTLEANACREEYWLQTCSPFPLLFSLCQLLDRFSKYWQLPKEKRCLSLDRKDLAIHILELLCEIVSANAETFSPDVWIKSLSWLHRKLEQLDWTVGLRLKSFFEGHFKCEVPATLFEICKLSEDEWTSQAHPGYGAGTGLLAWMECCCVSSGISERMLSLLVVDVGNPEEVRLFSKGFLVALVQVMPWCSPQEWQRLHQLTRRLLEKQLLHVPYSLEYIQFVPLLNLKPFAQELQLSVLFLRTFQFLCSHSCRDWLPLEGWNHVVKLLCGSLTRLLDSVRAIQAAGPWVQGPEQDLTQEALFVYTQVFCHALHIMAMLHPEVCEPLYVLALETLTCYETLSKTNPSVSSLLQRAHEQRFLKSIAEGIGPEERRQTLLQKMSSF

SEQ ID NO: 4985 - protein, 1054 aa, Homo sapiens
MLQKREKVLLLRTFQGRTLRIVREHYLRPCVPCHSPLCPQPAACSHDGKLLSSDVTHYVIPDWKVVQDYLEILEFPELKGIIFMQTACQAVQHQRGRRQYNKLRNLLKDARHDCILFANEFQQCCYLPRERGESMEKWQTRSIYNAAVWYYHHCQDRMPIVMVTEDEEAIQQYGSETEGVFVITFKNYLDNFWPDLKAAHELCDSILQSRRERENESQESHGKEYPEHLPLEVLEAGIKSGRYIQGILNVNKHRAQIEAFVRLQGASSKDSDLVSDILIHGMKARNRSIHGDVVVVELLPKNEWKGRTVALCENDCDDKASGESPSEPMPTGRVVGILQKNWRDYVVTFPSKEEVQSQGKNAQKILVTPWDYRIPKIRISTQQAETLQDFRVVVRIDSWESTSVYPNGHFVRVLGRIGDLEGEIATILVENSISVIPFSEAQMCEMPVNTPESPWKVSPEEEQKRKDLRKSHLVFSIDPKGCEDVDDTLSVRTLNNGNLELGVHIADVTHFVAPNSYIDIEARTRATTYYLADRRYDMLPSVLSADLCSLLGGVDRYAVSIMWELDKASYEIKKVWYGRTIIRSAYKLFYEAAQELLDGNLSVVDDIPEFKDLDEKSRQAKLEELVWAIGKLTDIARHVRAKRDGCGALELEGVEVCVQLDDKKNIHDLIPKQPLEVHETVAECMILANHWVAKKIWESFPHQALLRQHPPPHQEFFSELRECAKAKGFFIDTRSNKTLADSLDNANDPHDPIVNRLLRSMATQAMSNALYFSTGSCAEEEFHHYGLALDKYTHFTSPIRRYSDIVVHRLLMAAISKDKKMEIKGNLFSNKDLEELCRHINNRNQAAQHSQKQSTELFQCMYFKDKDPATEERCISDGVIYSIRTNGVLLFIPRFGIKGAAYLKNKDGLVISCGPDSCSEWKPGSLQRFQNKITSTTTDGESVTFHLFDHVTVRISIQASRCHSDTIRLEIISNKPYKIPNTELIHQSSPLLKSELVKEVTKSVEEAQLAQEVKVNIIQEEYQEYRQTKGRSLYTLLEEIRDLALLDVSNNYGI

SEQ ID NO: 4986 - protein, 321 aa, Homo sapiens
MFLSSRMITSVSPSTSTNSSFLLTGFSGMEQQYPWLSIPFSSIYAMVLLGNCMVLHVIWTEPSLHQPMFYFLSMLALTDLCMGLSTVYTVLGILWGIIREISLDSCIAQSYFIHGLSFMESSVLLTMAFDRYIAICNPLRYSSILTNSRIIKIGLTIIGRSFFFITPPIICLKFFNYCHFHILSHSFCLHQDLLRLACSDIRFNSYYALMLVICILLLDAILILFSYILILKSVLAVASQEERHKLFQTCISHICAVLVFYIPIISLTMVHRFGKHLSPVAHVLIGNIYILFPPLMNPIIYSVKTQQIHTRMLRLFSLKRY

SEQ ID NO: 4987 - protein, 1146 aa, Homo sapiens
MKTLRARFKKTELRLSPTDLGSCPPCGPCPIPKPAARGRRQSQDWGKSDERLLQAVENNDAPRVAALIARKGLVPTKLDPEGKSAFHLAAMRGAASCLEVMIAHGSNVMSADGAGYNALHLAAKYGHPQCLKQLLQASCVVDVVDSSGWTALHHAAAGGCLSCSEVLCSFKAHLNPQDRSGATPLIIAAQMCHTDLCRLLLQQGAAANDQDLQGRTALMLACEGASPETVEVLLQGGAQPGITDALGQDAAHYGALAGDKLILHLLQEAAQRPSPPSALTEDDSGEASSQNSMSSHGKQGAPKKRKAPPPPASIPMPDDRDAYEEIVRLRQERGRLLQKIRGLEQHKERRQQESPEASSLHILERQVQELQQLLVERQEEKESLGREVESLQSRLSLLENERENTSYDVTTLQDEEGELPDLPGAEVLLSRQLSPSAQEHLASLQEQVAVLTRQNQELMEKVQILENFEKDETQMEVEALAEVIPLALYDSLRAEFDQLRRQHAEALQALRQQETREVPREEGAACGESEVAGATATKNGPTHMELNGSVAPETKVNGAETIDEEAAGDETMEARTMEAEATGAEATGAEATGAKVTETKPTGAEVREMETTEEEANMETKPTGAQATDTETTGVEAMGVEATKTKAEEAEMQAYGVGAGQAEPPVTGTTNMEATGSRATGMESTGVSATGVENPGVEATVPGISAGPILHPGAAEASEKLQVELETRIRGLEEALRQREREAAAELEAALGKCEAAEAEAGRLRERVREAEGSGASGGGGGDTTQLRAALEQAREDLRDRDSRLRELEAASACLDEARASRLLAEEEARGLRAELAQREEARLEQSRELEVLREQLATARATGEQQRTAAAELGRARDAAEARVAELPAACEEARQGLAELREASEALRQSVVPASEHRRLQEEALELRGRAASLEQEVVATGKEAARLRAELERERVCSVALSEHERIVGTLQANVAQLEGQLEELGRRHEKTSAEVFQVQREALFMKSERHAAEAQLATAEQQLRGLRTEAERARQAQSRAQEALDKAKEKDKKITELSKEVFNLKEALKEQPAALATPEVEALRDQVKDLQQQLQEAARDHSSVVALYRSHLLYAIQGQMDEDVQRILSQILQMQRLQAQGR

SEQ ID NO: 4988 - protein, 504 aa, Homo sapiens
MGAGGPRRGEGPPDGGWGWVVLGACFVVTGFAYGFPKAVSVFFRALMRDFDAGYSDTAWVSSIMLAMLYGTGPVSSILVTRFGCRPVMLAGGLLASAGMILASFATRLLELYLTAGVLTGLGLALNFQPSLIMLGLYFERRRPLANGLAAAGSPVFLSALSPLGQQLLERFGWRGGFLLLGGLLLHCCACGAVMRPPPGPGPRPRRDSAGDRAGDAPGEAEADGAGLQLREASPRVRPRRRLLDLAVCTDRAFAVYAVTKFLMALGLFVPAILLVNYAKDAGVPDTDAAFLLSIVGFVDIVARPACGALAGLARLRPHVPYLFSLALLANGLTDLSSARARSYGALVAFCVAFGLSYGMVGALQFEVLMAAVGAPRFPSALGLVLLVEAAAVLIGPPSAGRLVDVLKNYEIIFYLAGSEVALAGVFMAVATNCCLRCAKAAPSGPGTEGGASDTEDAEAEGDSEPLPVVAEEPGNLEALEVLSARGEPTEPEIEARPRLAAESV

SEQ ID NO: 4989 - protein, 1641 aa, Homo sapiens
MTESSMKKLASTLLDAITDKDPLVQEQVCSALCSLGEARPVETLRACEEYLRQHDKLAHPYRAAVLRAMERVLSSRASELDKDTASTIILLASSEMTKTKDLVWDWQQAASGVLVAVGRQFISKVMEELLRRLHPGTLPHCAVLHTLASLSVANAFGVVPFLPSVLSSLLPVLGVAKQDTVRVAFCSALQRFSEGALEYLANLDRAPDPTVRKDAFATDIFSAYDVLFHQWLQSREAKLRLAVVEALGPMSHLLPSERLEEQLPKLLPGILALYKKHAETFYLSKSLGQILEAAVSVGSRTLETQLDALLAALHSQICVPVESSSPLVMSNQKEVLRCFTVLACSSPDRLLAFLLPRLDTSNERTRVGTLQVVRHVINSAAAQMEDKKPFILSSMRLPLLDTNSKVKRAVVQVISAMAHHGYLEQPGGEAMIEYIVQQCALPPEQEPEKPGPGSKDPKADSVRAISVRTLYLVSTTVDRMSHVLWPYLLQFLTPVRFTGALTPLCRSLVHLAQKRQEAGADAFLIQYDAHASLPSPYAVTGRLLVVSSSPYLGDGRGAAALRLLSVLHPNIHPLLGQHWETTVPLLLGYLDEHTEETLPQEEWEEKLLMFLRDTLAIISDNAWICQLSLELCRQLPCYDEAPQEKNFLYKCIGTTLGAASSKEVVRKHLQELLETARYQEEAEREGLACCFGICAISHLEDTLAQLEDFVRSEVFRKSIGILNIFKDRSENEVEKVKSALILCYGHVAARAPRELVLAKVESDILRNICQHFSTKVLGIKVETKDPALKLCLVQSVCMVSRAICSSTQAGSFHFTRKAELVAQMMEFIRAEPPDSLRTPIRKKAMLTCTYLVSVEPALDEQARADVIHGCLHSIMALLPEPKEEDGGCQKSLYLETLHALEDLLTSLLQRNMTPQGLQIMIEHLSPWIKSPRGHERARALGLSALLLRYFLEHLRVSALVPFHNLGLLIGLFSPRCADLWPATRQEAVDCVYSLLYLQLGYEGFSRDYRDDVAERLLSLKDGLVHPDPAILFHTCHSVGQIIAKRLPPDQLISLLLTMFEALGDPEKNCSRAATVMINCLLQERGGVLQEKVPEIVSVLRSKLQEAQGEHVLPAAQHSVYLLATQHCAAVVSSLLGSPLPLDSHTCMLWRALAVEPRLAAQVLGLLLEKMSRDVPFKESRAFLLGRTPDRVATLLPLSATCALFEVMSTPAAGPAVLELYPQLFVVLLLRVSCTVGVQLPRNLQAQERRGASPALATRNLEPCSSAVDTLRSMLLRSGSEDVVQRMDLEGGWELLRTSAGHEEGATRLARAMAEHAGPRLPLVLKTLACTHSSAYENQRVTTTAFLAELLNSNVANDLMLLDSLLESLAARQKDTCASVRRLVLRGLANLASGCPDKVRTHGPQLLTAMIGGLDDGDNPHSPVALEAMLGLARLVHLVESWDLRSGLLHVAIRIRPFFDSEKMEFRTASIRLFGHLNKVCHGDCEDVFLDQVVGGLAPLLLHLQDPQATVASACRFALRMCGPNLACEELSAAFQKHLQEGRALHFGEFLNTTCKHLMHHFPDLLGRLLTTCLFYFKSSWENVRAAAPLFTGFLVLHSEPRQQPQVDLDQLIAALQILLKDPAPEVRTRAAEALGRLVKLA

SEQ ID NO: 4990 - protein, 126 aa, Homo sapiens
MPEPAKSAPAPKKGSKKAVTKAQKKDGKKRKRSRKESYSVYVYKVLKQVHPDTGISSKAMGIMNSFVNDIFERIAGEASRLAHYNKRSTITSREIQTAVRLLLPGELAKHAVSEGTKAVTKYTSSK

SEQ ID NO: 4991 - protein, 596 aa, Homo sapiens
MSNYSVSLVGPAPWGFRLQGGKDFNMPLTISSLKDGGKAAQANVRIGDVVLSIDGINAQGMTHLEAQNKIKGCTGSLNMTLQRASAAPKPEPVPVQKGEPKEVVKPVPITSPAVSKVTSTNNMAYNKAPRPFGSVSSPKVTSIPSPSSAFTPAHATTSSHASPSPVAAVTPPLFAASGLHANANLSADQSPSALSAGKTAVNVPRQPTVTSVCSETSQELAEGQRRGSQGDSKQQNGPPRKHIVERYTEFYHVPTHSDASKKRLIEDTEDWRPRTGTTQSRSFRILAQITGTEHLKESEADNTKKANNSQEPSPQLASSVASTRSMPESLDSPTSGRPGVTSLTAAAAFKPVGSTGVIKSPSWQRPNQGVPSTGRISNSATYSGSVAPANSALGQTQPSDQDTLVQRAEHIPAGKRTPMCAHCNQVIRGPFLVALGKSWHPEEFNCAHCKNTMAYIGFVEEKGALYCELCYEKFFAPECGRCQRKILGEVISALKQTWHVSCFVCVACGKPIRNNVFHLEDGEPYCETDYYALFGTICHGCEFPIEAGDMFLEALGYTWHDTCFVCSVCCESLEGQTFFSKKDKPLCKKHAHSVNF

SEQ ID NO: 4992 - protein, 613 aa, Homo sapiens
MSQPGIPASGGAPASLQAQNGAALASGSPYTNGPVQNALLSSQESVSQGYNFQLPGSYPHPIPAKTLNPVSGQSNYGGSQGSGQTLNRPPVASNPVTPSLHSGPAPRMPLPASQNPATTPMPSSSFLPEANLPPPLNWQYNYPSTASQTNHCPRASSQPTVSGNTSLTTNHQYVSSGYPSLQNSFIKSGPSVPPLVNPPLPTTFQPGAPHGPPPAGGPPPVRALTPLTSSYRDVPQPLFNSAVNQEGITSNTNNGSMVVHSSYDEIEGGGLLATPQLTNKNPKMSRSVGYSYPSLPPGYQNTTPPGATGVPPSSLNYPSGPQAFTQTPLGANHLTTSMSGLSLQPEGLRVVNLLQERNMLPSTPLKPPVPNLHEDIQKLNCNPELFRCTLTSIPQTQALLNKAKLPLGLLLHPFKDLVQLPVVTSSTIVRCRSCRTYINPFVSFLDQRRWKCNLCYRVNDVPEEFLYNPLTRVYGEPHRRPEVQNATIEFMAPSEYMLRPPQPPVYLFVFDVSHNAVETGYLNSVCQSLLDNLDLLPGNTRTKIGFITFDSTIHFYGLQESLSQPQMLIVSDIEDVFIPMPENLLVNLNESKESVIGVSSEETLITCLEIAMR

SEQ ID NO: 4993 - protein, 148 aa, Homo sapiens
PARSALLPGPLELQPPRGLPSDYGRPLSFPPPRIRESIQEDLAEEAPCLQGGRASGLGEAGMSAWLRAIGLERYEEGLVHNGWDDLEFLRWGRGWPRGRSWGPQDPLAHLTSQPVLLHSDITEEDLEEAGVQDPAHKRLLLDTLQLSK

SEQ ID NO: 4994 - protein, 252 aa, Homo sapiens
MFSQQQQQQLQQQQQQLQQLQQQQLQQQQLQQQQLLQLQQLLQQSPPQAPLPMAVSRGLPPQQPQQPLLNLQGTNSASLLNGSMLQRALLLQQLQGLDQFAMPPATYDTAGLTMPTATLGNLRGYGMASPGLAAPSLTPPQLATPNLQQFFPQATRQSLLGPPPVGVPMNPSQFNLSGRNPQKQARTSSSTTPNRKDSSSQTMPVEDKSDPPEGSEEAAEPRMDTPEDQDLPPCPEDIAKEKRTPAPEPEPC

SEQ ID NO: 4995 - protein, 217 aa, Homo sapiens
MEVENEASCSPGSASGGSREYKVVMLGAGGVGKSAMTMQFISHQFPDYHDPTIEDAYKTQVRIDNEPAYLDILDTAGQAEFTAMREQYMRGGEGFIICYSVTDRQSFQEAAKFKELIFQVRHTYEIPLVLVGNKIDLEQFRQVSTEEGLSLAQEYNCGFFETSAALRFCIDDAFHGLVREIRKKESMPSLMEKKLKRKDSLWKKLKGSLKKKRENMT

SEQ ID NO: 4996 - protein, 467 aa, Homo sapiens
MASVAAARAVPVGSGLRGLQRTLPLVVILGATGTGKSTLALQLGQRLGGEIVSADSMQVYEGLDIITNKVSAQEQRICRHHMISFVDPLVTNYTVVDFRNRATALIEDIFARDKIPIVVGGTNYYIESLLWKVLVNTKPQEMGTEKVIDRKVELEKEDGLVLHKRLSQVDPEMAAKLHPHDKRKVARSLQVFEETGISHSEFLHRQHTEEGGGPLGGPLKFSNPCILWLHADQAVLDERLDKRVDDMLAAGLLEELRDFHRRYNQKNVSENSQDYQHGIFQSIGFKEFHEYLITEGKCTLETSNQLLKKGIEALKQVTKRYARKQNRWVKNRFLSRPGPIVPPVYGLEVSDVSKWEESVLEPALEIVQSFIQGHKPTATPIKMPYNEAENKRSYHLCDLCDRIIIGDREWAAHIKSKSHLNQLKKRRRLDSDAVNTIESQSVSPDHNKEPKEKGSPGQNDQELKCSV

SEQ ID NO: 4997 - protein, 1202 aa, Homo sapiens
MNTKDTTEVAENSHHLKIFLPKKLLECLPRCPLLPPERLRWNTNEEIASYLITFEKHDEWLSCAPKTRPQNGSIILYNRKKVKYRKDGYLWKKRKDGKTTREDHMKLKVQGMECLYGCYVHSSIVPTFHRRCYWLLQNPDIVLVHYLNVPALEDCGKGCSPIFCSISSDRREWLKWSREELLGQLKPMFHGIKWSCGNGTEEFSVEHLVQQILDTHPTKPAPRTHACLCSGGLGSGSLTHKCSSTKHRIISPKVEPRALTLTSIPHAHPPEPPPLIAPLPPELPKAHTSPSSSSSSSSSGFAEPLEIRPSPPTSRGGSSRGGTAILLLTGLEQRAGGLTPTRHLAPQADPRPSMSLAVVVGTEPSAPPAPPSPAFDPDRFLNSPQRGQTYGGGQGVSPDFPEAEAAHTPCSALEPAAALEPQAAARGPPPQSVAGGRRGNCFFIQDDDSGEELKGHGAAPPIPSPPPSPPPSPAPLEPSSRVGRGEALFGGPVGASELEPFSLSSFPDLMGELISDEAPSIPAPTPQLSPALSTITDFSPEWSYPEGGVKVLITGPWTEAAEHYSCVFDHIAVPASLVQPGVLRCYCPAHEVGLVSLQVAGREGPLSASVLFEYRARRFLSLPSTQLDWLSLDDNQFRMSILERLEQMEKRMAEIAAAGQVPCQGPDAPPVQDEGQGPGFEARVVVLVESMIPRSTWKGPERLAHGSPFRGMSLLHLAAAQGYARLIETLSQWRSVETGSLDLEQEVDPLNVDHFSCTPLMWACALGHLEAAVLLFRWNRQALSIPDSLGRLPLSVAHSRGHVRLARCLEELQRQEPSVEPPFALSPPSSSPDTGLSSVSSPSELSDGTFSVTSAYSSAPDGSPPPAPLPASEMTMEDMAPGQLSSGVPEAPLLLMDYEATNSKGPLSSLPALPPASDDGAAPEDADSPQAVDVIPVDMISLAKQIIEATPERIKREDFVGLPEAGASMRERTGAVGLSETMSWLASYLENVDHFPSSTPPSELPFERGRLAVPSAPSWAEFLSASTSGKMESDFALLTLSDHEQRELYEAARVIQTAFRKYKGRRLKEQQEVAAAVIQRCYRKYKQLTWIALKFALYKKMTQAAILIQSKFRSYYEQKRFQQSRRAAVLIQQHYRSYRRRPGPPHRTSATLPARNKGSFLTKKQDQAARKIMRFLRRCRHRMRELKQNQELEGLPQPGLAT

SEQ ID NO: 4998 - protein, 524 aa, Homo sapiens
MSLLSLPWLGLRPVATSPWLLLLLVVGSWLLARILAWTYAFYNNCRRLQCFPQPPKRNWFWGHLGLITPTEEGLKNSTQMSATYSQGFTVWLGPIIPFIVLCHPDTIRSITNASAAIAPKDNLFIRFLKPWLGEGILLSGGDKWSRHRRMLTPAFHFNILKSYITIFNKSANIMLDKWQHLASEGSSRLDMFEHISLMTLDSLQKCIFSFDSHCQERPSEYIATILELSALVEKRSQHILQHMDFLYYLSHDGRRFHRACRLVHDFTDAVIRERRRTLPTQGIDDFFKDKAKSKTLDFIDVLLLSKDEDGKALSDEDIRAEADTFMFGGHDTTASGLSWVLYNLARHPEYQERCRQEVQELLKDRDPKEIEWDDLAQLPFLTMCVKESLRLHPPAPFISRCCTQDIVLPDGRVIPKGITCLIDIIGVHHNPTVWPDPEVYDPFRFDPENSKGRSPLAFIPFSAGPRNCIGQAFAMAEMKVVLALMLLHFRFLPDHTEPRRKLELIMRAEGGLWLRVEPLNVSLQ

SEQ ID NO: 4999 - protein, 1151 aa, Homo sapiens
MRKFNIRKVLDGLTAGSSSASQQQQQQHPPGNREPEIQETLQSEHFQLCKTVRHGFPYQPSALAFDPVQKILAVGTQTGALRLFGRPGVECYCQHDSGAAVIQLQFLINEGALVSALADDTLHLWNLRQKRPAILHSLKFCRERVTFCHLPFQSKWLYVGTERGNIHIVNVESFTLSGYVIMWNKAIELSSKSHPGPVVHISDNPMDEGKLLIGFESGTVVLWDLKSKKADYRYTYDEAIHSVAWHHEGKQFICSHSDGTLTIWNVRSPAKPVQTITPHGKQLKDGKKPEPCKPILKVEFKTTRSGEPFIILSGGLSYDTVGRRPCLTVMHGKSTAVLEMDYSIVDFLTLCETPYPNDFQEPYAVVVLLEKDLVLIDLAQNGYPIFENPYPLSIHESPVTCCEYFADCPVDLIPALYSVGARQKRQGYSKKEWPINGGNWGLGAQSYPEIIITGHADGSVKFWDASAITLQVLYKLKTSKVFEKSRNKDDRPNTDIVDEDPYAIQIISWCPESRMLCIAGVSAHVIIYRFSKQEVITEVIPMLEVRLLYEINDVETPEGEQPPPLPTPVGGSNPQPIPPQSHPSTSSSSSDGLRDNVPCLKVKNSPLKQSPGYQTELVIQLVWVGGEPPQQITSLAVNSSYGLVVFGNCNGIAMVDYLQKAVLLNLGTIELYGSNDPYRREPRSPRKSRQPSGAGLCDISEGTVVPEDRCKSPTSGSSSPHNSDDEQKMNNFIEKVKTKSRKFSKMVANDIAKMSRKLSLPTDLKPDLDVKDNSFSRSRSSSVTSIDKESREAISALHFCETFTRKTDSSPSPCLWVGTTLGTVLVIALNLPPGGEQRLLQPVIVSPSGTILRLKGAILRMAFLDTTGCLIPPAYEPWREHNVPEEKDEKEKLKKRRPVSVSPSSSQEISENQYAVICSEKQAKVISLPTQNCAYKQNITETSFVLRGDIVALSNSICLACFCANGHIMTFSLPSLRPLLDVYYLPLTNMRIARTFCFTNNGQALYLVSPTEIQRLTYSQETCENLQEMLGELFTPVETPEAPNRGFFKGLFGGGAQSLDREELFGESSSGKASRSLAQHIPGPGGIEGVKGAASGVVGELARARLALDERGQKLGDLEERTAAMLSSAESFSKHAHEIMLKYKDKKWYQF

SEQ ID NO: 5000 - protein, 657 aa, Homo sapiens
MGALTSRQHAGVEEVDIPSNSVYRYPPKSGSYFASHFIMGGEKFDSTHPEGYLFGENSDLNFLGNRPVVFPYAAPPPQEPVKTLRSLVNIRKDTLRLVKCAEEVKSPGEEASKAKVHYNVEFTFDTDARVAITIYYQATEEFQNGIASYIPKDNSLQSETVQYKRGVCQQFCLPSHTVDPSEWAEEELGFDLDREVYPLVVHAVVDEGDEYFGHCHVLLGTFEKHTDGTFCVKPLKQKQVVDGVSYLLQEIYGIENKYNTQDSKVAEDEVSDNSAECVVCLSDVRDTLILPCRHLCLCNTCADTLRYQANNCPICRLPFRALLQIRAMRKKLGPLSPTSFNPIISSQTSDSEEHPSSENIPPGYEVVSLLEALNGPLTPSPAVPPLHVLGDGHLSGMLPSYGSDGHLPPVRTISPLDRLSDSSSQGLKLKKSLSKSTSQNSSVLHEEEDEHSCSESETQLSQRPSVQHLGEECGVTPESENLTLSSSGAIDQSSCTGTPLSSTISSPEGPASSSLAQSVMSMASSQISTDTVSSMSGSYIAPGTEEEGEALSSPQPASRAPSEEGEGNDVIEEEDGSPTQEGQRTCAFLGMECDNNNDFDIASVKALDNKLCSEVCLPGAWQADDNAVSRNAQRRRLSSSSLEDSETRPCVWGPLAV

SEQ ID NO: 5001 - protein, 1094 aa, Homo sapiens
MNVNQSVPPVPPFGQPQPIYPGYHQSSYGGQSGSTAPAIPYGAYNGPVPGYQQTPPQGMSRAPPSSGAPPASTAQAPCGQAAYGQFGQGDVQNGPSSTVQMQRLPGSQPFGSPLAPVGNQPPVLQPYGPPPTSAQVATQLSGMQISGAVAPAPPSSGLGFGPPTSLASASGSFPNSGLYGSYPQGQAPPLSQAQGHPGIQTPQRSAPSQASSFTPPASGGPRLPSMTGPLLPGQSFGGPSVSQPNHVSSPPQALPPGTQMTGPLGPLPPMHSPQQPGYQPQQNGSFGPARGPQSNYGGPYPAAPTFGSQPGPPQPLPPKRLDPDAIPSPIQVIEDDRNNRGTEPFVTGVRGQVPPLVTTNFLVKDQGNASPRYIRCTSYNIPCTSDMAKQAQVPLAAVIKPLARLPPEEASPYVVDHGESGPLRCNRCKAYMCPFMQFIEGGRRFQCCFCSCINDVPPQYFQHLDHTGKRVDAYDRPELSLGSYEFLATVDYCKNNKFPSPPAFIFMIDVSYNAIRTGLVRLLCEELKSLLDFLPREGGAEESAIRVGFVTYNKVLHFYNVKSSLAQPQMMVVSDVADMFVPLLDGFLVNVNESRAVITSLLDQIPEMFADTRETETVFVPVIQAGMEALKAAECAGKLFLFHTSLPIAEAPGKLKNRDDRKLINTDKEKTLFQPQTGAYQTLAKECVAQGCCVDLFLFPNQYVDVATLSVVPQLTGGSVYKYASFQVENDQERFLSDLRRDVQKVVGFDAVMRVRTSTGIRAVDFFGAFYMSNTTDVELAGLDGDKTVTVEFKHDDRLNEESGALLQCALLYTSCAGQRRLRIHNLALNCCTQLADLYRNCETDTLINYMAKFAYRGVLNSPVKAVRDTLITQCAQILACYRKNCASPSSAGQLILPECMKLLPVYLNCVLKSDVLQPGAEVTTDDRAYVRQLVTSMDVTETNVFFYPRLLPLTKSPVESTTEPPAVRASEERLSNGDIYLLENGLNLFLWVGASVQQGVVQSLFSVSSFSQITSGLSVLPVLDNPLSKKVRGLIDSLRAQRSRYMKLTVVKQEDKMEMLFKHFLVEDKSLSGGASYVDFLCHMHKEIRQLLS

SEQ ID NO: 5002 - protein, 491 aa, Homo sapiens
MALLWGLLVLSWSCLQGPCSVFSPVSAMEPLGRQLTSGPNQEQVSPLTLLKLGNQEPGGQTALKSPPGVCSRDPTPEQTHRLARAMMAFTADLFSLVAQTSTCPNLILSPLSVALALSHLALGAQNHTLQRLQQVLHAGSGPCLPHLLSRLCQDLGPGAFRLAARMYLQKGFPIKEDFLEQSEQLFGAKPVSLTGKQEDDLANINQWVKEATEGKIQEFLSGLPEDTVLLLLNAIHFQGFWRNKFDPSLTQRDSFHLDEQFTVPVEMMQARTYPLRWFLLEQPEIQVAHFPFKNNMSFVVLVPTHFEWNVSQVLANLSWDTLHPPLVWERPTKVRLPKLYLKHQMDLVATLSQLGLQELFQAPDLRGISEQSLVVSGVQHQSTLELSEVGVEAAAATSIAMSRMSLSSFSVNRPFLFFIFEDTTGLPLFVGSVRNPNPSAPRELKEQQDSPGNKDFLQSLKGFPRGDKLFGPDLKLVPPMEEDYPQFGSPK

SEQ ID NO: 5003 - protein, 372 aa, Homo sapiens
MKYLRHRRPNATLILAIGAFTLLLFSLLVSPPTCKVQEQPPAIPEALAWPTPPTRPAPAPCHANTSMVTHPDFATQPQHVQNFLLYRHCRHFPLLQDVPPSKCAQPVFLLLVIKSSPSNYVRRELLRRTWGRERKVRGLQLRLLFLVGTASNPHEARKVNRLLELEAQTHGDILQWDFHDSFFNLTLKQVLFLQWQETRCANASFVLNGDDDVFAHTDNMVFYLQDHDPGRHLFVGQLIQNVGPIRAFWSKYYVPEVVTQNERYPPYCGGGGFLLSRFTAAALRRAAHVLDIFPIDDVFLGMCLELEGLKPASHSGIRTSGVRAPSQRLSSFDPCFYRDLLLVHRFLPYEMLLMWDALNQPNLTCGNQTQIY

SEQ ID NO: 5004 - protein, 263 aa, Homo sapiens
MLSSKGLTVVDVYQGWCGPCKPVVSLFQKMRIEVGLDLLHFALAEADRLDVLEKYRGKCEPTFLFYAIKDEALSDEDECVSHGKNNGEDEDMVSSERTCTLAIIKPDAVAHGKTDEIIMKIQEAGFEILTNEERTMTEAEVRLFYQHKAGEEAFEKLVHHMCSGPSHLLILTRTEGFEDVVTTWRTVMGPRDPNVARREQPESLRAQYGTEMPFNAVHGSRDREDADRELALLFPSLKFSDKDTEAPQGESSTQPRLKITDLD

SEQ ID NO: 5005 - protein, 210 aa, Homo sapiens
MLPAATEVQGQKDMVWKWMPLLLLLVCVATMCSAQDRTDLLNVCMDAKHHKTKPGPEDKLHDQCSPWKKNACCTASTSQELHKDTSRLYNFNWDHCGKMEPACKRHFIQDTCLYECSPNLGPWIQQVNQSWRKERFLDVPLCKEDCQRWWEDCHTSHTCKSNWHRGWDWTSGVNKCPAGALCRTFESYFPTPAALCEGLWSHSYKVSNYS

SEQ ID NO: 5006 - protein, 433 aa, Homo sapiens
MALDLRTIFQCEPSENNLGSENSAFQQSQGPAVQREEGISEFSRMVLNSFQDSNNSYARQELQRLYRIFHSWLQPEKHSKDEIISLLVLEQFMIGGHCNDKASVKEKWKSSGKNLERFIEDLTDDSINPPALVHVHMQGQEALFSEDMPLRDVIVHLTKQVNAQTTREANMGTPSQTSQDTSLETGQGYEDEQDGWNSSSKTTRVNENITNQGNQIVSLIIIQEENGPRPEEGGVSSDNPYNSKRAELVTARSQEGSINGITFQGVPMVMGAGCISQPEQSSPESALTHQSNEGNSTCEVHQKGSHGVQKSYKCEECPKVFKYLCHLLAHQRRHRNERPFVCPECQKGFFQISDLRVHQIIHTGKKPFTCSMCKKSFSHKTNLRSHERIHTGEKPYTCPFCKTSYRQSSTYHRHMRTHEKITLPSVPSTPEAS

SEQ ID NO: 5007 - protein, 618 aa, Homo sapiens
MRRDVRILLLGEAQVGKTSLILSLVGEEFPEEVPPRAEEITIPADVTPEKVPTHIVDYSEAEQTDEELREEIHKANVVCVVYDVSEEATIEKIRTKWIPLVNGGTTQGPRVPIILVGNKSDLRSGSSMEAVLPIMSQFPEIETCVECSAKNLRNISELFYYAQKAVLHPTAPLYDPEAKQLRPACAQALTRIFRLSDQDLDQALSDEELNAFQKSCFGHPLAPQALEDVKTVVCRNVAGGVREDRLTLDGFLFLNTLFIQRGRHETTWTILRRFGYSDALELTADYLSPLIHVPPGCSTELNHLGYQFVQRVFEKHDQDRDGALSPVELQSLFSVFPAAPWGPELPRTVRTEAGRLPLHGYLCQWTLVTYLDVRSCLGHLGYLGYPTLCEQDQAHAITVTREKRLDQEKGQTQRSVLLCKVVGARGVGKSAFLQAFLGRGLGHQDTREQPPGYAIDTVQVNGQEKYLILCEVGTDGLLATSLDATCDVACLMFDGSDPKSFAHCASVYKHHYMDGQTPCLFVSSKADLPEGVAVSGPSPAEFCRKHRLPAPVPFSCAGPAEPSTTIFTQLATMAAFPHLVHAELHPSSFWLRGLLGVVGAAVAAVLSFSLYRVLVKSQ

SEQ ID NO: 5008 - protein, 610 aa, Homo sapiens
MQQEAAQRESEELQHVQWRPRAVSGWGVPQLLWYLVFLQPIITEVHLRRRNVQFLFIRFSAWQYAGTDKLWAGLVTTLCEGIRRHYGALPFSVYSVLGNKPATRQDCCQSEWHCRRRVCLGLLALLAALGLGVGLLYLSLGGHALGHGSPSGSLLKVFGGAATTLSGSGLLMAVYSVGKHLFVSQRKKIERLVSREKFGSQLGFMCEVKKEVELLTDFLCFLEIYQRRRLRVVLEVTGLDTCYPERVVGVLNAINTLLSDSHAPFIFILVVDPSILAACLESAGNMKGTADNGYLFLNRTVTLPFSVPIMGRRTKLQFLHDAVQSRDDLLYREMTRKPWLPGDAGGESAQLLAVQAQAGTERGQGRIDDEAARRIQEALFCLHDERDCLYEYVPDNVVSMRRIVNTVPITVRLLQQQQQQGDFGGPTPRQAVAWVVLANQWPCRLSWALQCLEDRQQTGGAPEGRARLWDVFRDNSRELHTMTKALQNVLDLDGDPELFERFLGADFPFTVAEAQSLLRCTVNLDHSIRRRMGLIRAVSALKPPSPPKSPTRDTPHAAHRANSASRAPPSGRASGQAGEGHHTGDLAHRGKLWPVACALFRPGQSSPGGP

SEQ ID NO: 5009 - protein, 636 aa, Homo sapiens
MNTGRDSQSPDSAKGFRSVRPNLQDKRSPTQSQITVNGNSGGAVSPMSYYQRPFSPSAYSLPASLNSSIVMQHGTSLDSTDTYPQHAQSLDGTTSSSIPLYRSSEEEKRVTVIKAPHYPGIGPVDESGIPTAIRTTVDRPKDWYKTMFKQIHMVHKPDDDTDMYNTPYTYNAGLYNPPYSAQSHPAAKTQTYRPLSKSHSDNSPNAFKDASSPVPPPHVPPPVPPLRPRDRSSTEKHDWDPPDRKVDTRKFRSEPRSIFEYEPGKSSILQHERPPPLPTTPTPVPREPGRKPLSSSRLGEVTGSPSPPPRSGAPTPSSRAPALSPTRPPKKPLDYVQDHSSGVFNEASLYQSSIDRSLERPMSSASMASDFRKRRKSEPAVGPPRGLGDQSASRTSPGRVDLPGSSTTLTKSFTSSSPSSPSRAKDRESPRSYSSTLTDMGRSAPRERRGTPEKEKLPAKAVYDFKAQTSKELSFKKGDTVYILRKIDQNWYEGEHHGRVGIFPISYVEKLTPPEKAQPARPPPPAQPGEIGEAIAKYNFNADTNVELSLRKGDRVILLKRVDQNWYEGKIPGTNRQGIFPVSYVEVVKKNTKGAEDYPDPPIPHSYSSDRIHSLSSNKPQRPVFTHENIQGGGEP

SEQ ID NO: 5010 - protein, 669 aa, Homo sapiens
MSALLSLCFVLPLAAPGHGTQGWEPCTDLRPLDILAEVVPSDGATSGIRIVQVHGARGLQLSVAAPRTMSFPASRIFSQCDLFPEEFSIVVTLRVPNLPPKRNEYLLTVVAEESDLLLLGLRLSPAQLHFLFLREDTAGAWQTRVSFRSPALVDGRWHTLVLAVSAGVFSLTTDCGLPVDIMADVPFPATLSVKGARFFVGSRRRAKGLFMGLVRQLVLLPGSDATPRLCPSRNAPLAVLSIPRVLQALTGKPEDNEVLKYPYETNIRVTLGPQPPCTEVEDAQFWFDASRKGLYLCVGNEWVSVLAAKERLDYVEEHQNLSTNSETLGIEVFRIPQVGLFVATANRKATSAVYKWTEEKFVSYQNIPTHQAQAWRHFTIGKKIFLAVANFEPDEKGQEFSVIYKWSHRKLKFTPYQSIATHSARDWEAFEVDGEHFLAVANHREGDNHNIDSVIYKWNPATRLFEANQTIATSGAYDWEFFSVGPYSFLVVANTFNGTSTKVHSHLYIRLLGSFQLFQSFPTFGAADWEVFQIGERIFLAVANSHSYDVEMQVQNDSYVINSVIYELNVTAQAFVKFQDILTCSALDWEFFSVGEDYFLVVANSFDGRTFSVNSIIYRWQGYEGFVAVHSLPTVGCRDWEAFSTTAGAYLIYSSAKEPLSRVLRLRTR

SEQ ID NO: 5011 - protein, 295 aa, Homo sapiens
MELIQDTSRPPLEYVKGVPLIKYFAEALGPLQSFQARPDDLLISTYPKSGTTWVSQILDMIYQGGDLEKCHRAPIFMRVPFLEFKAPGIPSGMETLKDTPAPRLLKTHLPLALLPQTLLDQKVKVVYVARNAKDVAVSYYHFYHMAKVHPEPGTWDSFLEKFMVGEVSYGSWYQHVQEWWELSRTHPVLYLFYEDMKENPKREIQKILEFVGRSLPEETVDFVVQHTSFKEMKKNPMTNYTTVPQEFMDHSISPFMRKGMAGDWKTTFTVAQNERFDADYAEKMAGCSLSFRSEL

SEQ ID NO: 5012 - protein, 914 aa, Homo sapiens
MENWPTPSELVNTGFQSVLSQGNKKPQNRKEKEEKVEKRSNSDSKENRETKLNGPGENVSEDEAQSSNQRKRANKHKWVPLHLDVVRSESQERPGSRNSSRCQPEANKPTHNNRRNDTRSWKRDREKRDDQDDVSSVRSEGGNIRGSFRGRGRGRGRGRGRGRGNPRLNFDYSYGYQEHGERTDQPFQTELNTSMMYYYDDGTGVQVYPVEEALLKEYIKRQIEYYFSVENLERDFFLRGKMDEQGFLPISLIAGFQRVQALTTNLNLILEALKDSTEVEIVDEKMRKKIEPEKWPIPGPPPRSVPPTDFSQLIDCPEFVPGQAFCSHTESAPNSPRIGSPLSPKKNSETSILQAMSRGLSTSLPDLDSEPWIEVKKRHQPAPVKLRESVSVPEGSLNQLCSSEEPEQEELDFLFDEEIEQIGRKNTFTDWSDNDSDYEIDDQDLNKILIVTQTPPYVKKHPGGDRTGTHMSRAKITSELAKVINDGLYYYEQDLWMEEDENKHTAIKQEVENFKKLNLISKEQFENLTPELPFEPNQEVPVAPSQSRQGGVQGVLHIPKKDLTDELAQKLFDVSEITSAAMVHSLPTAVPESPRIHPTRTPKTPRTPRLQDPNKTPRFYPVVKEPKAIDVKSPRKRKTRHSTNPPLECHVGWVMDSRDRGPGTSSVSTSNASPSEGAPLAGSYGCTPHSFPKFQHPSHELLKENGFTQQVYHKYRRRCLSERKRLGIGQSQEMNTLFRFWSFFLRDHFNKKMYEEFRQLAWEDAKENYRYGLECLFRFYSYGLEKKFRREIFQDFQEETKKDYESGQLYGLEKFWAYLKYSQSKTQSIDPKLQEYLCSFKRLEDFRVDPPISDEFGRKRHSSTSGEESNRHRLPPNSSTKPPNAAKPTSTSELQVPINSPRRNISPESSDNSH

SEQ ID NO: 5013 - protein, 593 aa, Homo sapiens
MGTARIAPGLALLLCCPVLSSAYALVDADDVMTKEEQIFLLHRAQAQCEKRLKEVLQRPASIMESDKGWTSASTSGKPRKDKASGKLYPESEEDKEAPTGSRYRGRPCLPEWDHILCWPLGAPGEVVAVPCPDYIYDFNHKGHAYRRCDRNGSWELVPGHNRTWANYSECVKFLTNETREREVFDRLGMIYTVGYSVSLASLTVAVLILAYFRRLHCTRNYIHMHLFLSFMLRAVSIFVKDAVLYSGATLDEAERLTEEELRAIAQAPPPPATAAAGYAGCRVAVTFFLYFLATNYYWILVEGLYLHSLIFMAFFSEKKYLWGFTVFGWGLPAVFVAVWVSVRATLANTGCWDLSSGNKKWIIQVPILASIVLNFILFINIVRVLATKLRETNAGRCDTRQQYRKLLKSTLVLMPLFGVHYIVFMATPYTEVSGTLWQVQMHYEMLFNSFQGFFVAIIYCFCNGEVQAEIKKSWSRWTLALDFKRKARSGSSSYSYGPMVSHTSVTNVGPRVGLGLPLSPRLLPTATTNGHPQLPGHAKPGTPALETLETTPPAMAAPKDDGFLNGSCSGLDEEASGPERPPALLQEEWETVM

SEQ ID NO: 5014 - protein, 214 aa, Homo sapiens
MSNYSVSLVGPAPWGFRLQGGKDFNMPLTISSLKDGGKAAQANVRIGDVVLSIDGINAQGMTHLEAQNKIKGCTGSLNMTLQRASAAPKPEPVPVQKKTQVTNNPGTVKIPPKRPPRKHIVERYTEFYHVPTHSDASKKRLIEDTEDWRPRTGTTQSRSFRILAQITGTEHLKESEADNTKKAKEKIPLHVFSPKYTKLRDWHHEVSARALNVQ

SEQ ID NO: 5015 - protein, 843 aa, Homo sapiens
MKVISLFILVGFIGEFQSFSSASSPVNCQWDFYAPWSECNGCTKTQTRRRSVAVYGQYGGQPCVGNAFETQSCEPTRGCPTEEGCGERFRCFSGQCISKSLVCNGDSDCDEDSADEDRCEDSERRPSCDIDKPPPNIELTGNGYNELTGQFRNRVINTKSFGGQCRKVFSGDGKDFYRLSGNVLSYTFQVKINNDFNYEFYNSTWSYVKHTSTEHTSSSRKRSFFRSSSSSSRSYTSHTNEIHKGKSYQLLVVENTVEVAQFINNNPEFLQLAEPFWKELSHLPSLYDYSAYRRLIDQYGTHYLQSGSLGGEYRVLFYVDSEKLKQNDFNSVEEKKCKSSGWHFVVKFSSHGCKELENALKAASGTQNNVLRGEPFIRGGGAGFISGLSYLELDNPAGNKRRYSAWAESVTNLPQVIKQKLTPLYELVKEVPCASVKKLYLKWALEEYLDEFDPCHCRPCQNGGLATVEGTHCLCHCKPYTFGAACEQGVLVGNQAGGVDGGWSCWSSWSPCVQGKKTRSRECNNPPPSGGGRSCVGETTESTQCEDEELEHLRLLEPHCFPLSLVPTEFCPSPPALKDGFVQDEGTMFPVGKNVVYTCNEGYSLIGNPVARCGEDLRWLVGEMHCQKIACVLPVLMDGIQSHPQKPFYTVGEKVTVSCSGGMSLEGPSAFLCGSSLKWSPEMKNARCVQKENPLTQAVPKCQRWEKLQNSRCVCKMPYECGPSLDVCAQDERSKRILPLTVCKMHVLHCQGRNYTLTGRDSCTLPASAEKACGACPLWGKCDAESSKCVCREASECEEEGFSICVEVNGKEQTMSECEAGALRCRGQSISVTSIRPCAAETQ

SEQ ID NO: 5016 - protein, 325 aa, Homo sapiens
MFLPNDTQFHPSSFLLLGIPGLETLHIWIGFPFCAVYMIALIGNFTILLVIKTDSSLHQPMFYFLAMLATTDVGLSTATIPKMLGIFWINLRGIIFEACLTQMFFIHNFTLMESAVLVAMAYDSYVAICNPLQYSAILTNKVVSVIGLGVFVRALIFVIPSILLILRLPFCGNHVIPHTYCEHMGLAHLSCASIKINIIYGLCAICNLVFDITVIALSYVHILCAVFRLPTHEARLKSLSTCGSHVCVILAFYTPALFSFMTHRFGRNVPRYIHILLANLYVVVPPMLNPVIYGVRTKQIYKCVKKILLQEQGMEKEEYLIHTRF

SEQ ID NO: 5017 - protein, 1444 aa, Homo sapiens
MTDTSVLDQWKASFFVEDFLEKKTITRMVTQINCEFEEVVPSSNPDSQIEVEEVSLYTHMDYNEVFTPVSCLEKCSALQNQNQDLFIDDKGILFVSSRKHLPTLPTLLSRLKLFLVKDPLLDFKGQIFTEANFSRECFSLQETLEAFVKEDFCMDKVNFCQEKLEDTICLNEPSSFLIEYEFLIPPSLKPEIDIPSLSELKELLNPVPEIINYVDEKEKLFERDLTNKHGIEDIGDIKFSSTEILTIQSQSEPEECSKPGELEMPLTPLFLTCQHSSVNSLRTELQTFPLSPVCKINLLTAEESANEYYMMWQLERCRSPLNPFLLTVPRIQEPHSQYSVTDLKKIFSVKEESLVINLEKAEWWKQAGLNLKMMETLEHLNTYLCHDNLSSNDTKIEIFLPTKVLQLESCLEHKSHSSPIALIDEKSTNAHLSLPQKSPSLAKEVPDLCFSDDYFSDKGAAKEEKPKNDQEPVNRIIQKKENNDHFELDCTGPSIKSPSSSIIKKASFEHGKKQENDLDLLSDFIMLRNKYKTCTSKTEVTNSDEKHDKEACSLTLQEESPIVHINKTLEEINQERGTDSVIEIQASDSQCQAFCLLEAAASPILKNLVSLCTLPTANWKFATVIFDQTRFLLKEQEKVVSDAVRQGTIDEREMTFKHAALLHLLVTIRDVLLTCSLDTALGYLSKAKDIYNSILGPYLGDIWRQLEIVQFIRGKKPETNYKIQELQCQILSWMQSQQQIKVLIIIRMDSDGEKHFLIKILNKIEGLTLTVLHSNERKDFLESEGVLRGTSSCVVVHNQYIGADFPWSNFSFVVEYNYVEDSCWTKHCKELNIPYMAFKVILPDTVLERSTLLDRFGGFLLEIQIPYVFFASEGLLNTPDILQLLESNYNISLVERGCSESLKLFGSSECYVVVTIDEHTAIILQDLEELNYEKASDNIIMRLMALSLQYRYCWIILYTKETLNSEYLLTEKTLHHLALIYAALVSFGLNSEELDVKLIIAPGVEATALIIRQIADHSLMTSKRDPHEWLDKSWLKVSPSEEEMYLLDFPCINPLVAQLMLNKGPSLHWILLATLCQLQELLPEVPEKVLKHFCSITSLFKIGSSSITKSPQISSPQENRNQISTLSSQSSASDLDSVIQEHNEYYQYLGLGETVQEDKTTILNDNSSIMELKEISSFLPPVTSYNQTSYWKDSSCKSNIGQNTPFLINIESRRPAYNSFLNHSDSESDVFSLGLTQMNCETIKSPTDTQKRVSVVPRFINSQKRRTHEAKGFINKDVSDPIFSLEGTQSPLHWNFKKNIWEQENHPFNLQYGAQQTACNKLYSQKGNLFTDQQKCLSDESEGLTCESSKDETFWRELPSVPSLDLFRASDSNANQKEFNSLYFYQRAGKSLGQKRHHESSFNSGDKESLTGFMCSQLPQFKKRRLAYEKVPGRVDGQTRLRFF

SEQ ID NO: 5018 - protein, 667 aa, Homo sapiens
MLYKQLRQACEDHVQAQILPFREDSLDSVLFLKKINTCWQDHCRQMIMIRSIFLFLDRTYVLQNSTLPSICPVSYCLYRDMGLELFRTHIISDKMVQSKTIDGILLLIERERSGEAVDRSLLRSLLGMLSDLQVYKDSFELKFLEETNCLYAAEGQRLMQEREVPEYLNHVSKRLEEEGDRVITYLDHSTQKPLIACVEKQLLGEHLTAILQKGLDHLLDENRVPDLAQMYQLFSRVRGGQQALLQHWSEYIKTFGTAIVINPEKDKDMVQDLLDFKDKVDHVIEVCFQKNERFVNLMKESFETFINKRPNKPAELIAKHVDSKLRAGNKEATDEELERTLDKIMILFRFIHGKDVFEAFYKKDLAKRLLVGKSASVDAEKSMLSKLKHECGAAFTSKLEGMFKDMELSKDIMVHFKQHMQNQSDSGPIDLTVNILTMGYWPTYTPMEVHLTPEMIKLQEVFKAFYLGKHSGRKLQWQTTLGHAVLKAEFKEGKKEFQVSLFQTLVLLMFNEGDGFSFEEIKMATGIEDSELRRTLQSLACGKARVLIKSPKGKEVEDGDKFIFNGEFKHKLFRIKINQIQMKETVEEQVSTTERVFQDRQYQIDAAIVRIMKMRKTLGHNLLVSELYNQLKFPVKPGDLKKRIESLIDRDYMERDKDNPNQYHYVA

SEQ ID NO: 5019 - protein, 315 aa, Homo sapiens
MGDWNNSDAVEPIFILRGFPGLEYVHSWLSILFCLAYLVAFMGNVTILSVIWIESSLHQPMYYFISILAVNDLGMSLSTLPTMLAVLWLDAPEIQASACYAQLFFIHTFTFLESSVLLAMAFDRFVAICHPLHYPTILTNSVIGKIGLACLLRSLGVVLPTPLLLRHYHYCHGNALSHAFCLHQDVLRLSCTDARTNSIYGLCVVIATLGVDSIFILLSYVLILNTVLDIASREEQLKALNTCVSHICVVLIFFVPVIGVSMVHRFGKHLSPIVHILMADIYLLLPPVLNPIVYSVRTKQIRLGILHKFVLRRRF

SEQ ID NO: 5020 - protein, 129 aa, Homo sapiens
MSHLQSLLLDTLLGTKHVDSAALIKIQERSLCVASPGFNVTPSDVRTLVNGFAKNPLQARREGLYFKGKDYRCVRADEYSLYAKNENTGVVVVKTHLYLLVATYTEGMYPSICVEATESLGDYLRKKGS

SEQ ID NO: 5021 - protein, 731 aa, Homo sapiens
MSVTLTSVKRVQSSPNLLAAGRDSQSPDSAWRSYNDGNQETLNGDATYSSLAAKGFRSVRPNLQDKRSPTQSQITVNGNSGGAVSPMSYYQRPFSPSAYSLPASLNSSIVMQHGTSLDSTDTYPQHAQSLDGTTSSSIPLYRSSEEEKRVTVIKAPHYPGIGPVDESGIPTAIRTTVDRPKDWYKTMFKQIHMVHKPDDDTDMYNTPYTYNAGLYNPPYSAQSHPAAKTQTYRPLSKSHSDNSPNAFKDASSPVPPPHVPPPVPPLRPRDRSSTEKHDWDPPDRKVDTRKFRSEPRSIFEYEPGKSSILQHERPPPLPTTPTPVPREPGRKPLSSSRLGEVTGSPSPPPRSGAPTPSSRAPALSPTRPPKKPLDYVQDHSSGVFNEASLYQSSIDRSLERPMSSASMASDFRKRRKSEPAVGPPRGLGDQSASRTSPGRVDLPGSSTTLTKSFTSSSPSSPSRAKDRESPRSYSSTLTDMGRSAPRERRGTPEKEKLPAKAVYDFKAQTSKELSFKKGDTVYILRKIDQNWYEGEHHGRVGIFPISYVEKLTPPEKAQPARPPPPAQPGEIGEAIAKYNFNADTNVELSLRKGDRVILLKRVDQNWYEGKIPGTNRQGIFPVSYVEVVKKNTKGAEDYPDPPIPHSYSSDRIHSLSSNKPQRPVFTHENIQGGGEPFQALYNYTPRNEDELELRESDVIDVMEKCDDGWFVGTSRRTKFFGTFPGNYVKRL

SEQ ID NO: 5022 - protein, 595 aa, Homo sapiens
MESQPFLNMKFETDYFVKVVPFPSIKNESNYHPFFFRTRACDLLLQPDNLACKPFWKPRNLNISQHGSDMQVSFDHAPHNFGFRFFYLHYKLKHEGPFKRKTCKQEQTTETTSCLLQNVSPGDYIIELVDDTNTTRKVMHYALKPVHSPWAGPIRAVAITVPLVVISAFATLFTVMCRKKQQENIYSHLDEESSESSTYTAALPRERLRPRPKVFLCYSSKDGQNHMNVVQCFAYFLQDFCGCEVALDLWEDFSLCREGQREWVIQKIHESQFIIVVCSKGMKYFVDKKNYKHKGGGRGSGKGELFLVAVSAIAEKLRQAKQSSSAALSKFIAVYFDYSCEGDVPGILDLSTKYRLMDNLPQLCSHLHSRDHGLQEPGQHTRQGSRRNYFRSKSGRSLYVAICNMHQFIDEEPDWFEKQFVPFHPPPLRYREPVLEKFDSGLVLNDVMCKPGPESDFCLKVEAAVLGATGPADSQHESQHGGLDQDGEARPALDGSAALQPLLHTVKAGSPSDMPRDSGIYDSSVPSSELSLPLMEGLSTDQTETSSLTESVSSSSGLGEEEPPALPSKLLSSGSCKADLGCRSYTDELHAVAPL

SEQ ID NO: 5023 - protein, 835 aa, Homo sapiens
MGNYKSRPTQTCTDEWKKKVSESYVITIERLEDDLQIKEKELTELRNIFGSDEAFSKVNLNYRTENGLSLLHLCCICGGKKSHIRTLMLKGLRPSRLTRNGFTALHLAVYKDNAELITSLLHSGADIQQVGYGGLTALHIATIAGHLEAADVLLQHGANVNIQDAVFFTPLHIAAYYGHEQVTRLLLKFGADVNVSGEVGDRPLHLASAKGFLNIAKLLMEEGSKADVNAQDNEDHVPLHFCSRFGHHDIVKYLLQSDLEVQPHVVNIYGDTPLHLACYNGKFEVAKEIIQISGTESLTKENIFSETAFHSACTYGKSIDLVKFLLDQNVININHQGRDGHTGLHSACYHGHIRLVQFLLDNGADMNLVACDPSRSSGEKDEQTCLMWAYEKGHDAIVTLLKHYKRPQDELPCNEYSQPGGDGSYVSVPSPLGKIKSMTKEKADILLLRAGLPSHFHLQLSEIEFHEIIGSGSFGKVYKGRCRNKIVAIKRYRANTYCSKSDVDMFCREVSILCQLNHPCVIQFVGACLNDPSQFAIVTQYISGGSLFSLLHEQKRILDLQSKLIIAVDVAKGMEYLHNLTQPIIHRDLNSHNILLYEDGHAVVADFGESRFLQSLDEDNMTKQPGNLRWMAPEVFTQCTRYTIKADVFSYALCLWEILTGEIPFAHLKPAAAAADMAYHHIRPPIGYSIPKPISSLLIRGWNACPEGRPEFSEVVMKLEECLCNIELMSPASSNSSGSLSPSSSSDCLVNRGGPGRSHVAALRSRFELEYALNARSYAALSQSAGQYSSQGLSLEEMKRSLQYTPIDKYGYVSDPMSSMHFHSCRNSSSFEDSS

SEQ ID NO: 5024 - protein, 422 aa, Homo sapiens
MFQTAWRQEPVTFEDVAVYFTQNEWASLDSVQRALYREVMLENYANVASLAFPFTTPVLVSQLEQGELPWGLDPWEPMGREALRGICPGDEARTEKEGLTPKDHVSKETESFRLMVGGLPGNVSQHLDFGSSLEQPQGHWIIKTKSKRRHFTDTSARHHEAYEVKNGEKFEKLGKNISVSTQLTTNQTNPSGQISYECGQCGRYFIQMADFHRHEKCHTGEKSFECKECGKYFRYNSLLIRHQIIHTGKKPFKCKECGKGLSSDTALIQHQRIHTGEKPYECKECGKAFSSSSVFLQHQRFHTGEKLYECNECWKTFSCSSSFTVHQRMHTGEKPYECKECGKRLSSNTALTQHQRIHTGEKPFECKECGKAFNQKITLIQHQRVHTGEKPYECKVCGKTFSWCGRFILHQKLHTQKTPVQA

SEQ ID NO: 5025 - protein, 1403 aa, Homo sapiens
MVSSGCRMRSLWFIIVISFLPNTEGFSRAALPFGLVRRELSCEGYSIDLRCPGSDVIMIESANYGRTDDKICDADPFQMENTDCYLPDAFKIMTQRCNNRTQCIVVTGSDVFPDPCPGTYKYLEVQYECVPYIFVCPGTLKAIVDSPCIYEAEQKAGAWCKDPLQAADKIYFMPWTPYRTDTLIEYASLEDFQNSRQTTTYKLPNRVDGTGFVVYDGAVFFNKERTRNIVKFDLRTRIKSGEAIINYANYHDTSPYRWGGKTDIDLAVDENGLWVIYATEQNNGMIVISQLNPYTLRFEATWETVYDKRAASNAFMICGVLYVVRSVYQDNESETGKNSIDYIYNTRLNRGEYVDVPFPNQYQYIAAVDYNPRDNQLYVWNNNFILRYSLEFGPPDPAQVPTTAVTITSSAELFKTIISTTSTTSQKGPMSTTVAGSQEGSKGTKPPPAVSTTKIPPITNIFPLPERFCEALDSKGIKWPQTQRGMMVERPCPKGTRGTASYLCMISTGTWNPKGPDLSNCTSHWVNQLAQKIRSGENAASLANELAKHTKGPVFAGDVSSSVRLMEQLVDILDAQLQELKPSEKDSAGRSYNKAIVDTVDNLLRPEALESWKHMNSSEQAHTATMLLDTLEEGAFVLADNLLEPTRVSMPTENIVLEVAVLSTEGQIQDFKFPLGIKGAGSSIQLSANTVKQNSRNGLAKLVFIIYRSLGQFLSTENATIKLGADFIGRNSTIAVNSHVISVSINKESSRVYLTDPVLFTLPHIDPDNYFNANCSFWNYSERTMMGYWSTQGCKLVDTNKTRTTCACSHLTNFAILMAHREIAYKDGVHELLLTVITWVGIVISLVCLAICIFTFCFFRGLQSDRNTIHKNLCINLFIAEFIFLIGIDKTKYAIACPIFAGLLHFFFLAAFAWMCLEGVQLYLMLVEVFESEYSRKKYYYVAGYLFPATVVGVSAAIDYKSYGTEKACWLHVDNYFIWSFIGPVTFIILLNIIFLVITLCKMVKHSNTLKPDSSRLENIKSWVLGAFALLCLLGLTWSFGLLFINEETIVMAYLFTIFNAFQGVFIFIFHCALQKKVRKEYGKCFRHSYCCGGLPTESPHSSVKASTTRTSARYSSGTQSRIRRMWNDTVRKQSESSFISGDINSTSTLNQGHSLNNARDTSAMDTLPLNGNFNNSYSLHKGDYNDSVQVVDCGLSLNDTAFEKMIISELVHNNLRGSSKTHNLELTLPVKPVIGGSSSEDDAIVADASSLMHSDNPGLELHHKELEAPLIPQRTHSLLYQPQKKVKSEGTDSYVSQLTAEAEDHLQSPNRDSLYTSMPNLRDSPYPESSPDMEEDLSPSRRSENEDIYYKSMPNLGAGHQLQMCYQISRGNSDGYIIPINKEGCIPEGDVREGQMQLVTSL

SEQ ID NO: 5026 - protein, 520 aa, Homo sapiens
MVTSSFPISVAVFALITLQVGTQDSFIAAVYEHAVILPNKTETPVSQEDALNLMNENIDILETAIKQAAEQGARIIVTPEDALYGWKFTRETVFPYLEDIPDPQVNWIPCQDPHRFGHTPVQARLSCLAKDNSIYVLANLGDKKPCNSRDSTCPPNGYFQYNTNVVYNTEGKLVARYHKYHLYSEPQFNVPEKPELVTFNTAFGRFGIFTCFDIFFYDPGVTLVKDFHVDTILFPTAWMNVLPLLTAIEFHSAWAMGMGVNLLVANTHHVSLNMTGSGIYAPNGPKVYHYDMKTELGKLLLSEVDSHPLSSLAYPTAVNWNAYATTIKPFPVQKNTFRGFISRDGFNFTELFENAGNLTVCQKELCCHLSYRMLQKEENEVYVLGAFTGLHGRRRREYWQVCTLLKCKTTNLTTCGRPVETASTRFEMFSLSGTFGTEYVFPEVLLTEIHLSPGKFEVLKDGRLVNKNGSSGPILTVSLFGRWYTKDSLYSSCGTSNSAITYLLIFILLMIIALQNIVML

SEQ ID NO: 5027 - protein, 232 aa, Homo sapiens
MPSQQKKIIFCMAGVFSFACALGVVTALGTPLWIKATVLCKTGALLVNASGQELDKFMGEMQYGLFHGEGVRQCGLGARPFRFSFFPDLLKAIPVSIHVNVILFSAILIVLTMVGTAFFMYNAFGKPFETLHGPLGLYLLSFISGSCGCLVMILFASEVKIHHLSEKIANYKEGTYVYKTQSEKYTTSFWVIFFCFFVHFLNGLLIRLAGFQFPFAKSKDAETTNVAADLMY

SEQ ID NO: 5028 - protein, 996 aa, Homo sapiens
MPYNYLLDAKSRRAHNIDLKGTVVIFDEAHNVEKMCEESASFDLTPHDLASGLDVIDQVLEEQTKAAQQGEPHPEFSADSPSPGLNMELEDIAKLKMILLRLEGAIDAVELPGDDSGVTKPGSYIFELFAEAQITFQTKGCILDSLDQIIQHLAGRAGVFTNTAGLQKLADIIQIVFSVDPSEGSPGSPAGLGALQSYKVHIHPDAGHRRTAQRSDAWSTTAARKRGKVLSYWCFSPGHSMHELVRQGVRSLILTSGTLAPVSSFALEMQIPFPVCLENPHIIDKHQIWVGVVPRGPDGAQLSSAFDRRFSEECLSSLGKALGNIARVVPYGLLIFFPSYPVMEKSLEFWRARDLARKMEALKPLFVEPRSKGSFSETISAYYARVAAPGSTGATFLAVCRGKASEGLDFSDTNGRGVIVTGLPYPPRMDPRVVLKMQFLDEMKGQGGAGGQFLSGQEWYRQQASRAVNQAIGRVIRHRQDYGAVFLCDHRFAFADARAQLPSWVRPHVRVYDNFGHVIRDVAQFFRVAERTMPAPAPRATAPSVRGEDAVSEAKSPGPFFSTRKAKSLDLHVPSLKQRSSGSPAAGDPESSLCVEYEQEPVPARQRPRGLLAALEHSEQRAGSPGEEQAHSCSTLSLLSEKRPAEEPRGGRKKIRLVSHPEEPVAGAQTDRAKLFMVAVKQELSQANFATFTQALQDYKGSDDFAALAACLGPLFAEDPKKHNLLQGFYQFVRPHHKQQFEEVCIQLTGRGCGYRPEHSIPRRQRAQPVLDPTGRTAPDPKLTVSTAAAQQLDPQEHLNQGRPHLSPRPPPTGDPGSQPQWGSGVPRAGKQGQHAVSAYLADARRALGSAGCSQLLAALTAYKQDDDLDKVLAVLAALTTAKPEDFPLLHRFSMFVRPHHKQRFSQTCTDLTGRPYPGMEPPGPQEERLAVPPVLTHRAPQPGPSRSEKTGKTQSKISSFLRQRPAGTVGAGGEDAGPSQSSGPPHGPAASEWGL

SEQ ID NO: 5029 - protein, 836 aa, Homo sapiens
MIAELVSSALGLALYLNTLSADFCYDDSRAIKTNQDLLPETPWTHIFYNDFWGTLLTHSGSHKSYRPLCTLSFRLNHAIGGLNPWSYHLVNVLLHAAVTGLFTSFSKILLGDGYWTFMAGLMFASHPIHTEAVAGIVGRADVGASLFFLLSLLCYIKHCSTRGYSARTWGWFLGSGLCAGCSMLWKEQGVTVLAVSAVYDVFVFHRLKIKQILPTIYKRKNLSLFLSISLLIFWGSSLLGARLYWMGNKPPSFSNSDNPAADSDSLLTRTLTFFYLPTKNLWLLLCPDTLSFDWSMDAVPLLKTVCDWRNLHTVAFYTGLLLLAYYGLKSPSVDRECNGKTVTNGKQNANGHSCLSDVEYQNSETKSSFASKVENGIKNDVSQRTQLPSTENIVVLSLSLLIIPFVPATNLFFYVGFVIAERVLYIPSMGFCLLITVGARALYVKVQKRFLKSLIFYATATLIVFYGLKTAIRNGDWQNEEMLYRSGIKVNPAKAWGNLGNVLKSQSKISEAESAYRNALYYRSNMADMLYNLGLLLQENSRFAEALHYYKLAIGSRPTLASAYLNTGIILMNQGRTEEARRTFLKCSEIPDENLKDPHAHKSSVTSCLYNLGKLYHEQGHYEEALSVYKEAIQKMPRQFAPQSLYNMMGEAYMRLSKLPEAEHWYMESLRSKTDHIPAHLTYGKLLALTGRKSEAEKLFLKAIELDPTKGNCYMHYGQFLLEEARLIEAAEMAKKAAELDSTEFDVVFNAAHMLRQASLNEAAEKYYDLAARLRPNYPAALMNLGAILHLNGRLQKAEANYLRALQLKPDDVITQSNLRKLWNIMEKQGLKTSKT

SEQ ID NO: 5030 - protein, 353 aa, Homo sapiens
MVGDTLKLLSPLMTRYFFLLFYSTDSSDLNENQHPLDFDEMAFGKVKSGISFLIQTGVGILGNSFLLCFYNLILFTGHKLRPTDLILSQLALANSMVLFFKGIPQTMAAFGLKYLLNDTGCKFVFYYHRVGTRVSLSTICLLNGFQAIKLNPSICRWMEIKIRSPRFIDFCCLLCWAPHVLMNASVLLLVNGPLNSKNSSAKNNYGYCSYKASKRFSSLHAVLYFSPDFMSLGFMVWASGSMVFFLYRHKQQVQHNHSNRLSCRPSQEARATHTIMVLVSSFFVFYSVHSFLTIWTTVVANPGQWIVTNSVLVASCFPARSPFVLIMSDTHISQFCFACRTRKTLFPNLVVMP

SEQ ID NO: 5031 - protein, 346 aa, Homo sapiens
MDQYCILGRIGEGAHGIVFKAKHVETGEIVALKKVALRRLEDGFPNQALREIKALQEMEDNQYVVQLKAVFPHGGGFVLAFEFMLSDLAEVVRHAQRPLAQAQVKSYLQMLLKGVAFCHANNIVHRDLKPANLLISASGQLKIADFGLARVFSPDGSRLYTHQVATRWYRAPELLYGARQYDQGVDLWSVGCIMGELLNGSPLFPGKNDIEQLCYVLRILGTPNPQVWPELTELPDYNKISFKEQVPMPLEEVLPDVSPQALDLLGQFLLYPPHQRIAASKALLHQYFFTAPLPAHPSELPIPQRLGGPAPKAHPGPPHIHDFHVDRPLEESLLNPELIRPFILEG

SEQ ID NO: 5032 - protein, 1847 aa, Homo sapiens
MPRGRPPKPRESKARGDSDGVLTLNAENTNYAYQVPNFHKCEICLLSFPKESQFQRHMRDHERNDKPHRCDQCPQTFNVEFNLTLHKCTHSGEDPTCPVCNKKFSRVASLKAHIMLHEKEENLICSECGDEFTLQSQLAVHMEEHRQELAGTRQHACKACKKEFETSSELKEHMKTHYKIRVSSTRSYNRNIDRSGFTYSCPHCGKTFQKPSQLTRHIRIHTGERPFKCSECGKAFNQKGALQTHMIKHTGEKPHACAFCPAAFSQKGNLQSHVQRVHSEVKNGPTYNCTECSCVFKSLGSLNTHISKMHMGGPQNSTSSTETAHVLTATLFQTLPLQQTEAQATSASSQPSSQAVSDVIQQLLELSEPAPVESGQSPQPGQQLSITVGINQDILQQALENSGLSSIPAAAHPNDSCHAKTSAPHAQNPDVSSVSNEQTDPTDAEQEKEQESPEKLDKKEKKMIKKKSPFLPGSIREENGVRWHVCPYCAKEFRKPSDLVRHIRIHTHEKPFKCPQCFRAFAVKSTLTAHIKTHTGIKAFKCQYCMKSFSTSGSLKVHIRLHTGVRPFACPHCDKKFRTSGHRKTHIASHFKHTELRKMRHQRKPAKVRVGKTNIPVPDIPLQEPILITDLGLIQPIPKNQFFQSYFNNNFVNEADRPYKCFYCHRAYKKSCHLKQHIRSHTGEKPFKCSQCGRGFVSAGVLKAHIRTHTGLKSFKCLICNGAFTTGGSLRRHMGIHNDLRPYMCPYCQKTFKTSLNCKKHMKTHRYELAQQLQQHQQAASIDDSTVDQQSMQASTQMQVEIESDELPQTAEVVAANPEAMLDLEPQHVVGTEEAGLGQQLADQPLEADEDGFVAPQDPLRGHVDQFEEQSPAQQSFEPAGLPQGFTVTDTYHQQPQFPPVQQLQDSSTLESQALSTSFHQQSLLQAPSSDGMNVTTRLIQESSQEELDLQAQGSQFLEDNEDQSRRSYRCDYCNKGFKKSSHLKQHVRSHTGEKPYKCKLCGRGFVSSGVLKSHEKTHTGVKAFSCSVCNASFTTNGSLTRHMATHMSMKPYKCPFCEEGFRTTVHCKKHMKRHQTVPSAVSATGETEGGDICMEEEEEHSDRNASRKSRPEVITFTEEETAQLAKIRPQESATVSEKVLVQSAAEKDRISELRDKQAELQDEPKHANCCTYCPKSFKKPSDLVRHVRIHTGEKPYKCDECGKSFTVKSTLDCHVKTHTGQKLFSCHVCSNAFSTKGSLKVHMRLHTGAKPFKCPHCELRFRTSGRRKTHMQFHYKPDPKKARKPMTRSSSEGLQPVNLLNSSSTDPNVFIMNNSVLTGQFDQNLLQPGLVGQAILPASVSAGGDLTVSLTDGSLATLEGIQLQLAANLVGPNVQISGIDAASINNITLQIDPSILQQTLQQGNLLAQQLTGEPGLAPQNSSLQTSDSTVPASVVIQPISGLSLQPTVTSANLTIGPLSEQDSVLTTNSSGTQDLTQVMTSQGLVSPSGGPHEITLTINNSSLSQVLAQAAGPTATSSSGSPQEITLTISELNTTSGSLPSTTPMSPSAISTQNLVMSSSGVGGDASVTLTLADTQGMLSGGLDTVTLNITSQGQQFPALLTDPSLSGQGGAGSPQVILVSHTPQSASAACEEIAYQVAGVSGNLAPGNQPEKEGRAHQCLECDRAFSSAAVLMHHSKEVHGRERIHGCPVCRKAFKRATHLKEHMQTHQAGPSLSSQKPRVFKCDTCEKAFAKPSQLERHSRIHTGERPFHCTLCEKAFNQKSALQVHMKKHTGERPYKCAYCVMGFTQKSNMKLHMKRAHSYAGALQESAGHPEQDGEELSRTLHLEEVVQEAAGEWQALTHVF

SEQ ID NO: 5033 - protein, 181 aa, Homo sapiens
MEEIPAQEAAGSPRVQFQSLETQSECLSPEPQFVQDTDMEQGLTGAPPVPQVPALPREGSPGDQAAALLTARYQEFVTFEDVAVHLTREEWGYLDPVQRDLYREVMLENYGNVVSLGILLRLPTTRIHSVNSCPALSHTQASAFSGETLAVLTAGISKRWPKYRLPIDIARPCSETPFPRL

SEQ ID NO: 5034 - protein, 249 aa, Homo sapiens
MVDRLANSEANTRRISIVENCFGAAGQPLTIPGRVLIGEGVLTKLCRKKPKARQFFLFNDILVYGNIVIQKKKYNKQHIIPLENVTIDSIKDEGDLRNGWLIKTPTKSFAVYAATATEKSEWMNHINKCVTDLLSKSGKTPSNEHAAVWVPDSEATVCMRCQKAKFTPVNRRHHCRKCGFVVCGPCSEKRFLLPSQSSKPVRICDFCYDLLSAGDMATCQPARSDSYSQSLKSPLNDMSDDDDDDDSSD

SEQ ID NO: 5035 - protein, 365 aa, Homo sapiens
MEGQSVEELLAKAEQDEAEKLQRITVHKELELQFDLGNLLASDRNPPTGLRCAGPTPEAELQALARDNTQLLINQLWQLPTERVEEAIVARLPEPTTRLPREKPLPRPRPLTRWQQFARLKGIRPKKKTNLVWDEVSGQWRRRWGYQRARDDTKEWLIEVPGNADPLEDQFAKRIQAKKERVAKNELNRLRNLARAHKMQLPSAAGLHPTGHQSKEELGRAMQVAKVSTASVGRFQERLPKEKVPRGSGKKRKFQPLFGDFAAEKKNQLELLRVMNSKKPQLDVTRATNKQMREEDQEEAAKRRKMSQKGKRKGGRQGPGGKRKGGPPSQGGKRKGGLGGKMNSGPPGLGGKRKGGQRPGGKRRK

SEQ ID NO: 5036 - protein, 903 aa, Homo sapiens
MTTIHSRQMLQEHVSMEFSSSTTHVQTFSQTTKIVGEEVVRRKSSSIVEFFSLVTRSSNIPAGDSVPEFVEKPQPVTAPEGDKAVFRARVQGNAKPHISWKRESGIPIKESAKIFYDSINKEHVLKLEPLTSDDSDNYKCIASNDHADAIYTVSLLVTEGQEKMDFKKMLKKRAPPAPKKKQKKVANEKEMLEILSKVPKKDFEKVCMEYGFTDFRGLLRKLKEMKKKVEVEAIRILKPLEDKETKVDTTVVFDCIMELKDPNVKMIWIKGTEPLRIQYSLGKYDVKQMGTKYMLVISNVNMNDAGIYSLSVGDKRMSAELTVLDEPLKFLGEMKPVKVTERQTAVFEIRLSKKEPNFVWKFNGKELKRDDKYEITVSEDGLTHTLKIKDARLSDSGEFSAEAGNLVQKAQLTVDRIPIKFVSNLKNVRVKERSRACLECELTSKDVTLRWKKDGQLLMHGTKYSMNHEGKRAELIIEDAQLSDGGEYTVVAMQDGDPTEYYSTAIVTVEERLATVKSGMSDVHAATGSPAELCVVLNDEKVEGVWLKDGKEITDLPGMQIVKQGAVHKLIFPSMGPEHEGKYTFRAKGTESEASVFIADPPTIDPSVLEALAAHAITVKVGHTAHIKVPFRGKPLPKVTWYKDGMEVTEEERVSMERGEDQALLTISNCVREDSGLILLKLKNDHGSATATLHLSVLEPPGFASQPQVTDVTKEAVTITWNAPTQDGGAPVLGYIVERRKKGSNLWVPVNKDPIQGTKCTVDGLLEDTEYEFRVIAVNKAGPGQPSVPSSSVVAKDPVKPPGLVQDLHVSDSSNSSISLAWREPAEGDPPSGYILEMRAEDTKEWSKCTKIPISGTCYTVGGLIERQKYFFRIRAVNEAGVGEPVELDKGVRAMPPPGLTTT

SEQ ID NO: 5037 - protein, 705 aa, Homo sapiens
MLREEAAQKRKGKEPGMALPQGRLTFRDVAIEFSLAEWKCLNPSQRALYREVMLENYRNLEAVDISSKCMMKEVLSTGQGNTEVIHTGTLQRHESHHIGDFCFQEIEKEIHDIEFQCQEDERNGLEAPMTKIKKLTGSTDQHDHRHAGNKPIKDQLGSSFYSHLPELHIFQIKGEIGNQLEKSTNDAPSVSTFQRISCRPQTQISNNYGNNPLNSSLLPQKQEVHMREKSFQCNKSGKAFNCSSLLRKHQIPHLGDKQYKCDVCGKLFNHEQYLACHDRCHTVEKPYKCKECGKTFSQESSLTCHRRLHTGVKRYNCNECGKIFGQNSALLIDKAIDTGENPYKCNECDKAFNQQSQLSHHRIHTGEKPYKCEECDKVFSRKSTIETHKRIHTGEKPYRCKVCDTAFTWHSQLARHRRIHTAKKTYKCNECGKTFSHKSSLVCHHRLHGGEKSYKCKVCDKAFVWSSQLAKHTRIDCGEKPYKCNECGKTFGQNSDLLIHKSIHTGEQPYKCDECEKVFSRKSSLETHKIGHTGEKPYKCKVCDKAFACHSYLAKHTRIHSGEKPYKCNECSKTFSHRSYLVCHHRVHSGEKPYKCNECSKTFSRRSSLHCHRRLHSGEKPYKCNECGNTFRHCSSLIYHRRLHTGEKSYKCTICDKAFVRNSLLSRHTRIHTAEKPYKCNECGKAFNQQSHLSRHHRIHTGEKP

SEQ ID NO: 5038 - protein, 331 aa, Homo sapiens
MSGENVTRVGTFILVGFPTAPGLQYLLFLLFLLTYLFVLVENLAIILTVWSSTSLHRPMYYFLSSMSFLEIWYVSDITPKMLEGFLLQQKRISFVGCMTQLYFFSSLVCTECVLLASMAYDRYVAICHPLRYHVLVTPGLCLQLVGFSFVSGFTISMIKVCFISSVTFCGSNVLNHFFCDISPILKLACTDFSTAELVDFILAFIILVFPLLATMLSYAHITLAVLRIPSATGCWRAFFTCASHLTVVTVFYTALLFMYVRPQAIDSRSSNKLISVLYTVITPILNPLIYCLRNKEFKNALKKAFGLTSCAVEGRLSSLLELHLQIHSQPL

SEQ ID NO: 5039 - protein, 353 aa, Homo sapiens
MKRDSWVPSKYQFLCSDHFTPDSLDIRWGIRYLKQTAVPTIFSLPEDNQGKDPSKKKSQKKNLEDEKEVCPKAKSEESFVLNETKKNIVNTDVPHQHPELLHSSSLVKPPAPKTGSIQNNMLTLNLVKQHTGKPESTLETSVNQDTGRGGFHTCFENLNSTTITLTTSNSESIHQSLETQEVLEVTTSHLANPNFTSNSMEIKSAQENPFLFSTINQTVEELNTNKESVIAIFVPAENSKPSVNSFISAQKETTEMEDTDIEDSLYKDVDYGTEVLQIEHSYCRQDINKEHLWQKVSKLHSKITLLELKEQQTLGRLKSLEALIRQLKQENWLSEENVKIIENHFTTYEVTMI

SEQ ID NO: 5040 - protein, 324 aa, Homo sapiens
MSRPSSTGPSANKPCSKQPPPQPQHTPSPAAPPAAATISAAGPGSSAVPAAAAVISGPGGGGGAGPVSPQHHELTSLFECPVCFDYVLPPILQCQAGHLVCNQCRQKLSCCPTCRGALTPSIRNLAMEKVASAVLFPCKYATTGCSLTLHHTEKPEHEDICEYRPYSCPCPGASCKWQGSLEAVMSHLMHAHKSITTLQGEDIVFLATDINLPGAVDWVMMQSCFGHHFMLVLEKQEKYEGHQQFFAIVLLIGTRKQAENFAYRLELNGNRRRLTWEATPRSIHDGVAAAIMNSDCLVFDTAIAHLFADNGNLGINVTISTCCP

SEQ ID NO: 5041 - protein, 1053 aa, Homo sapiens
MPTAESEAKVKTKVRFEELLKTHSDLMREKKKLKKKLVRSEENISPDTIRSNLHYMKETTSDDPDTIRSNLPHIKETTSDDVSAANTNNLKKSTRVTKNKLRNTQLATENPNGDASVEEDKQGKPNKKVIKTVPQLTTQDLKPETPENKVDSTHQKTHTKPQPGVDHQKSEKANEGREETDLEEDEELMQAYQCHVTEEMAKEIKRKIRKKLKEQLTYFPSDTLFHDDKLSSEKRKKKKEVPVFSKAETSTLTISGDTVEGEQKKESSVRSVSSDSHQDDEISSMEQSTEDSMQDDTKPKPKKTKKKTKAVADNNEDVDGDGVHEITSRDSPVYPKCLLDDDLVLGVYIHRTDRLKSDFMISHPMVKIHVVDEHTGQYVKKDDSGRPVSSYYEKENVDYILPIMTQPYDFKQLKSRLPEWEEQIVFNENFPYLLRGSDESPKVILFFEILDFLSVDEIKNNSEVQNQECGFRKIAWAFLKLLGANGNANINSKLRLQLYYPPTKPRSPLSVVEAFEWWSKCPRNHYPSTLYVTVRGLKVPDCIKPSYRSMMALQEEKGKPVHCERHHESSSVDTEPGLEESKEVIKWKRLPGQACRIPNKHLFSLNAGERGCFCLDFSHNGRILAAACASRDGYPIILYEIPSGRFMRELCGHLNIIYDLSWSKDDHYILTSSSDGTARIWKNEINNTNTFRVLPHPSFVYTAKFHPAVRELVVTGCYDSMIRIWKVEMREDSAILVRQFDVHKSFINSLCFDTEGHHMYSGDCTGVIVVWNTYVKINDLEHSVHHWTINKEIKETEFKGIPISYLEIHPNGKRLLIHTKDSTLRIMDLRILVARKFVGAANYREKIHSTLTPCGTFLFAGSEDGIVYVWNPETGEQVAMYSDLPFKSPIRDISYHPFENMVAFCAFGQNEPILLYIYDFHVAQQEAEMFKRYNGTFPLPGIHQSQDALCTCPKLPHQGSFQIDEFVHTESSSTKMQLVKQRLETVTEVIRSCAAKVNKNLSFTSPPAVSSQQSKLKQSNMLTAQEILHQFGFTQTDSHFAEFNTCILWWKKH

SEQ ID NO: 5042 - protein, 560 aa, Homo sapiens
MGQPAPYAEGPIQGGDAGELCKCDFLVSISIPQTRSDIPAGARRSSMGPRSLDTCWGRGPERHVHRLECNGVIFTHRNLCLPGGKTKTENEEKTAQLNISKESESHRLIVEGLLMDVPQHPDFKDRLEKSQLHDTGNKTKIGDCTDLTVQDHESSTTEREEIARKLEESSVSTHLITKQGFAKEQVFYKCGECGSYYNPHSDFHLHQRVHTNEKPYTCKECGKTFRYNSKLSRHQKIHTGEKPYSCEECGQAFSQNSHLLQHQKLHGGQRPYECTDCGKTFSYNSKLIRHQRIHTGEKPFKCKECGKAFSCSYDCIIHERIHNGEKPYECKECGKSLSSNSVLIQHQRIHTGEKPYECKECGKAFHRSSVFLQHQRFHTGEQLYKCNECWKTFSCSSRFIVHQRIHNGEKPYECQECGKTFSQKITLVQHQRVHTGEKPYECKECGKAFRWNASFIQHQKWHTRKKLINGTGLSAVKPYCPCAILSPLPPQHTCSALAPPGPPLSSSHAVVLPPSVPFFLLLPSSEKANPSPVQIAHFFQDLAFPGKSSLQSPNPLSHSL

SEQ ID NO: 5043 - protein, 469 aa, Homo sapiens
MVLEGNPEVGSPRTSDLQHRGNKGSCVLSSPGEDAQPGEEPIKYGELIVLGCCEEGGEETEAQRGEVTGPRAHSCYNGCLASGDKGRRRSRLALSRRSHANGVKPDVMHHISTPLVSKALSNRGQHSISYTLSRSHSVIVEYTHDSDTDMFQIGRSTENMIDFVVTDTSPGGGAAEGPSAQSTISRYACRILCDRRPPYTARIYAAGFDASSNIFLGERAAKWRTPDGLMDGLTTNGVLVMHPAGGFSEDSAPGVWREISVCGNVYTLRDSRSAQQRGKLVENESNVLQDGSLIDLCGATLLWRTPAGLLRAPTLKQLEAQRQEANAARPQCPVGLSTLAFPSPARGRTAPDKQQPWVYVRCGHVHGYHGWGCRRERGPQERECPLCRLVGPYVPLWLGQEAGLCLDPGPPSHAFAPCGHVCSEKTARYWAQTPLPHGTHAFHAACPFCGAWLTGEHGCVRLIFQGPLD

SEQ ID NO: 5044 - protein, 600 aa, Homo sapiens
MAASAQVSVTFEDVAVTFTQEEWGQLDAAQRTLYQEVMLETCGLLMSLGCPLFKPELIYQLDHRQELWMATKDLSQSSYPGDNTKPKTTEPTFSHLALPEEVLLQEQLTQGASKNSQLGQSKDQDGPSEMQEVHLKIGIGPQRGKLLEKMSSERDGLGSDDGVCTKITQKQVSTEGDLYECDSHGPVTDALIREEKNSYKCEECGKVFKKNALLVQHERIHTQVKPYECTECGKTFSKSTHLLQHLIIHTGEKPYKCMECGKAFNRRSHLTRHQRIHSGEKPYKCSECGKAFTHRSTFVLHHRSHTGEKPFVCKECGKAFRDRPGFIRHYIIHTGEKPYECIECGKAFNRRSYLTWHQQIHTGVKPFECNECGKAFCESADLIQHYIIHTGEKPYKCMECGKAFNRRSHLKQHQRIHTGEKPYECSECGKAFTHCSTFVLHKRTHTGEKPYECKECGKAFSDRADLIRHFSIHTGEKPYECVECGKAFNRSSHLTRHQQIHTGEKPYECIQCGKAFCRSANLIRHSIIHTGEKPYECSECGKAFNRGSSLTHHQRIHTGRNPTIVTDVGRPFMTAQTSVNIQELLLGKEFLNITTEENLW

SEQ ID NO: 5045 - protein, 787 aa, Homo sapiens
MGWRPRRARGTPLLLLLLLLLLWPVPGAGVLQGHIPGQPVTPHWVLDGQPWRTVSLEEPVSKPDMGLVALEAEGQELLLELEKNHRLLAPGYIETHYGPDGQPVVLAPNHTDHCHYQGRVRGFPDSWVVLCTCSGMSGLITLSRNASYYLRPWPPRGSKDFSTHEIFRMEQLLTWKGTCGHRDPGNKAGMTSLPGGPQSRGRREARRTRKYLELYIVADHTLFLTRHRNLNHTKQRLLEVANYVDQLLRTLDIQVALTGLEVWTERDRSRVTQDANATLWAFLQWRRGLWAQRPHDSAQLLTGRAFQGATVGLAPVEGMCRAESSGGVSTDHSELPIGAAATMAHEIGHSLGLSHDPDGCCVEAAAESGGCVMAAATGHPFPRVFSACSRRQLRAFFRKGGGACLSNAPDPGLPVPPALCGNGFVEAGEECDCGPGQECRDLCCFAHNCSLRPGAQCAHGDCCVRCLLKPAGALCRQAMGDCDLPEFCTGTSSHCPPDVYLLDGSPCARGSGYCWDGACPTLEQQCQQLWGPGSHPAPEACFQVVNSAGDAHGNCGQDSEGHFLPCAGRDALCGKLQCQGGKPSLLAPHMVPVDSTVHLDGQEVTCRGALALPSAQLDLLGLGLVEPGTQCGPRMVCNSNHNCHCAPGWAPPFCDKPGFGGSMDSGPVQAENHDTFLLAMLLSVLLPLLPGAGLAWCCYRLPGAHLQRCSWGCRRDPACSGPKDGPHRDHPLGGVHPMELGPTATGQPWPLDPENSHEPSSHPEKPLPAVSPDPQADQVQMPRSCLW

SEQ ID NO: 5046 - protein, 441 aa, Homo sapiens
MVQQAESLEAESNLPREALDTEEGEFMACSPVALDESDPDWCKTASGHIKRPMNAFMVWSKIERRKIMEQSPDMHNAEISKRLGKRWKMLKDSEKIPFIREAERLRLKHMADYPDYKYRPRKKPKMDPSAKPSASQSPEKSAAGGGGGSAGGGAGGAKTSKGSSKKCGKLKAPAAAGAKAGAGKAAQSGDYGGAGDDYVLGSLRVSGSGGGGAGKTVKCVFLDEDDDDDDDDDELQLQIKQEPDEEDEEPPHQQLLQPPGQQPSQLLRRYNVAKVPASPTLSSSAESPEGASLYDEVRAGATSGAGGGSRLYYSFKNITKQHPPPLAQPALSPASSRSVSTSSSSSSGSSSGSSGEDADDLMFDLSLNFSQSAHSASEQQLGGGAAAGNLSLSLVDKDLDSFSEGSLGSHFEFPDYCTPELSEMIAGDWLEANFSDLVFTY

SEQ ID NO: 5047 - protein, 2286 aa, Homo sapiens
MSLRSGGRRRADPGADGEASRDDGATSSVSALKRLERSQWTDKMDLRFGFERLKEPGEKTGWLINMHPTEILDEDKRLGSAVDYYFIQDDGSRFKVALPYKPYFYIATRKGCEREVSSFLSKKFQGKIAKVETVPKEDLDLPNHLVGLKRNYIRLSFHTVEDLVKVRKEISPAVKKNREQDHASDAYTALLSSVLQRGGVITDEEETSKKIADQLDNIVDMREYDVPYHIRLSIDLKIHVAHWYNVRYRGNAFPVEITRRDDLVERPDPVVLAFDIETTKLPLKFPDAETDQIMMISYMIDGQGYLITNREIVSEDIEDFEFTPKPEYEGPFCVFNEPDEAHLIQRWFEHVQETKPTIMVTYNGDFFDWPFVEARAAVHGLSMQQEIGFQKDSQGEYKAPQCIHMDCLRWVKRDSYLPVGSHNLKAAAKAKLGYDPVELDPEDMCRMATEQPQTLATYSVSDAVATYYLYMKYVHPFIFALCTIIPMEPDEVLRKGSGTLCEALLMVQAFHANIIFPNKQEQEFNKLTDDGHVLDSETYVGGHVEALESGVFRSDIPCRFRMNPAAFDFLLQRVEKTLRHALEEEEKVPVEQVTNFEEVCDEIKSKLASLKDVPSRIECPLIYHLDVGAMYPNIILTNRLQPSAMVDEATCAACDFNKPGANCQRKMAWQWRGEFMPASRSEYHRIQHQLESEKFPPLFPEGPARAFHELSREEQAKYEKRRLADYCRKAYKKIHITKVEERLTTICQRENSFYVDTVRAFRDRRYEFKGLHKVWKKKLSAAVEVGDAAEVKRCKNMEVLYDSLQLAHKCILNSFYGYVMRKGARWYSMEMAGIVCFTGANIITQARELIEQIGRPLELDTDGIWCVLPNSFPENFVFKTTNVKKPKVTISYPGAMLNIMVKEGFTNDQYQELAEPSSLTYVTRSENSIFFEVDGPYLAMILPASKEEGKKLKKRYAVFNEDGSLAELKGFEVKRRGELQLIKIFQSSVFEAFLKGSTLEEVYGSVAKVADYWLDVLYSKAANMPDSELFELISENRSMSRKLEDYGEQKSTSISTAKRLAEFLGDQMVKDAGLSCRYIISRKPEGSPVTERAIPLAIFQAEPTVRKHFLRKWLKSSSLQDFDIRAILDWDYYIERLGSAIQKIITIPAALQQVKNPVPRVKHPDWLHKKLLEKNDVYKQKKISELFTLEGRRQVTMAEASEDSPRPSAPDMEDFGLVKLPHPAAPVTVKRKRVLWESQEESQDLTPTVPWQEILGQPPALGTSQEEWLVWLRFHKKKWQLQARQRLARRKRQRLESAEGVLRPGAIRDGPATGLGSFLRRTARSILDLPWQIVQISETSQAGLFRLWALVGSDLHCIRLSIPRVFYVNQRVAKAEEGASYRKVNRVLPRSNMVYNLYEYSVPEDMYQEHINEINAELSAPDIEGVYETQVPLLFRALVHLGCVCVVNKQLVRHLSGWEAETFALEHLEMRSLAQFSYLEPGSIRHIYLYHHAQAHKALFGIFIPSQRRASVFVLDTVRSNQMPSLGALYSAEHGLLLEKVGPELLPPPKHTFEVRAETDLKTICRAIQRFLLAYKEERRGPTLIAVQSSWELKRLASEIPVLEEFPLVPICVADKINYGVLDWQRHGARRMIRHYLNLDTCLSQAFEMSRYFHIPIGNLPEDISTFGSDLFFARHLQRHNHLLWLSPTARPDLGGKEADDNCLVMEFDDQATVEINSSGCYSTVCVELDLQNLAVNTILQSHHVNDMEGADSMGISFDVIQQASLEDMITGGQAASAPASYDETALCSNTFRILKSMVVGWVKEITQYHNIYADNQVMHFYRWLRSPSSLLHDPALHRTLHNMMKKLFLQLIAEFKRLGSSVIYANFNRIILCTKKRRVEDAIAYVEYITSSIHSKETFHSLTISFSRCWEFLLWMDPSNYGGIKGKVSSRIHCGLQDSQKAGGAEDEQENEDDEEERDGEEEEEAEESNVEDLLENNWNILQFLPQAASCQNYFLMIVSAYIVAVYHCMKDGLRRSAPGSTPVRRRGASQLSQEAEGAVGALPGMITFSQDYVANELTQSFFTITQKIQKKVTGSRNSTELSEMFPVLPGSHLLLNNPALEFIKYVCKVLSLDTNITNQVNKLNRDLLRLVDVGEFSEEAQFRDPCRSYVLPEVICRSCNFCRDLDLCKDSSFSEDGAVLPQWLCSNCQAPYDSSAIEMTLVEVLQKKLMAFTLQDLVCLKCRGVKETSMPVYCSCAGDFALTIHTQVFMEQIGIFRNIAQHYGMSYLLETLEWLLQKNPQLGH

SEQ ID NO: 5048 - protein, 314 aa, Homo sapiens
MTLGSLGNSSSSVSATFLLSGIPGLERMHIWISIPLCFMYLVSIPGNCTILFIIKTERSLHEPMYLFLSMLALIDLGLSLCTLPTVLGIFWVGAREISHDACFAQLFFIHCFSFLESSVLLSMAFDRFVAICHPLHYVSILTNTVIGRIGLVSLGRSVALIFPLPFMLKRFPYCGSPVLSHSYCLHQEVMKLACADMKANSIYGMFVIVSTVGIDSLLILFSYALILRTVLSIASRAERFKALNTCVSHICAVLLFYTPMIGLSVIHRFGKQAPHLVQVVMGFMYLLFPPVMNPIVYSVKTKQIRDRVTHAFCY

SEQ ID NO: 5049 - protein, 217 aa, Homo sapiens
METIWIYQFRLIVIGDSTVGKSCLLHRFTQGRFPGLRSPACDPTVGVDFFSRLLEIEPGKRIKLQLWDTAGQERFRSITRSYYRNSVGGFLVFDITNRRSFEHVKDWLEEAKMYVQPFRIVFLLVGHKCDLASQRQVTREEAEKLSADCGMKYIETSAKDATNVEESFTILTRDIYELIKKGEICIQDGWEGVKSGFVPNTVHSSEEAVKPRKECFC

SEQ ID NO: 5050 - protein, 1955 aa, Homo sapiens
MFRQFYLWTCLASGIILGSLFEICLGQYDDDCKLARGGPPATIVAIDEESRNGTILVDNMLIKGTAGGPDPTIELSLKDNVDYWVLMDPVKQMLFLNSTGRVLDRDPPMNIHSIVVQVQCINKKVGTIIYHEVRIVVRDRNDNSPTFKHESYYATVNELTPVGTTIFTGFSGDNGATDIDDGPNGQIEYVIQYNPDDPTSNDTFEIPLMLTGNIVLRKRLNYEDKTRYFVIIQANDRAQNLNERRTTTTTLTVDVLDGDDLGPMFLPCVLVPNTRDCRPLTYQAAIPELRTPEELNPIIVTPPIQAIDQDRNIQPPSDRPGILYSILVGTPEDYPRFFHMHPRTAELSLLEPVNRDFHQKFDLVIKAEQDNGHPLPAFAGLHIEILDENNQSPYFTMPSYQGYILESAPVGATISDSLNLTSPLRIVALDKDIEDTKDPELHLFLNDYTSVFTVTQTGITRYLTLLQPVDREEQQTYTFSITAFDGVQESEPVIVNIQVMDANDNTPTFPEISYDVYVYTDMRPGDSVIQLTAVDADEGSNGEITYEILVGAQGDFIINKTTGLITIAPGVEMIVGRTYALTVQAADNAPPAERRNSICTVYIEVLPPNNQSPPRFPQLMYSLEISEAMRVGAVLLNLQATDREGDSITYAIENGDPQRVFNLSETTGILTLGKALDRESTDRYILIITASDGRPDGTSTATVNIVVTDVNDNAPVFDPYLPRNLSVVEEEANAFVGQVKATDPDAGINGQVHYSLGNFNNLFRITSNGSIYTAVKLNREVRDYYELVVVATDGAVHPRHSTLTLAIKVLDIDDNSPVFTNSTYTVLVEENLPAGTTILQIEAKDVDLGANVSYRIRSPEVKHFFALHPFTGELSLLRSLDYEAFPDQEASITFLVEAFDIYGTMPPGIATVTVIVKDMNDYPPVFSKRIYKGMVAPDAVKGTPITTVYAEDADPPGLPASRVRYRVDDVQFPYPASIFEVEEDSGRVITRVNLNEEPTTIFKLVVVAFDDGEPVMSSSATVKILVLHPGEIPRFTQEEYRPPPVSELATKGTMVGVISAAAINQSIVYSIVSGNEEDTFGINNITGVIYVNGPLDYETRTSYVLRVQADSLEVVLANLRVPSKSNTAKVYIEIQDENNHPPVFQKKFYIGGVSEDARMFTSVLRVKATDKDTGNYSVMAYRLIIPPIKEGKEGFVVETYTGLIKTAMLFHNMRRSYFKFQVIATDDYGKGLSGKADVLVSVVNQLDMQVIVSNVPPTLVEKKIEDLTEILDRYVQEQIPGAKVVVESIGARRHGDAFSLEDYTKCDLTVYAIDPQTNRAIDRNELFKFLDGKLLDINKDFQPYYGEGGRILEIRTPEAVTSIKKRGESLGYTEGALLALAFIIILCCIPAILVVLVSYRQFKVRQAECTKTARIQAALPAAKPAVPAPAPVAAPPPPPPPPPGAHLYEELGDSSILFLLYHFQQSRGNNSVSEDRKHQQVVMPFSSNTIEAHKSAHVDGSLKSNKLKSARKFTFLSDEDDLSAHNPLYKENISQVSTNSDISQRTDFVDPFSPKIQAKSKSLRGPREKIQRLWSQSVSLPRRLMRKVPNRPEIIDLQQWQGTRQKAENENTGICTNKRGSSNPLLTTEEANLTEKEEIRQGETLMIEGTEQLKSLSSDSSFCFPRPHFSFSTLPTVSRTVELKSEPNVISSPAECSLELSPSRPCVLHSSLSRRETPICMLPIETERNIFENFAHPPNISPSACPLPPPPPISPPSPPPAPAPLAPPPDISPFSLFCPPPSPPSIPLPLPPPTFFPLSVSTSGPPTPPLLPPFPTPLPPPPPSIPCPPPPSASFLSTECVCITGVKCTTNLMPAEKIKSSMTQLSTTTVCKTDPQREPKGILRHVKNLAELEKSVANMYSQIEKNYLRTNVSELQTMCPSEVTNMEITSEQNKGSLNNIVEGTEKQSHSQSTSL

SEQ ID NO: 5051 - protein, 416 aa, Homo sapiens
MKPGMVPPPPGEESQTVILPPGWQSYLSPQGRRYYVNTTTNETTWERPSSSPGIPASPGSHRSSLPPTVNGYHASGTPAHPPETAHMSVRKSTGDSQNLGSSSPSKKQSKENTITINCVTFPHPDTMPEQQLLKPTEWSYCDYFWADKKDPQGNGTVAGFELLLQKQLKGKQMQKEMSEFIRERIKIEEDYAKNLAKLSQNSLASQEEGSLGEAWAQVKKSLADEAEVHLKFSAKLHSEVEKPLMNFRENFKKDMKKCDHHIADLRKQLASRYASVEKARKALTERQRDLEMKTQQLEIKLSNKTEEDIKKARRKSTQAGDDLMRCVDLYNQAQSKWFEEMVTTTLELERLEVERVEMIRQHLCQYTQLRHETDMFNQSTVEPVDQLLRKVDPAKDRELWVREHKTGNIRPVDMEI

SEQ ID NO: 5052 - protein, 1530 aa, Homo sapiens
MSHSHPAGLLAAYNSLMDKHLAGYFNNTRIRRHLLRSGLITRSGRILSEKEYKLNMMKRDHQKYIRECLAQAIFHKVLDMERYHQLEIKKKLETLARKERIQRFKGEHTRRSVENNMPILSPHPPVGPKSNRGHSVLVDEGHSSPLALTAPRPYTAPGNMQPPIRLQPLPSNPAVETVPKVTSRSRSKTSLLENEALFPIGGKKAVMKFRNSIGNSQRMNSYQLPNINSYMMPIPPPLPPTGKITRENRSETWRRRRFRPTTAPNGLEPLLTKDSRRIHKTSLHSNAAITMIYLGKNVHLSSDNPDFRDEIKVYQQHCGGENLCVYKGKLLEKETFQFISKRHHGFPFSLTFFLNGMQVNRLSSCCEYKHRKGSRLGGKRGYFGFVCVERSSPCYKCIIAMGLDKKPSLPKSRKEKSTEKGEELKKAEGKVRKEREYVIPKRNEIKENKTSVSAKFSAQEIKTGLKEVVTAVEEMTSKGKPGQEVLEDDQENTLKYEYEEDFEVDEEKQGEKSNEEGQADVQMNGIPQSPLDDKKDNLDPEKESETSSQKAPDARDNVKDENDGCSESELEEDKQDMKTASSTSSRSHPYSSDSEDESAVGDREAHTDSSTDESARRSSSQELSENDKPRKSHLPIEESLEIEIEDQEITKADVETKPMPIDESFENVLKEGTEKGTQEIAEGLSEKSGKHVSAEEKEKDKSKLWEESTAQVKDKKAGLPGLEEGGKDSLPLAYVLALGAPTMNFMVDETAAINSNKESQQLVQKTYTLEKKEAMEEDEAPQHRDADIVQGKGEAALWGEAGAVHEAPLRAWKPTAEQPELAEEFTEKREIPPGIERGAEGAAEAEGVRRLGEGGSDPIGQAAAKDAVGLSKDEAPEKQALMLTVLETDKAASEGEQGLEKAVLANEAAALNLEHLHEVAALREAATSEEGEAEGGVAVSDVGESEEEASIDLEDTGPMEDTASKREDGSEEAILGGEEPAKERKEVMRTETRLSPFTGEAEASRMQVSEGSPEEGSLAKEAFLCKEDVEGEEMVTEAEANREDDRKEILPKELDLARERRKAERPKTSLRKTDSEREEVTRANALKDEDAFKEEQKLKAEEGETETEVRAEEETKAPPNEMGSDAENEAPVEASELSDNPGLLGEDSLKETVVPIFEATPGFEKSLENITALRKEGGGERLSEARDTEHKDREELSSRENRALKEGHRQDGEGALAAPEAEPAGKVQAPEGLIPATGQAEELAAKDHDSCAGLEGRAEGQGGVDVVLRTQEAVAEEDPIMAEKFREEAVDEDPEEEEDKECTLETEAMQDRNSEGDGDMEGEGNTQKNEGMGGGRVVAVEVLHGGGETAETAAEEREVLAGSETAEEKTIANKASSFSDVAEEETWHQQDELVGKTAAAGKVVVEELARSGEEVPAAEEMTVTYTTEAGVGTPGALERKTSGLGQEQEEGSEGQEAATGSGDGRQETGAAEKFRLGLSREGERELSPESLQAMATLPVKPDFTETREKQQHMVQGESETADVSPNNVQV

SEQ ID NO: 5053 - protein, 447 aa, Homo sapiens
MEGGWPARQSALLCLTVSLLLQGRGDAFTINCSGFDQHGVDPAVFQAVFDRKAFRPFTNYSIPTRVNISFTLSAILGVDAQLQLLTSFLWMDLVWDNPFINWNPKECVGINKLTVLAENLWLPDIFIVESMDVDQTPSGLTAYISSEGRIKYDKPMRVTSICNLDIFYFPFDQQNCTFTFSSFLYTVDSMLLGMDKEVWEITDTSRKVIQTQGEWELLGINKATPKMSMGNNLYDQIMFYVAIRRRPSLYIINLLVPSSFLVAIDALSFYLPAESENRAPFKITLLLGYNVFLLMMNDLLPASGTPLISVYFALCLSLMVVSLLETVFITYLLHVATTQPPPMPRWLHSLLLHCTSPGRCCPTAPQKGNKGLGLTLTHLPGPKEPGELAGKKLGPRETEPDGGSGWTKTQLMELWVQFSHAMDTLLFRLYLLFMASSILTVIVLWNT

SEQ ID NO: 5054 - protein, 1445 aa, Homo sapiens
MGNLVIPLGKGRAGRVESGQRIPPPAPRPSVECTGDDIALQMEKMLFPLKSPSATWLSPSSTPWMMDFILTSVCGLVLLFLLLLYVHSDPPSPPPGRKRSSREPQRERSGRSRSRKISALKACRILLRELEETRDLNYLLESHLRKLAGEGSSHLPLGGDPLGDVCKPVPAKAHQPHGKCMQDPSPASLSPPAPPAPLASTLSPGPMTFSEPFGPHSTLSASGPPEPLLPLKCPATQPHVVFPPSPQPHGPLASSPPPPDSSLAGLQCGSTTCPVPQSSPLHNQVLPPPTRVISGLGCSSDPIWDLYCWREAATTWGLSTYSHGKSQPRHLPDHTSEASFWGDPTPKHMEVGGCTFIHPDVQKLLETLIAKRALMKMWQEKERKRADHPHMTSLGKEWDITTLNPFWNVSTQPQQLPRPQQVSDATTVGNHLQQKRSQLFWDLPSLNSESLATTVWVSRNPSSQNAHSVPLDKASTSLPGEPEVEASSQLSQAPPQPHHMAQPQHFTPAWPQSQPPPLAEIQTQAHLSPPVPSLGCSSPPQIRGCGASYPTSQERTQSVIPTGKEYLEWPLKKRPKWKRVLPSLLKKSQAVLSQPTAHLPQERPASWSPKSAPILPGVVTSPELPEHWWQGRNAIHQEQSCGPPSRLQASGDLLQPDGEFPGRPQSQAEDTQQALLPSQPSDFAGKGRKDVQKTGFRSSGRFSDKGCLGSKLGPDPSRDQGSGRTSVKALDEDKEAEGDLRRSWKYQSVSSTPRDPDKEHLENKLQIHLARKVGEIKEGWIPMPVRRSWLMAKCAVPKSDTHRKPGKLASWRGGKAHVNTSQELSFLHPCTQQILEVHLVRFCVRHSWGTDLQSLEPINVWSGEAQAPPFPQSTFTPWASWVSRVESVPKVPIFLGKRPQNGPGDNRTTSKSVPTVSGPLAAPPPEQEGVQRPPRGSQSADTHGRSEAFPTGHKGRGCSQPPTCSLVGRTWQSRTVLESGKPKPRLEGSMGSEMAGNEAWLESESMSPGDPCSSRALQVLSIGSQWARAEDALQALKVGEKPPTWEVTLGASVRASSGSVQEDLRSTGALGTTGNPSASSVCVAQDPEQLHLKAQVVSEIALIVQVDSEEQLPGRAPGILLQDGATGLCLPGRHMDMLTAADRLPTQAPLSTSQSVSGKNMTASQGPCALLWKGGDSPGQQEPGSPKAKAPQKSQKTLGCADKGEAHRRPRTGEQGHRSKGPRTSEASGRSHPAQAREIGDKQERKYNQLQLEKGQTPPESHFQRKISHHPQGLHPRKGGTRWEDVLQKGKPGADAFQSWGSGPPRQFMDCMADKAWTISRVVGQILVDKLGLQWGRGPSEVNRHKGDFRAQENVPSCCHRGHCHQERSREMRALACSPKATPKGHHCPVKNRGIRDRDSSWAPPPREPVSPAGPHHHRPRMASTSGGPHPQLQELMSAQRCLAS

SEQ ID NO: 5055 - protein, 553 aa, Homo sapiens
MGALEMQDEEDRIEALKQVADKLPRPNLLLLKHLVYVLHLISKNSEVNRMDSSNLAICIGPNMLTLENDQSLSFEAQKDLNNKVKTLVEFLIDNCFEIFGENIPVHSSITSDDSLEHTDSSDVSTLQNDSAYDSNDPDVESNSSSGISSPSRQPQVPMATAAGLDSAGPQDAREVSPEPIVSTVARLKSSLAQPDRRYSEPSMPSSQECLESRVTNQTLTKSEGDFPVPRVGSRLESEEAEDPFPEEVFPAVQGKTKRPVDLKIKNLAPGSVLPRALVLKAFSSSSLDASSDSSPVASPSSPKRNFFSRHQSFTTKTEKGKPSREIKKHSMSFTFAPHKKVLTKNLSAGSGKSQDFTRDHVPRGVRKESQLAGRIVQENGCETHNQTARGFCLRPHALSVDDVFQGADWERPGSPPSYEEAMQGPAARLVASESQTVGSMTVGSMRARMLEAHCLLPPLPPAHHVEDSRHRGSKEPLPGHGLSPLPERWKQSRTVHASGDSLGHVSGPGRPELLPLRTVSESVQRNKRDCLVRRCSQPVFEADQFQYAKESYI

SEQ ID NO: 5056 - protein, 344 aa, Homo sapiens
MATPYVPVPMPIGNSASSFTTNRNQRSSSFGSVSTSSNSSKGQLEDSNMGNFKQTSVPDQMDNTSSVCSSPLIRTKFTGTASSIEYSTRPRDTEEQNPETVNWEDRPSTPTILGYEVMEERAKFTVYKILVKKTPEESWVVFRRYTDFSRLNDKLKEMFPGFRLALPPKRWFKDNYNADFLEDRQLGLQAFLQNLVAHKDIANCLAVREFLCLDDPPGPFDSLEESRAFCETLEETNYRLQKELLEKQKEMESLKKLLSEKQLHIDTLENRIRTLSLEPEESLDVSETEGEQILKVESSALEVDQDVLDEESRADNKPCLSFSEPENAVSEIEVAEVAYDAEED

SEQ ID NO: 5057 - protein, 2294 aa, Homo sapiens
MHVSLAEALEVRGGPLQEEEIWAVLNQSAESLQELFRKVSLADPAALGFIISPWSLLLLPSGSVSFTDENISNQDLRAFTAPEVLQNQSLTSLSDVEKIHIYSLGMTLYWGADYEVPQSQPIKLGDHLNSILLGMCEDVIYARVSVRTVLDACSAHIRNSNCAPSFSYVKHLVKLVLGNLSGTDQLSCNSEQKPDRSQAIRDRLRGKGLPTGRSSTSDVLDIQKPPLSHQTFLNKGLSKSMGFLSIKDTQDENYFKDILSDNSGREDSENTFSPYQFKTSGPEKKPIPGIDVLSKKKIWASSMDLLCTADRDFSSGETATYRRCHPEAVTVRTSTTPRKKEARYSDGSIALDIFGPQKMDPIYHTRELPTSSAISSALDRIRERQKKLQVLREAMNVEEPVRRYKTYHGDVFSTSSESPSIISSESDFRQVRRSEASKRFESSSGLPGVDETLSQGQSQRPSRQYETPFEGNLINQEIMLKRQEEELMQLQAKMALRQSRLSLYPGDTIKASMLDITRDPLREIALETAMTQRKLRNFFGPEFVKMTIEPFISLDLPRSILTKKGKNEDNRRKVNIMLLNGQRLELTCDTKTICKDVFDMVVAHIGLVEHHLFALATLKDNEYFFVDPDLKLTKVAPEGWKEEPKKKTKATVNFTLFFRIKFFMDDVSLIQHTLTCHQYYLQLRKDILEERMHCDDETSLLLASLALQAEYGDYQPEVHGVSYFRMEHYLPARVMEKLDLSYIKEELPKLHNTYVGASEKETELEFLKVCQRLTEYGVHFHRVHPEKKSQTGILLGVCSKGVLVFEVHNGVRTLVLRFPWRETKKISFSKKKITLQNTSDGIKHGFQTDNSKICQYLLHLCSYQHKFQLQMRARQSNQDAQDIDVLHKRWSIVSSPEREITLVNLKKDAKYGLGFQIIGGEKMGRLDLGIFISSVAPGGPADLDGCLKPGDRLISVNSVSLEGVSHHAAIEILQNAPEDVTLVISQPKEKISKVPSTPVHLTNEMKNYMKKSSYMQDSAIDSSSKDHHWSRGTLRHISENSFGPSGGLREGSLSSQDSRTESASLSQSQVNGFFASHLGDQTWQESQHGSPSPSVISKATEKETFTDSNQSKTKKPGISDVTDYSDRGDSDMDEATYSSSQDHQTPKQESSSSVNTSNKMNFKTFSSSPPKPGDIFEVELAKNDNSLGISVTGGVNTSVRHGGIYVKAVIPQGAAESDGRIHKGDRVLAVNGVSLEGATHKQAVETLRNTGQVVHLLLEKGQSPTSKEHVPVTPQCTLSDQNAQGQGPEKVKKTTQVKDYSFVTEENTFEVKLFKNSSGLGFSFSREDNLIPEQINASIVRVKKLFPGQPAAESGKIDVGDVILKVNGASLKGLSQQEVISALRGTAPEVFLLLCRPPPGVLPEIDTALLTPLQSPAQVLPNSSKDSSQPSCVEQSTSSDENEMSDKSKKQCKSPSRRDSYSDSSGSGEDDLVTAPANISNSTWSSALHQTLSNMVSQAQSHHEAPKSQEDTICTMFYYPQKIPNKPEFEDSNPSPLPPDMAPGQSYQPQSESASSSSMDKYHIHHISEPTRQENWTPLKNDLENHLEDFELEVELLITLIKSEKGSLGFTVTKGNQRIGCYVHDVIQDPAKSDGRLKPGDRLIKVNDTDVTNMTHTDAVNLLRAASKTVRLVIGRVLELPRIPMLPHLLPDITLTCNKEELGFSLCGGHDSLYQVVYISDINPRSVAAIEGNLQLLDVIHYVNGVSTQGMTLEEVNRALDMSLPSLVLKATRNDLPVVPSSKRSAVSAPKSTKGNGSYSVGSCSQPALTPNDSFSTVAGEEINEISYPKGKCSTYQIKGSPNLTLPKESYIQEDDIYDDSQEAEVIQSLLDVVDEEAQNLLNENNAAGYSCGPGTLKMNGKLSEERTEDTDCDGSPLPEYFTEATKMNGCEEYCEEKVKSESLIQKPQEKKTDDDEITWGNDELPIERTNHEDSDKDHSFLTNDELAVLPVVKVLPSGKYTGANLKSVIRVLRGLLDQGIPSKELENLQELKPLDQCLIGQTKENRRKNRYKNILPYDATRVPLGDEGGYINASFIKIPVGKEEFVYIACQGPLPTTVGDFWQMIWEQKSTVIAMMTQEVEGEKIKCQRYWPNILGKTTMVSNRLRLALVRMQQLKGFVVRAMTLEDIQTREVRHISHLNFTAWPDHDTPSQPDDLLTFISYMRHIHRSGPIITHCSAGIGRSGTLICIDVVLGLISQDLDFDISDLVRCMRLQRHGMVQTEDQYIFCYQVILYVLTRLQAEEEQKQQPQLLK

SEQ ID NO: 5058 - protein, 327 aa, Homo sapiens
MAIFNNTTSSSSNFLLTAFPGLECAHVWISIPVCCLYTIALLGNSMIFLVIITKRRLHKPMYYFLSMLAAVDLCLTITTLPTVLGVLWFHAREISFKACFIQMFFVHAFSLLESSVLVAMAFDRFVAICNPLNYATILTDRMVLVIGLVICIRPAVFLLPLLVAINTVSFHGGHELSHPFCYHPEVIKYTYSKPWISSFWGLFLQLYLNGTDVLFILFSYVLILRTVLGIVARKKQQKALSTCVCHICAVTIFYVPLISLSLAHRLFHSTPRVLCSTLANIYLLLPPVLNPIIYSLKTKTIRQAMFQLLQSKGSWGFNVRGLRGRWD

SEQ ID NO: 5059 - protein, 520 aa, Homo sapiens
MPGSLPLNAEACWPKDVGIVALEIYFPSQYVDQAELEKYDGVDAGKYTIGLGQAKMGFCTDREDINSLCMTVVQNLMERNNLSYDCIGRLEVGTETIIDKSKSVKTNLMQLFEESGNTDIEGIDTTNACYGGTAAVFNAVNWIESSSWDGRYALVVAGDIAVYATGNARPTGGVGAVALLIGPNAPLIFERGLRGTHMQHAYDFYKPDMLSEYPIVDGKLSIQCYLSALDRCYSVYCKKIHAQWQKEGNDKDFTLNDFGFMIFHSPYCKLVQKSLARMLLNDFLNDQNRDKNSIYSGLEAFGDVKLEDTYFDRDVEKAFMKASSELFSQKTKASLLVSNQNGNMYTSSVYGSLASVLAQYSPQQLAGKRIGVFSYGSGLAATLYSLKVTQDATPGSALDKITASLCDLKSRLDSRTGVAPDVFAENMKLREDTHHLVNYIPQGSIDSLFEGTWYLVRVDEKHRRTYARRPTPNDDTLDEGVGLVHSNIATEHIPSPAKKVPRLPATAAEPEAAVISNGEH

SEQ ID NO: 5060 - protein, 553 aa, Homo sapiens
MAAVSLRLGDLVWGKLGRYPPWPGKIVNPPKDLKKPRGKKCFFVKFFGTEDHAWIKVEQLKPYHAHKEEMIKINKGKRFQQAVDAVEEFLRRAKGKDQTSSHNSSDDKNRRNSSEERSRPNSGDEKRKLSLSEGKVKKNMGEGKKRVSSGSSERGSKSPLKRAQEQSPRKRGRPPKDEKDLTIPESSTVKGMMAGPMAAFKWQPTASEPVKDADPHFHHFLLSQTEKPAVCYQAITKKLKICEEETGSTSIQAADSTAVNGSITPTDKKIGFLGLGLMGSGIVSNLLKMGHTVTVWNRTAEKCDLFIQEGARLGRTPAEVVSTCDITFACVSDPKAAKDLVLGPSGVLQGIRPGKCYVDMSTVDADTVTELAQVIVSRGGRFLEAPVSGNQQLSNDGMLVILAAGDRGLYEDCSSCFQAMGKTSFFLGEVGNAAKMMLIVNMVQGSFMATIAEGLTLAQVTGQSQQTLLDILNQGQLASIFLDQKCQNILQGNFKPDFYLKYIQKDLRLAIALGDAVNHPTPMAAAANEVYKRAKALDQSDNDMSAVYRAYIH

SEQ ID NO: 5061 - protein, 309 aa, Homo sapiens
MNGTYNTCGSSDLTWPPAIKLGFYAYLGVLLVLGLLLNSLALWVFCCRMQQWTETRIYMTNLAVADLCLLCTLPFVLHSLRDTSDTPLCQLSQGIYLTNRYMSISLVTAIAVDRYVAVRHPLRARGLRSPRQAAAVCAVLWVLVIGSLVARWLLGIQEGGFCFRSTRHNFNSMAFPLLGFYLPLAVVVFCSLKVVTALAQRPPTDVGQAEATRKAARMVWANLLVFVVCFLPLHVGLTVRLAVGWNACALLETIRRALYITSKLSDANCCLDAICYYYMAKEFQEASALAVAPSAKAHKSQDSLCVTLA

SEQ ID NO: 5062 - protein, 323 aa, Homo sapiens
MSTLPTQIAPNSSTSMAPTFLLVGMPGLSGAPSWWTLPLIAVYLLSALGNGTILWIIALQPALHRPMHFFLFLLSVSDIGLVTALMPTLLGIALAGAHTVPASACLLQMVFIHVFSVMESSVLLAMSIDRALAICRPLHYPALLTNGVISKISLAISFRCLGLHLPLPFLLAYMPYCLPQVLTHSYCLHPDVARLACPEAWGAAYSLFVVLSAMGLDPLLIFFSYGLIGKVLQGVESREDRWKAGQTCAAHLSAVLLFYIPMILLALINHPELPITQHTHTLLSYVHFLLPPLINPILYSVKMKEIRKRILNRLQPRKVGGAQ

SEQ ID NO: 5063 - protein, 478 aa, Homo sapiens
MGRKKKKQLKPWCWYCNRDFDDEKILIQHQKAKHFKCHICHKKLYTGPGLAIHCMQVHKETIDAVPNAIPGRTDIELEIYGMEGIPEKDMDERRRLLEQKTQESQKKKQQDDSDEYDDDDSAASTSFQPQPVQPQQGYIPPMAQPGLPPVPGAPGMPPGIPPLMPGVPPLMPGMPPVMPGMPPGMMPMGGMMPPGPGIPPLMPGMPPGMPPPVPRPGIPPMTQAQAVSAPGILNRPPAPTATVPAPQPPVTKPLFPSAGQMGTPVTSSSTASSNSESLSASSKALFPSTAQAQAAVQGPVGTDFKPLNSTPATTTEPPKPTFPAYTQSTASTTSTTNSTAAKPAASITSKPATLTTTSATSKLIHPDEDISLEERRAQLPKYQRNLPRPGQAPIGNPPVGPIGGMMPPQPGIPQQQGMRPPMPPHGQYGGHHQGMPGYLPGAMPPYGQGPPMVPPYQGGPPRPPMGMRPPVMSQGGRY

SEQ ID NO: 5064 - protein, 309 aa, Homo sapiens
MTLGNSTEVTEFYLLGFGAQHEFWCILFIVFLLIYVTSIMGNSGIILLINTDSRFQTLTYFFLQHLAFVDICYTSAITPKMLQSFTEEKNLMLFQGCVIQFLVYATFATSDCYLLAMMAVDPYVAICKPLHYTVIMSRTVCIRLVAGSYIMGSINASVQTGFTCSLSFCKSNSINHFFCDVPPILALSCSNVDINIMLLVVFVGSNLIFTGLVVIFSYIYIMATILKMSSSAGRKKSFSTCASHLTAVTIFYGTLSYMYLQSHSNNSQENMKVAFIFYGTVIPMLNPLIYSLRNKEVKEALKVIGKKLF

SEQ ID NO: 5065 - protein, 1698 aa, Homo sapiens
MAGASVKVAVRVRPFNSREMSRDSKCIIQMSGSTTTIVNPKQPKETPKSFSFDYSYWSHTSPEDINYASQKQVYRDIGEEMLQHAFEGYNVCIFAYGQTGAGKSYTMMGKQEKDQQGIIPQLCEDLFSRINDTTNDNMSYSVEVSYMEIYCERVRDLLNPKNKGNLRVREHPLLGPYVEDLSKLAVTSYNDIQDLMDSGNKARTVAATNMNETSSRSHAVFNIIFTQKRHDAETNITTEKVSKISLVDLAGSERADSTGAKGTRLKEGANINKSLTTLGKVISALAEMDSGPNKNKKKKKTDFIPYRDSVLTWLLRENLGGNSRTAMVAALSPADINYDETLSTLRYADRAKQIRCNAVINEDPNNKLIRELKDEVTRLRDLLYAQGLGDITDMTNALVGMSPSSSLSALSSRAASVSSLHERILFAPGSEEAIERLKETEKIIAELNETWEEKLRRTEAIRMEREALLAEMGVAMREDGGTLGVFSPKKTPHLVNLNEDPLMSECLLYYIKDGITRVGREDGERRQDIVLSGHFIKEEHCVFRSDSRGGSEAVVTLEPCEGADTYVNGKKVTEPSILRSGNRIIMGKSHVFRFNHPEQARQERERTPCAETPAEPVDWAFAQRELLEKQGIDMKQEMEQRLQELEDQYRREREEATYLLEQQRLDYESKLEALQKQMDSRYYPEVNEEEEEPEDEVQWTERECELALWAFRKWKWYQFTSLRDLLWGNAIFLKEANAISVELKKKVQFQFVLLTDTLYSPLPPDLLPPEAAKDRETRPFPRTIVAVEVQDQKNGATHYWTLEKLRQRLDLMREMYDRAAEVPSSVIEDCDNVVTGGDPFYDRFPWFRLVGRAFVYLSNLLYPVPLVHRVAIVSEKGEVKGFLRVAVQAISADEEAPDYGSGVRQSGTAKISFDDQHFEKFQSESCPVVGMSRSGTSQEELRIVEGQGQGADVGPSADEVNNNTCSAVPPEGLLLDSSEKAALDGPLDAALDHLRLGNTFTFRVTVLQASSISAEYADIFCQFNFIHRHDEAFSTEPLKNTGRGPPLGFYHVQNIAVEVTKSFIEYIKSQPIVFEVFGHYQQHPFPPLCKDVLSPLRPSRRHFPRVMPLSKPVPATKLSTLTRPCPGPCHCKYDLLVYFEICELEANGDYIPAVVDHRGGMPCMGTFLLHQGIQRRITVTLLHETGSHIRWKEVRELVVGRIRNTPETDESLIDPNILSLNILSSGYIHPAQDDRVSLGNDTRTFYQFEAAWDSSMHNSLLLNRVTPYREKIYMTLSAYIEMENCTQPAVVTKDFCMVFYSRDAKLPASRSIRNLFGSGSLRASESNRVTGVYELSLCHVADAGSPGMQRRRRRVLDTSVAYVRGEENLAGWRPRSDSLILDHQWELEKLSLLQEVEKTRHYLLLREKLETAQRPVPEALSPAFSEDSESHGSSSASSPLSAEGRPSPLEAPNERQRELAVKCLRLLTHTFNREYTHSHVCVSASESKLSEMSVTLLRDPSMSPLGVATLTPSSTCPSLVEGRYGATDLRTPQPCSRPASPEPELLPEADSKKLPSPARATETDKEPQRLLVPDIQEIRVSPIVSKKGYLHFLEPHTSGWARRFVVVRRPYAYMYNSDKDTVERFVLNLATAQVEYSEDQQAMLKTPNTFAVCTEHRGILLQAASDKDMHDWLYAFNPLLAGTIRSKLSRRRSAQMRV

SEQ ID NO: 5066 - protein, 417 aa, Homo sapiens
MSGRSRGRKSSRAKNRGKGRAKARVRPAPDDAPRDPDPSQYQSLGEDTQAAQVQAGAGWGGLEAAASAQLLRLGEEAACRLPLDCGLALRARAAGDHGQAAARPGPGKAASLSERLAADTVFVGTAGTVGRPKNAPRVGNRRGPAGKKAPETCSTAGRGPQVIAGGRQKKGAAGENTSVSAGEEKKEERDAGSGPPATEGSMDTLENVQLKLENMNAQADRAYLRLSRKFGQLRLQHLERRNHLIQNIPGFWGQAFQNHPQLASFLNSQEKEVLSYLNSLEVEELGLARLGYKIKFYFDRNPYFQNKVLIKEYGCGPSGQVVSRSTPIQWLPGHDLQSLSQGNPENNRSFFGWFSNHSSIESDKIVEIINEELWPNPLQFYLLSEGARVEKGKEKEGRQGPGKQPMETTQPGVSQSN

SEQ ID NO: 5067 - protein, 543 aa, Homo sapiens
MASPDRSKRKILKAKKTMPLSCRKQVEMLNKSRNVEALKTAIGSNVPSGNQSFSPSVITRTTEITKCSPSENGASSLDSNKNSISEKSKVFSQNCIKPVEEIVHSETKLEQVVCSYQKPSRTTESPSRVFTEEAKDSLNTSENDSEHQTNVTRSLFEHEGACSLKSSCCPPSVLSGVVQMPESTVTSTVGDKKTDQMVFHLETNSNSESHDKRQSDNILCSEDSGFVPVEKTPNLVNSVTSNNCADDILKTDECSRTSISNCESADSTWQSSLDTNNNSHYQKKRMFSENEENVKRMKTSEQINENICVSLERQTAFLEQVRHLIQQEIYSINYELFDKKLKELNQRIGKTECRNKHEGIADKLLAKIAKLQRRIKTVLLFQRNCLKPNMLSSNGASKVANSEAMILDKNLESVNSPIEKSSVNYEPSNPSEKGSKKINLSSDQNKSVSESNNDDVMLISVESPNLTTPITSNPTDTRKITSGNSSNSPNAEVMKVQYPPWSHIRKLLQTQRKQPHWHKMQSRFLSPLSTCHLSQNHQHHYLN

SEQ ID NO: 5068 - protein, 320 aa, Homo sapiens
MSFLNGTSLTPASFILNGIPGLEDVHLWISFPLCTMYSIAITGNFGLMYLIYCDEALHRPMYVFLALLSFTDVLMCTSTLPNTLFILWFNLKEIDFKACLAQMFFVHTFTGMESGVLMLMALDHCVAICFPLRYATILTNSVIAKAGFLTFLRGVMLVIPSTFLTKRLPYCKGNVIPHTYCDHMSVAKISCGNVRVNAIYGLIVALLIGGFDILCITISYTMILQAVVSLSSADARQKAFSTCTAHFCAIVLTYVPAFFTFFTHHFGGHTIPLHIHIIMANLYLLMPPTMNPIVYGVKTRQVRESVIRFFLKGKDNSHNF

SEQ ID NO: 5069 - protein, 1370 aa, Homo sapiens
MDPSDFPSPFDPLTLPEKPLAGDLPVDMEFGEDLLESQTAPTRGWAPPGPSPSSGALDLLDTPAGLEKDPGVLDGATELLGLGGLLYKAPSPPEVDHGPEGTLAWDAGDQTLEPGPGGQTPEVVPPDPGAGANSCSPEGLLEPLAPDSPITLQSPHIEEEETTSIATARRGSPGQEEELPQGQPQSPNAPPSPSVGETLGDGINSSQTKPGGSSPPAHPSLPGDGLTAKASEKPPERKRSERVRRAEPPKPEVVDSTESIPVSDEDSDAMVDDPNDEDFVPFRPRRSPRMSLRSSVSQRAGRSAVGTKMTCAHCRTPLQKGQTAYQRKGLPQLFCSSSCLTTFSKKPSGKKTCTFCKKEIWNTKDSVVAQTGSGGSFHEFCTSVCLSLYEAQQQRPIPQSGDPADATRCSICQKTGEVLHEVSNGSVVHRLCSDSCFSKFRANKGLKTNCCDQCGAYIYTKTGSPGPELLFHEGQQKRFCNTTCLGAYKKKNTRVYPCVWCKTLCKNFEMLSHVDRNGKTSLFCSLCCTTSYKVKQAGLTGPPRPCSFCRRSLSDPCYYNKVDRTVYQFCSPSCWTKFQRTSPEGGIHLSCHYCHSLFSGKPEVLDWQDQVFQFCCRDCCEDFKRLRGVVSQCEHCRQEKLLHEKLRFSGVEKSFCSEGCVLLYKQDFTKKLGLCCITCTYCSQTCQRGVTEQLDGSTWDFCSEDCKSKYLLWYCKAARCHACKRQGKLLETIHWRGQIRHFCNQQCLLRFYSQQNQPNLDTQSGPESLLNSQSPESKPQTPSQTKVENSNTVRTPEENGNLGKIPVKTRSAPTAPTPPPPPPPATPRKNKAAMCKPLMQNRGVSCKVEMKSKGSQTEEWKPQVIVLPIPVPIFVPVPMHLYCQKVPVPFSMPIPVPVPMFLPTTLESTDKIVETIEELKVKIPSNPLEADILAMAEMIAEAEELDKASSDLCDLVSNQSAEGLLEDCDLFGPARDDVLAMAVKMANVLDEPGQDLEADFPKNPLDINPSVDFLFDCGLVGPEDVSTEQDLPRTMRKGQKRLVLSESCSRDSMSSQPSCTGLNYSYGVNAWKCWVQSKYANGETSKGDELRFGPKPMRIKEDILACSAAELNYGLAQFVREITRPNGERYEPDSIYYLCLGIQQYLLENNRMVNIFTDLYYLTFVQELNKSLSTWQPTLLPNNTVFSRVEEEHLWECKQLGVYSPFVLLNTLMFFNTKFFGLQTAEEHMQLSFTNVVRQSRKCTTPRGTTKVVSIRYYAPVRQRKGRDTGPGKRKREDEAPILEQRENRMNPLRCPVKFYEFYLSKCPESLRTRNDVFYLQPERSCIAESPLWYSVIPMDRSMLESMLNRILAVREIYEELGRPGEEDLD

SEQ ID NO: 5070 - protein, 839 aa, Homo sapiens
MIMTESREVIDLDPPAETSQEQEDLFIVKVEEEDCTWMQEYNPPTFETFYQRFRHFQYHEASGPREALSQLRVLCCEWLRPELHTKEQILELLVLEQFLTILPEEFQPWVREHHPESGEEAVAVIENIQRELEERRQQIVACPDVLPRKMATPGAVQESCSPHPLTVDTQPEQAPQKPRLLEENALPVLQVPSLPLKDSQELTASLLSTGSQKLVKIEEVADVAVSFILEEWGHLDQSQKSLYRDDRKENYGSITSMGYESRDNMELIVKQISDDSESHWVAPEHTERSVPQDPDFAEVSDLKGMVQRWQVNPTVGKSRQNPSQKRDLDAITDISPKQSTHGERGHRCSDCGKFFLQASNFIQHRRIHTGEKPFKCGECGKSYNQRVHLTQHQRVHTGEKPYKCQVCGKAFRVSSHLVQHHSVHSGERPYGCNECGKNFGRHSHLIEHLKRHFREKSQRCSDKRSKNTKLSVKKKISEYSEADMELSGKTQRNVSQVQDFGEGCEFQGKLDRKQGIPMKEILGQPSSKRMNYSEVPYVHKKSSTGERPHKCNECGKSFIQSAHLIQHQRIHTGEKPFRCEECGKSYNQRVHLTQHQRVHTGEKPYTCPLCGKAFRVRSHLVQHQSVHSGERPFKCNECGKGFGRRSHLAGHLRLHSREKSHQCRECGEIFFQYVSLIEHQVLHMGQKNEKNGICEEAYSWNLTVIEDKKIELQEQPYQCDICGKAFGYSSDLIQHYRTHTAEKPYQCDICRENVGQCSHTKQHQKIYSSTKSHQCHECGRGFTLKSHLNQHQRIHTGEKPFQCKECGMNFSWSCSLFKHLRSHERTDPINTLSVEGSLL

SEQ ID NO: 5071 - protein, 591 aa, Homo sapiens
MFGIQESIQRSGSSMKEEPLGSGMNAVRTWMQGAGVLDANTAAQSGVGLARAHFEKQPPSNLRKSNFFHFVLALYDRQGQPVEIERTAFVGFVEKEKEANSEKTNNGIHYRLQLLYSNGIRTEQDFYVRLIDSMTKQAIVYEGQDKNPEMCRVLLTHEIMCSRCCDKKSCGNRNETPSDPVIIDRFFLKFFLKCNQNCLKNAGNPRDMRRFQVVVSTTVNVDGHVLAVSDNMFVHNNSKHGRRARRLDPSEGTPSYLEHATPCIKAISPSEGWTTGGATVIIIGDNFFDGLQVIFGTMLVWSELITPHAIRVQTPPRHIPGVVEVTLSYKSKQFCKGTPGRFIYTALNEPTIDYGFQRLQKVIPRHPGDPERLPKEVILKRAADLVEALYGMPHNNQEIILKRAADIAEALYSVPRNHNQLPALANTSVHAGMMGVNSFSGQLAVNVSEASQATNQGFTRNSSSVSPHGYVPSTTPQQTNYNSVTTSMNGYGSAAMSNLGGSPTFLNGSAANSPYAIVPSSPTMASSTSLPSNCSSSSGIFSFSPANMVSAVKQKSAFAPVVRPQTSPPPTCTSTNGNSLQAISGMIVPPM

SEQ ID NO: 5072 - protein, 1548 aa, Homo sapiens
MAEREVESGPRKRFEQKSGAVFDEIVENCGGIMDTEMSEDIDHNLTPTLDSMSYGMPNQTGSENSLLDEDDYFLNSGDLAGIPVVGSDNEDEQDFSSKDNLVSSIHTDDSLEVERRVTQHESDNENEIQIQNKLKKDFPKQFDQVSVFKSIRKDFSLVRENSKETFSGKEKNRDLTYEREKRLDKPHKDLDSRLKSSFFDKAANQVEETLHTHLPQTPETNFRDSSYPFANKESIGSELGNSFASNIRIKEEPLDDEYDKAMAPQQGLLDKIKDEPDNAQEYSHGQQQKTQEGELKISAVFSVSGSPLAPQLTTGFQPSLASSGMNKMLPSVPATAVRVSCSGCKKILQKGQTAYQRKGSTQLFCSTLCLTGYTVPPARPPPPLTKKTCSSCSKDILNPKDVISAQFENTTTSKDFCSQSCLSTYELKKKPIVTINTNSISTKCSMCQKNAVIRHEVNYQNVVHKLCSDACFSKFRSANNLTMNCCENCGGYCYSGSGQCHMLQIEGQSKKFCSSSCITAYKQKSAKITPCALCKSLRSSAEMIENTNSLGKTELFCSVNCLSAYRVKMVTSAGVQVQCNSCKTSAIPQYHLAMSDGSIRNFCSYSCVVAFQNLFNKPTGMNSSVVPLSQGQVIVSIPTGSTVSAGGGSTSAVSPTSISSSAAAGLQRLAAQSQHVGFARSVVKLKCQHCNRLFATKPELLDYKGKMFQFCGKNCSDEYKKINNVMAMCEYCKIEKIVKETVRFSGADKSFCSEGCKLLYKHDLAKRWGNHCKMCSYCLQTSPKLVQNNLGGKVEEFCCEECMSKYTVLFYQMAKCDACKRQGKLSESLKWRGEMKHFCNLLCILMFCNQQSVCDPPSQNNAANISMVQAASAGPPSLRKDSTPVIANVVSLASAPAAQPTVNSNSVLQGAVPTVTAKIIGDASTQTDALKLPPSQPPRLLKNKALLCKPITQTKATSCKPHTQNKECQTEDTPSQPQIIVVPVPVPVFVPIPLHLYTQYAPVPFGIPVPMPVPMLIPSSMDSEDKVTESIEDIKEKLPTHPFEADLLEMAEMIAEDEEKKTLSQGESQTSEHELFLDTKIFEKDQGSTYSGDLESEAVSTPHSWEEELNHYALKSNAVQEADSELKQFSKGETEQDLEADFPSDSFDPLNKGQGIQARSRTRRRHRDGFPQPRRRGRKKSIVAVEPRSLIQGAFQGCSVSGMTLKYMYGVNAWKNWVQWKNAKEEQGDLKCGGVEQASSSPRSDPLGSTQDHALSQESSEPGCRVRSIKLKEDILSCTFAELSLGLCQFIQEVRRPNGEKYDPDSILYLCLGIQQYLFENGRIDNIFTEPYSRFMIELTKLLKIWEPTILPNGYMFSRIEEEHLWECKQLGAYSPIVLLNTLLFFNTKYFQLKNVTEHLKLSFAHVMRRTRTLKYSTKMTYLRFFPPLQKQESEPDKLTVGKRKRNEDDEVPVGVEMAENTDNPLRCPVRLYEFYLSKCSESVKQRNDVFYLQPERSCVPNSPMWYSTFPIDPGTLDTMLTRILMVREVHEELAKAKSEDSDVELSD

SEQ ID NO: 5073 - protein, 366 aa, Homo sapiens
MDFLNSSDQNLTSEELLNRMPSKILVSLTLSGLALMTTTINSLVIAAIIVTRKLHHPANYLICSLAVTDFLVAVLVMPFSIVYIVRESWIMGQVVCDIWLSVDITCCTCSILHLSAIALDRYRAITDAVEYARKRTPKHAGIMITIVWIISVFISMPPLFWRHQGTSRDDECIIKHDHIVSTIYSTFGAFYIPLALILILYYKIYRAAKTLYHKRQASRIAKEEVNGQVLLESGEKSTKSVSTSYVLEKSLSDPSTDFDKIHSTVRSLRSEFKHEKSWRRQKISGTRERKAATTLGLILGAFVICWLPFFVKELVVNVCDKCKISEEMSNFLAWLGYLNSLINPLIYTIFNEDFKKAFQKLVRCRC

SEQ ID NO: 5074 - protein, 1045 aa, Homo sapiens
MGEIEQRPTPGSRLGAPENSGISTLERGQKPPPTPSGKLVSIKIQMLDDTQEAFEVPQRAPGKVLLDAVCNHLNLVEGDYFGLEFPDHKKITVWLDLLKPIVKQIRRPKHVVVKFVVKFFPPDHTQLQEELTRYLFALQVKQDLAQGRLTCNDTSAALLISHIVQSEIGDFDEALDREHLAKNKYIPQQDALEDKIVEFHHNHIGQTPAESDFQLLEIARRLEMYGIRLHPAKDREGTKINLAVANTGILVFQGFTKINAFNWAKVRKLSFKRKRFLIKLRPDANSAYQDTLEFLMASRDFCKSFWKICVEHHAFFRLFEEPKPKPKPVLFSRGSSFRFSGRTQKQVLDYVKEGGHKKVQFERKHSKIHSIRSLASQPTELNSEVLEQSQQSTSLTFGEGAESPGGQSCRRGKEPKVSAGEPGSHPSPAPRRSPAGNKQADGAASAPTEEEEEVVKDRTQQSKPQPPQPSTGSLTGSPHLSELSVNSQGGVAPANVTLSPNLSPDTKQASPLISPLLNDQACPRTDDEDEGRRKRFPTDKAYFIAKEVSTTERTYLKDLEVITSWFQSTVSKEDAMPEALKSLIFPNFEPLHKFHTNFLKEIEQRLALWEGRSNAQIRDYQRIGDVMLKNIQGMKHLAAHLWKHSEALEALENGIKSSRRLENFCRDFELQKVCYLPLNTFLLRPLHRLMHYKQVLERLCKHHPPSHADFRDCRAALAEITEMVAQLHGTMIKMENFQKLHELKKDLIGIDNLVVPGREFIRLGSLSKLSGKGLQQRMFFLFNDVLLYTSRGLTASNQFKVHGQLPLYGMTIEESEDEWGVPHCLTLRGQRQSIIVAASSRSEMEKWVEDIQMAIDLAEKSSSPAPEFLASSPPDNKSPDEATAADQESEDDLSASRTSLERQAPHRGNTMVHVCWHRNTSVSMVDFSIAVENQLSGNLLRKFKNSNGWQKLWVVFTNFCLFFYKSHQDNHPLASLPLLGYSLTIPSESENIQKDYVFKLHFKSHVYYFRAESEYTFERWMEVIRSATSSASRPHVLSHKESLVY

SEQ ID NO: 5075 - protein, 1630 aa, Homo sapiens
MLKCIPLWRCNRHVESVDKRHCSLQAVPEEIYRYSRSLEELLLDANQLRELPKPFFRLLNLRKLGLSDNEIQRLPPEVANFMQLVELDVSRNDIPEIPESIKFCKALEIADFSGNPLSRLPDGFTQLRSLAHLALNDVSLQALPGDVGNLANLVTLELRENLLKSLPASLSFLVKLEQLDLGGNDLEVLPDTLGALPNLRELWLDRNQLSALPPELGNLRRLVCLDVSENRLEELPAELGGLVLLTDLLLSQNLLRRLPDGIGQLKQLSILKVDQNRLCEVTEAIGDCENLSELILTENLLMALPRSLGKLTKLTNLNVDRNHLEALPPEIGGCVALSVLSLRDNRLAVLPPELAHTTELHVLDVAGNRLQSLPFALTHLNLKALWLAENQAQPMLRFQTEDDARTGEKVLTCYLLPQQPPPSLEDAGQQGSLSETWSDAPPSRVSVIQFLEAPIGDEDAEEAAAEKRGLQRRATPHPSELKVMKRSIEGRRSEACPCQPDSGSPLPAEEEKRLSAESGLSEDSRPSASTVSEAEPEGPSAEAQGGSQQEATTAGGEEDAEEDYQEPTVHFAEDALLPGDDREIEEGQPEAPWTLPGGRQRLIRKDTPHYKKHFKISKLPQPEAVVALLQGMQPDGEGPVAPGGWHNGPHAPWAPRAQKEEEEEEEGSPQEEEEEEEEENRAEEEEASTEEEDKEGAVVSAPSVKGVSFDQANNLLIEPARIEEEELTLTILRQTGGLGISIAGGKGSTPYKGDDEGIFISRVSEEGPAARAGVRVGDKLLEVNGVALQGAEHHEAVEALRGAGTAVQMRVWRERMVEPENAVTITPLRPEDDYSPRERRGGGLRLPLLPPESPGPLRQRHVACLARSERGLGFSIAGGKGSTPYRAGDAGIFVSRIAEGGAAHRAGTLQVGDRVLSINGVDVTEARHDHAVSLLTAASPTIALLLEREAGGPLPPSPLPHSSPPTAAVATTSITTATPGVPGLPSLAPSLLAAALEGPYPVEEIRLPRAGGPLGLSIVGGSDHSSHPFGVQEPGVFISKVLPRGLAARSGLRVGDRILAVNGQDVRDATHQEAVSALLRPCLELSLLVRRDPAPPGLRELCIQKAPGERLGISIRGGARGHAGNPRDPTDEGIFISKVSPTGAAGRDGRLRVGLRLLEVNQQSLLGLTHGEAVQLLRSVGDTLTVLVCDGFEASTDAALEVSPGVIANPFAAGIGHRNSLESISSIDRELSPEGPGKEKELPGQTLHWGPEATEAAGRGLQPLKLDYRALAAVPSAGSVQRVPSGAAGGKMAESPCSPSGQQPPSPPSPDELPANVKQAYRAFAAVPTSHPPEDAPAQPPTPGPAASPEQLSFRERQKYFELEVRVPQAEGPPKRVSLVGADDLRKMQEEEARKLQQKRAQMLREAAEAGAEARLALDGETLGEEEQEDEQPPWASPSPTSRQSPASPPPLGGGAPVRTAKAERRHQERLRVQSPEPPAPERALSPAELRALEAEKRALWRAARMKSLEQDALRAQMVLSRSQEGRGTRGPLERLAEAPSPAPTPSPTPVEDLGPQTSTSPGRLSPDFAEELRSLEPSPSPGPQEEDGEVALVLLGRPSPGAVGPEDVALCSSRRPVRPGRRGLGPVPS

SEQ ID NO: 5076 - protein, 324 aa, Homo sapiens
MNHMSASLKISNSSKFQVSEFILLGFPGIHSWQHWLSLPLALLYLSALAANTLILIIIWQNPSLQQPMYIFLGILCMVDMGLATTIIPKILAIFWFDAKVISLPECFAQIYAIHFFVGMESGILLCMAFDRYVAICHPLRYPSIVTSSLILKATLFMVLRNGLFVTPVPVLAAQRDYCSKNEIEHCLCSNLGVTSLACDDRRPNSICQLVLAWLGMGSDLSLIILSYILILYSVLRLNSAEAAAKALSTCSSHLTLILFFYTIVVVISVTHLTEMKATLIPVLLNVLHNIIPPSLNPTVYALQTKELRAAFQKVLFALTKEIRS

SEQ ID NO: 5077 - protein, 636 aa, Homo sapiens
MARADLVPKARPWGEHQHQFRGRANLHVFEDWCGSSIQQLRRNLHFPLYPHIRTTLRKLAVSPKWTNYGLRIFGYLHPFTDGKIQFAIAADDNAEFWLSLDDQVSGLQLLASVGKTGKEWTAPGEFGKFRSQISKPVSLSASHRYYFEVLHKQNEEGTDHVEVAWRRNDPGAKFTIIDSLSLSLFTNETFLQMDEVGHIPQTAASHVDSSNALPRDEQPPADMLRPDPRDTLYRVPLIPKSHLRHVLPDCPYKPSYLVDGLPLQRYQGLRFVHLSFVYPNDYTRLSHMETHNKCFYQENAYYQDRFSFQEYIKIDQPEKQGLEQPAGFEENLLEESQYGEVAEETPASNNQNARMLEGRQTPASTLEQDATDYRLRSLRKLLAQPREGLLAPFSKRNSTASFPGRTSHIPVQQPEKRKQKPSPEPSQDSPHSDKWPPGHPVKNLPQMRGPRPRPAGDSPRKTQWLNQVESYIAEQRRGDRMRPQAPGRGWHGEEEVVAAAGQEGQVEGEEEGEEEEEEEDMSEVFEYVPVFDPVVNWDQTFSARNLDFQALRTDWIDLSCNTSGNLLLPEQEALEVTRVFLKKLNQRSRGSVDFPIPDILCKWNHVMCGLYIGLFAEYSLSTSFIRVVESIKHFIP

SEQ ID NO: 5078 - protein, 719 aa, Homo sapiens
MFGKKKKKIEISGPSNFEHRVHTGFDPQEQKFTGLPQQWHSLLADTANRPKPMVDPSCITPIQLAPMKTIVRGNKPCKETSINGLLEDFDNISVTRSNSLRKESPPTPDQGASSHGPGHAEENGFITFSQYSSESDTTADYTTEKYREKSLYGDDLDPYYRGSHAAKQNGHVMKMKHGEAYYSEVKPLKSDFARFSADYHSHLDSLSKPSEYSDLKWEYQRASSSSPLDYSFQFTPSRTAGTSGCSKESLAYSESEWGPSLDDYDRRPKSSYLNQTSPQPTMRQRSRSGSGLQEPMMPFGASAFKTHPQGHSYNSYTYPRLSEPTMCIPKVDYDRAQMVLSPPLSGSDTYPRGPAKLPQSQSKSGYSSSSHQYPSGYHKATLYHHPSLQSSSQYISTASYLSSLSLSSSTYPPPSWGSSSDQQPSRVSHEQFRAALQLVVSPGDPREYLANFIKIGEGSTGIVCIATEKHTGKQVAVKKMDLRKQQRRELLFNEVVIMRDYHHDNVVDMYSSYLVGDELWVVMEFLEGGALTDIVTHTRMNEEQIATVCLSVLRALSYLHNQGVIHRDIKSDSILLTSDGRIKLSDFGFCAQVSKEVPKRKSLVGTPYWMAPEVISRLPYGTEVDIWSLGIMVIEMIDGEPPYFNEPPLQAMRRIRDSLPPRVKDLHKVSSVLRGFLDLMLVREPSQRATAQELLGHPFLKLAGPPSCIVPLMRQYRHH

SEQ ID NO: 5079 - protein, 361 aa, Homo sapiens
MYGKGKSNSSAVPSDSQAREKLALYVYEYLLHVGAQKSAQTFLSEIRWEKNITLGEPPGFLHSWWCVFWDLYCAAPERRETCEHSSEAKAFHDYSAAAAPSPVLGNIPPGDGMPVGPVPPGFFQPFMSPRYPGGPRPPLRIPNQALGGVPGSQPLLPSGMDPTRQQGHPNMGGPMQRMTPPRGMVPLGPQNYGGAMRPPLNALGGPGMPGMNMGPGGGRPWPNPTNANSIPYSSASPGNYVGPPGGGGPPGTPIMPSPADSTNSGDNMYTLMNAVPPGPNRPNFPMGPGSDGPMGGLGGMESHHMNGSLGSGDMDSISKNSPNNMSLSNQPGTPRDDGEMGGNFLNPFQSESYSPSMTMSV

SEQ ID NO: 5080 - protein, 418 aa, Homo sapiens
MRAAPLLLARAASLSLGFLFLLFFWLDRSVLAKELKFVTLVFRHGDRSPIDTFPTDPIKESSWPQGFGQLTQLGMEQHYELGEYIRKRYRKFLNESYKHEQVYIRSTDVDRTLMSAMTNLAALFPPEGVSIWNPILLWQPIPVHTVPLSEDQLLYLPFRNCPRFQELESETLKSEEFQKRLHPYKDFIATLGKLSGLHGQDLFGIWSKVYDPLYCESVHNFTLPSWATEDTMTKLRELSELSLLSLYGIHKQKEKSRLQGGVLVNEILNHMKRATQIPSYKKLIMYSAHDTTVSGLQMALDVYNGLLPPYASCHLTELYFEKGEYFVEMYYRNETQHEPYPLMLPGCSPSCPLERFAELVGPVIPQDWSTECMTTNSHQVLKVIFAVAFCLISAVLMVLLFIHIRRGLCWQRESYGNI

SEQ ID NO: 5081 - protein, 897 aa, Homo sapiens
MNISGSSCGSPNSADTSSDFKDLWTKLKECHDREVQGLQVKVTKLKQERILDAQRLEEFFTKNQQLREQQKVLHETIKVLEDRLRAGLCDRCAVTEEHMRKKQQEFENIRQQNLKLITELMNERNTLQEENKKLSEQLQQKIENDQQHQAAELECEEDVIPDSPITAFSFSGVNRLRRKENPHVRYIEQTHTKLEHSVCANEMRKVSKSSTHPQHNPNENEILVADTYDQSQSPMAKAHGTSSYTPDKSSFNLATVVAETLGLGVQEESETQGPMSPLGDELYHCLEGNHKKQPFEESTRNTEDSLRFSDSTSKTPPQEELPTRVSSPVFGATSSIKSGLDLNTSLSPSLLQPGKKKHLKTLPFSNTCISRLEKTRSKSEDSALFTHHSLGSEVNKIIIQSSNKQILINKNISESLGEQNRTEYGKDSNTDKHLEPLKSLGGRTSKRKKTEEESEHEVSCPQASFDKENAFPFPMDNQFSMNGDCVMDKPLDLSDRFSAIQRQEKSQGSETSKNKFRQVTLYEALKTIPKGFSSSRKASDGNCTLPKDSPGEPCSQECIILQPLNKCSPDNKPSLQIKEENAVFKIPLRPRESLETENVLDDIKSAGSHEPIKIQTRSDHGGCELASVLQLNPCRTGKIKSLQNNQDVSFENIQWSIDPGADLSQYKMDVTVIDTKDGSQSKLGGETVDMDCTLVSETVLLKMKKQEQKGEKSSNEERKMNDSLEDMFDRTTHEEYESCLADSFSQAADEEEELSTATKKLHTHGDKQDKVKQKAFVEPYFKGDERETSLQNFPHIEVVRKKEERRKLLGHTCKECEIYYADMPAEEREKKLASCSRHRFRYIPPNTPENFWEVGFPSTQTCMERGYIKEDLDPCPRPKRRQPYNAIFSPKGKEQKT

SEQ ID NO: 5082 - protein, 466 aa, Homo sapiens
MAGGEAGVTLGQPHLSRQDLTTLDVTKLTPLSHEVISRQATINIGTIGHVAHGKSTVVKAISGVHTVRFKNELERNITIKLGYANAKIYQLDDPSCPRPECYRSCGSSMPDEFPTDIPGTKGNFRLVRHVSFVDCPGHDILMATMLNGAAVMDAALLLIAGNESCPQPQTSEHLAAIEIMKLKHILILQNKIDLVKERQAKEQYEQILAFVQGTVAEGAPIIPISAQLKYNIEVVCEYIVKKIPVPPRDFTSEPRLIVIRSFDVNKPGCEVDDLKGGVAGGSILKGVLKVGQETEVRPGIVSKDSEGKLMCKSIFSKIVSLFAEHNDLQYAAPGGLIGVGTKIDPTLCRADRMVGQILGAVGALPEIFTELEISYFLLRRLLGVRTEGDKKAAKVQKLSKNEVLMVNIGSLSTGGRVSAVKADLGKIVLTNPVCTEIHLIHLDLIKELEWGPVLTNETQRKSAANF

SEQ ID NO: 5083 - protein, 697 aa, Homo sapiens
MCKSLRYCFSHCLYLAMTRLEEVNREVNMHSSVRYLGYLARINLLVAICLGLYVRWEKTANSLILVIFILGLFVLGIASILYYYFSMEAASLSLSNLWFGFLLGLLCFLDNSSFKNDVKEESTKYLLLTSIVLRILCSLVERISGYVRHRPTLLTTVEFLELVGFAIASTTMLVEKSLSVILLVVALAMLIIDLRMKSFLAIPNLVIFAVLLFFSSLETPKNPIAFACFFICLITDPFLDIYFSGLSVTERWKPFLYRGRICRRLSVVFAGMIELTFFILSAFKLRDTHLWYFVIPGFSIFGIFWMICHIIFLLTLWGFHTKLNDCHKVYFTHRTDYNSLDRIMASKGMRHFCLISEQLVFFSLLATAILGAVSWQPTNGIFLSMFLIVLPLESMAHGLFHELGNCLGGTSVGYAIVIPTNFCSPDGQPTLLPPEHVQELNLRSTGMLNAIQRFFAYHMIETYGCDYSTSGLSFDTLHSKLKAFLELRTVDGPRHDTYILYYSGHTHGTGEWALAGGDTLRLDTLIEWWREKNGSFCSRLIIVLDSENSTPWVKEVRKINDQYIAVQGAELIKTVDIEEADPPQLGDFTKDWVEYNCNSSNNICWTEKGRTVKAVYGVSKRWSDYTLHLPTGSDVAKHWMLHFPRITYPLVHLANWLCGLNLFWICKTCFRCLKRLKMSWFLPTVLDTGQGFKLVKS

SEQ ID NO: 5084 - protein, 421 aa, Homo sapiens
MSATLILEPPGRCCWNEPVRIAVRGLAPEQRVTLRASLRDEKGALFRAHARYCADARGELDLERAPALGGSFAGLEPMGLLWALEPEKPFWRFLKRDVQIPFVVELEVLDGHDPEPGRLLCQAQHERHFLPPGVRRQSVRAGRVRATLFLPPGPGPFPGIIDIFGIGGGLLEYRASLLAGHGFATLALAYYNFEDLPNNMDNISLEYFEEAVCYMLQHPQVKGPGIGLLGISLGADICLSMASFLKNVSATVSINGSGISGNTAINYKHSSIPPLGYDLRRIKVAFSGLVDIVDIRNALVGGYKNPSMIPIEKAQGPILLIVGQDDHNWRSELYAQTVSERLQAHGKEKPQIICYPGTGHYIEPPYFPLCPASLHRLLNKHVIWGGEPRAHSKAQEDAWKQILAFFCKHLGGTQKTAVPKL

SEQ ID NO: 5085 - protein, 1906 aa, Homo sapiens
MQSFRERCGFHGKQQNYQQTSQETSRLENYRQPSQAGLSCDRQRLLAKDYYNPQPYPSYEGGAGTPSGTAAAVAADKYHRGSKALPTQQGLQGRPAFPGYGVQDSSPYPGRYAGEESLQAWGAPQPPPPQPQPLPAGVAKYDENLMKKTAVPPSRQYAEQGAQVPFRTHSLHVQQPPPPQQPLAYPKLQRQKLQNDIASPLPFPQGTHFPQHSQSFPTSSTYSSSVQGGGQGAHSYKSCTAPTAQPHDRPLTASSSLAPGQRVQNLHAYQSGRLSYDQQQQQQQQQQQQQQALQSRHHAQETLHYQNLAKYQHYGQQGQGYCQPDAAVRTPEQYYQTFSPSSSHSPARSVGRSPSYSSTPSPLMPNLENFPYSQQPLSTGAFPAGITDHSHFMPLLNPSPTDATSSVDTQAGNCKPLQKDKLPENLLSDLSLQSLTALTSQVENISNTVQQLLLSKAAVPQKKGVKNLVSRTPEQHKSQHCSPEGSGYSAEPAGTPLSEPPSSTPQSTHAEPQEADYLSGSEDPLERSFLYCNQARGSPARVNSNSKAKPESVSTCSVTSPDDMSTKSDDSFQSLHGSLPLDSFSKFVAGERDCPRLLLSALAQEDLASEILGLQEAIGEKADKAWAEAPSLVKDSSKPPFSLENHSACLDSVAKSAWPRPGEPEALPDSLQLDKGGNAKDFSPGLFEDPSVAFATPDPKKTTGPLSFGTKPTLGVPAPDPTTAAFDCFPDTTAASSADSANPFAWPEENLGDACPRWGLHPGELTKGLEQGGKASDGISKGDTHEASACLGFQEEDPPGEKVASLPGDFKQEEVGGVKEEAGGLLQCPEVAKADRWLEDSRHCCSTADFGDLPLLPPTSRKEDLEAEEEYSSLCELLGSPEQRPGMQDPLSPKAPLICTKEEVEEVLDSKAGWGSPCHLSGESVILLGPTVGTESKVQSWFESSLSHMKPGEEGPDGERAPGDSTTSDASLAQKPNKPAVPEAPIAKKEPVPRGKSLRSRRVHRGLPEAEDSPCRAPVLPKDLLLPESCTGPPQGQMEGAGAPGRGASEGLPRMCTRSLTALSEPRTPGPPGLTTTPAPPDKLGGKQRAAFKSGKRVGKPSPKAASSPSNPAALPVASDSSPMGSKTKETDSPSTPGKDQRSMILRSRTKTQEIFHSKRRRPSEGRLPNCRATKKLLDNSHLPATFKVSSSPQKEGRVSQRARVPKPGAGSKLSDRPLHALKRKSAFMAPVPTKKRNLVLRSRSSSSSNASGNGGDGKEERPEGSPTLFKRMSSPKKAKPTKGNGEPATKLPPPETPDACLKLASRAAFQGAMKTKVLPPRKGRGLKLEAIVQKITSPSLKKFACKAPGASPGNPLSPSLSDKDRGLKGAGGSPVGVEEGLVNVGTGQKLPTSGADPLCRNPTNRSLKGKLMNSKKLSSTDCFKTEAFTSPEALQPGGTALAPKKRSRKGRAGAHGLSKGPLEKRPYLGPALLLTPRDRASGTQGASEDNSGGGGKKPKMEELGLASQPPEGRPCQPQTRAQKQPGHTNYSSYSKRKRLTRGRAKNTTSSPCKGRAKRRRQQQVLPLDPAEPEIRLKYISSCKRLRSDSRTPAFSPFVRVEKRDAFTTICTVVNSPGDAPKPHRKPSSSASSSSSSSSFSLDAAGASLATLPGGSILQPRPSLPLSSTMHLGPVVSKALSTSCLVCCLCQNPANFKDLGDLCGPYYPEHCLPKKKPKLKEKVRPEGTCEEASLPLERTLKGPECAAAATAGKPPRPDGPADPAKQGPLRTSARGLSRRLQSCYCCDGREDGGEEAAPADKGRKHECSKEAPAEPGGEAQEHWVHEACAVWTGGVYLVAGKLFGLQEAMKVAVDMMCSSCQEAGATIGCCHKGCLHTYHYPCASDAGCIFIEENFSLKCPKHKRLP

SEQ ID NO: 5086 - protein, 575 aa, Homo sapiens
MAKPFFRLQKFLRRTQFLLFFLTAAYLMTGSLLLLQRVRVALPQGPRAPGPLQTLPVAAVALGVGLLDSRALHDPRVSPELLLGVDMLQSPLTRPRPGPRWLRSRNSELRQLRRRWFHHFMSDSQGPPALGPEAARPAIHSRGTYIGCFSDDGHERTLKGAVFYDLRKMTVSHCQDACAERSYVYAGLEAGAECYCGNRLPAVSVGLEECNHECKGEKGSVCGAVDRLSVYRVDELQPGSRKRRTATYRGCFRLPENITHAFPSSLIQANVTVGTCSGFCSQKEFPLAILRGWECYCAYPTPRFNLRDAMDSSVCGQDPEAQRLAEYCEVYQTPVQDTRCTDRRFLPNKSKVFVALSSFPGAGNTWARHLIEHATGFYTGSYYFDGTLYNKGFKGEKDHWRSRRTICVKTHESGRREIEMFDSAILLIRNPYRSLVAEFNRKCAGHLGYAADRNWKSKEWPDFVNSYASWWSSHVLDWLKYGKRLLVVHYEELRRSLVPTLREMVAFLNVSVSEERLLCVENNKEGSFRRRGRRSHDPEPFTPEMKDLINGYIRTVDQALRDHNWTGLPREYVPR

SEQ ID NO: 5087 - protein, 504 aa, Homo sapiens
MTWLVLLGTLLCMLRVGLGTPDSEGFPPRALHNCPYKCICAADLLSCTGLGLQDVPAELPAATADLDLSHNALQRLRPGWLAPLFQLRALHLDHNELDALGRGVFVNASGLRLLDLSSNTLRALGRHDLDGLGALEKLLLFNNRLVHLDEHAFHGLRALSHLYLGCNELASFSFDHLHGLSATHLLTLDLSSNRLGHISVPELAALPAFLKNGLYLHNNPLPCDCRLYHLLQRWHQRGLSAVRDFAREYVCLAFKVPASRVRFFQHSRVFENCSSAPALGLERPEEHLYALVGRSLRLYCNTSVPAMRIAWVSPQQELLRAPGSRDGSIAVLADGSLAIGNVQEQHAGLFVCLATGPRLHHNQTHEYNVSVHFPRPEPEAFNTGFTTLLGCAVGLVLVLLYLFAPPCRCCRRACRCRRWPQTPSPLQELSAQSSVLSTTPPDAPSRKASVHKHVVFLEPGRRGLNGRVQLAVAEEFDLYNPGGLQLKAGSESASSIGSEGPMTT

SEQ ID NO: 5088 - protein, 791 aa, Homo sapiens
MAGTSAPGSKRRSEPPAPRPGPPPGTGHPPSKRARGFSAAAAPDPDDPFGAHGDFTADDLEELDTLASQALSQCPAAARDVSSDHKVHRLLDGMSKNPSGKNRETVPIKDNFELEVLQAQYKELKEKMKVMEEEVLIKNGEIKILRDSLHQTESVLEEQRRSHFLLEQEKTQALSDKEKEFSKKLQSLQSELQFKDAEMNELRTKLQTSERANKLAAPSVSHVSPRKNPSVVIKPEACSPQFGKTSFPTKESFSANMSLPHPCQTESGYKPLVGREDSKPHSLRGDSIKQEEAQKSFVDSWRQRSNTQGSILINLLLKQPLIPGSSLSLCHLLSSSSESPAGTPLQPPGFGSTLAGMSGLRTTGSYDGSFSLSALREAQNLAFTGLNLVARNECSRDGDPAEGGRRAFPLCQLPGAVHFLPLVQFFIGLHCQALQDLAAAKRSGAPGDSPTHSSCVSSGVETNPEDSVCILEGFSVTALSILQHLVCHSGAVVSLLLSGVGADSAAGEGNRSLVHRLSDGDMTSALRGVADDQGQHPLLKMLLHLLAFSSAATGHLQASVLTQCLKVLVKLAENTSCDFLPRFQCVFQVLPKCLSPETPLPSVLLAVELLSLLADHDQLAPQLCSHSEGCLLLLLYMYITSRPDRVALETQWLQLEQEVVWLLAKLGVQSPLPPVTGSNCQCNVEVVRALTVMLHRQWLTVRRAGGPPRTDQQRRTVRCLRDTVLLLHGLSQKDKLFMMHCVEVLHQFDQVMPGVSMLIRGLPDVTDCEEAALDDLCAAETDVEDPEVECG

SEQ ID NO: 5089 - protein, 941 aa, Homo sapiens
MKSLKKDSRLRITPTRLLEASENVKEKKRAKGPEQPTPTIQEEPEPVSNVLQGDDILALAIKKEDLKEQHIPRLTEKEDKRVITQKFIIRKLKPMDPRRKVCHLVARPANPDEATKPLDYSGPGDSFDGSDQILPHHILGSLQDFKRIALARGNTQLAERIPTSPCLMTLISAEGESKQKAPKEEKRPPWAPPPQHNFLKNWQRNTALRKKQQEALSEHLKKPVSELLMHTGETYRRIQEERELIDCTLPTRRDRKSWENSGFWSRLEYLGDEMTGLVMTKTKTQRGLMEPITHIRKPHSIRVETGLPAQRDASYRYTWDRSLFLIYRRKELQRIMEELDFSQQDIDGLEVVGKGWPFSAVTVEDYTVFERSQGSSSEDTAYLGTLASSSDVSMPILGPSLLFCGKPACWIRGSNPQDKRQVGIAAHLTFETLEGEKTSSELTVVNNGTVAIWYDWRRQHQPDTFQDLKKNRMQRFYFDNREGVILPGEIKTFTFFFKSLTAGVFREFWEFRTHPTLLGGAILQVNLHAVSLTQDVFEDERKVLESKLTAHEAVTVVREVLQELLMGVLTPERTPSPVDAYLTEEDLFRHRNPPLHYEHQVVQSLHQLWRQYMTLPAKAEEARPGDKEHVSPIATEKASVNAELLPRFRSPISETQVPRPENEALRESGSQKARVGTKSPQRKSIMEEILVEESPDVDSTKSPWEPDGLPLLEWNLCLEDFRKAVMVLPDENHREDALMRLNKAALELCQKPRPLQSNLLHQMCLQLWRDVIDSLVGHSMWLRSVLGLPEKETIYLNVPEEQDQKSPPIMEVKVPVGKAGKEERKGAAQEKKQLGIKDKEDKKGAKLLGKEDRPNSKKHKAKDDKKVIKSASQDRFSLEDPTPDIILSSQEPIDPLVMGKYTQSLHSEVRGLLDTLVTDLMVLADELSPIKNVEEALRLCR

SEQ ID NO: 5090 - protein, 904 aa, Homo sapiens
MQASPLQTSQPTPPEELHAAAYVFTNDGQQMRSDEVNLVATGHQSKKKHSRKSKRHSSSKRRKSMSSWLDKQEDAAVTHSICEERINNGQPVADNVLSTAPPWPDATIAHNIREERMENGQSRTDKVLSTAPPQLVHMAAAGIPSMSTRDLHSTVTHNIREERMENGQPQPDNVLSTGPTGLINMAATPIPAMSARDLYATVTHNVCEQKMENVQPAPDNVLLTLRPRRINMTDTGISPMSTRDPYATITYNVPEEKMEKGQPQPDNILSTASTGLINVAGAGTPAISTNGLYSTVPHNVCEEKMENDQPQPNNVLSTVQPVIIYLTATGIPGMNTRDQYATITHNVCEERVVNNQPLPSNALSTVLPGLAYLATADMPAMSTRDQHATIIHNLREEKKDNSQPTPDNVLSAVTPELINLAGAGIPPMSTRDQYATVNHHVHEARMENGQRKQDNVLSNVLSGLINMAGASIPAMSSRDLYATITHSVREEKMESGKPQTDKVISNDAPQLGHMAAGGIPSMSTKDLYATVTQNVHEERMENNQPQPSYDLSTVLPGLTYLTVAGIPAMSTRDQYATVTHNVHEEKIKNGQAASDNVFSTVPPAFINMAATGVSSMSTRDQYAAVTHNIREEKINNSQPAPGNILSTAPPWLRHMAAAGISSTITRDLYVTATHSVHEEKMTNGQQAPDNSLSTVPPGCINLSGAGISCRSTRDLYATVIHDIQEEEMENDQTPPDGFLSNSDSPELINMTGHCMPPNALDSFSHDFTSLSKDELLYKPDSNEFAVGTKNYSVSAGDPPVTVMSLVETVPNTPQISPAMAKKINDDIKYQLMKEVRRFGQNYERIFILLEEVQGSMKVKRQFVEFTIKEAARFKKVVLIQQLEKALKEIDSHCHLRKVKHMRKR

SEQ ID NO: 5091 - protein, 1894 aa, Homo sapiens
MKAMPWNWTCLLSHLLMVGMGSSTLLTRQPAPLSQKQRSFVTFRGEPAEGFNHLVVDERTGHIYLGAVNRIYKLSSDLKVLVTHETGPDEDNPKCYPPRIVQTCNEPLTTTNNVNKMLLIDYKENRLIACGSLYQGICKLLRLEDLFKLGEPYHKKEHYLSGVNESGSVFGVIVSYSNLDDKLFIATAVDGKPEYFPTISSRKLTKNSEADGMFAYVFHDEFVASMIKIPSDTFTIIPDFDIYYVYGFSSGNFVYFLTLQPEMVSPPGSTTKEQVYTSKLVRLCKEDTAFNSYVEVPIGCERSGVEYRLLQAAYLSKAGAVLGRTLGVHPDDDLLFTVFSKGQKRKMKSLDESALCIFILKQINDRIKERLQSCYRGEGTLDLAWLKVKDIPCSSALLTIDDNFCGLDMNAPLGVSDMVRGIPVFTEDRDRMTSVIAYVYKNHSLAFVGTKSGKLKKIRVDGPRGNALQYETVQVVDPGPVLRDMAFSKDHEQLYIMSERQLTRVPVESCGQYQSCGECLGSGDPHCGWCVLHNTCTRKERCERSKEPRRFASEMKQCVRLTVHPNNISVSQYNVLLVLETYNVPELSAGVNCTFEDLSEMDGLVVGNQIQCYSPAAKEVPRIITENGDHHVVQLQLKSKETGMTFASTSFVFYNCSVHNSCLSCVESPYRCHWCKYRHVCTHDPKTCSFQEGRVKLPEDCPQLLRVDKILVPVEVIKPITLKAKNLPQPQSGQRGYECILNIQGSEQRVPALRFNSSSVQCQNTSYSYEGMEINNLPVELTVVWNGHFNIDNPAQNKVHLYKCGAMRESCGLCLKADPDFACGWCQGPGQCTLRQHCPAQESQWLELSGAKSKCTNPRITEIIPVTGPREGGTKVTIRGENLGLEFRDIASHVKVAGVECSPLVDGYIPAEQIVCEMGEAKPSQHAGFVEICVAVCRPEFMARSSQLYYFMTLTLSDLKPSRGPMSGGTQVTITGTNLNAGSNVVVMFGKQPCLFHRRSPSYIVCNTTSSDEVLEMKVSVQVDRAKIHQDLVFQYVEDPTIVRIEPEWSIVSGNTPIAVWGTHLDLIQNPQIRAKHGGKEHINICEVLNATEMTCQAPALALGPDHQSDLTERPEEFGFILDNVQSLLILNKTNFTYYPNPVFEAFGPSGILELKPGTPIILKGKNLIPPVAGGNVKLNYTVLVGEKPCTVTVSDVQLLCESPNLIGRHKVMARVGGMEYSPGMVYIAPDSPLSLPAIVSIAVAGGLLIIFIVAVLIAYKRKSRESDLTLKRLQMQMDNLESRVALECKEAFAELQTDIHELTSDLDGAGIPFLDYRTYTMRVLFPGIEDHPVLRDLEVPGYRQERVEKGLKLFAQLINNKVFLLSFIRTLESQRSFSMRDRGNVASLIMTVLQSKLEYATDVLKQLLADLIDKNLESKNHPKLLLRRTESVAEKMLTNWFTFLLYKFLKECAGEPLFSLFCAIKQQMEKGPIDAITGEARYSLSEDKLIRQQIDYKTLVLSCVSPDNANSPEVPVKILNCDTITQVKEKILDAIFKNVPCSHRPKAADMDLEWRQGSGARMILQDEDITTKIENDWKRLNTLAHYQVPDGSVVALVSKQVTAYNAVNNSTVSRTSASKYENMIRYTGSPDSLRSRTPMITPDLESGVKMWHLVKNHEHGDQKEGDRGSKMVSEIYLTRLLATKGTLQKFVDDLFETIFSTAHRGSALPLAIKYMFDFLDEQADKHGIHDPHVRHTWKSNCLPLRFWVNMIKNPQFVFDIHKNSITDACLSVVAQTFMDSCSTSEHRLGKDSPSNKLLYAKDIPSYKNWVERYYSDIGKMPAISDQDMNAYLAEQSRMHMNEFNTMSALSEIFSYVGKYSEEILGPLDHDDQCGKQKLAYKLEQVITLMSLDS

SEQ ID NO: 5092 - protein, 321 aa, Homo sapiens
MLTLNKTDLIPASFILNGVPGLEDTQLWISFPFCSMYVVAMVGNCGLLYLIHYEDALHKPMYYFLAMLSFTDLVMCSSTIPKALCIFWFHLKDIGFDECLVQMFFTHTFTGMESGVLMLMALDRYVAICYPLRYSTILTNPVIAKVGTATFLRGVLLIIPFTFLTKLLPYCRGNILPHTYCDHMSVAKLSCGNVKVNAIYGLMVALLIWGFDILCITNSYTMILRAVVSLSSADARQKAFNTCTAHICAIVFSYTPAFFSFFSHRFGEHIIPPSCHIIVANIYLLLPPTMNPIVYGVKTKQIRDCVIRILSGSKDTKSYSM

SEQ ID NO: 5093 - protein, 911 aa, Homo sapiens
MEVNCLTLKDLISPRQPRLDFAVEDGENAQKENIFVDRSRMAPKTPIKNEPIDLSKQKKFTPERNPITPVKFVDRQQAEPWTPTANLKMLISAASPDIRDREKKKGLFRPIENKDDAFTDSLQLDVVGDSAVDEFEKQRPSRKQKSLGLLCQKFLARYPSYPLSTEKTTISLDEVAVSLGVERRRIYDIVNVLESLHLVSRVAKNQYGWHGRHSLPKTLRNLQRLGEEQKYEEQMAYLQQKELDLIDYKFGERKKDGDPDSQEQQLLDFSEPDCPSSSANSRKDKSLRIMSQKFVMLFLVSKTKIVTLDVAAKILIEESQDAPDHSKFKTKVRRLYDIANVLTSLALIKKVHVTEERGRKPAFKWIGPVDFSSSDEELVDVSASVLPELKRETYGQIQVCAKQKLARHGSFNTVQASERIQRKVNSEPSSPYREEQGSGGYSLEIGSLAAVYRQKIEDNSQGKAFASKRVVPPSSSLDPVAPFPVLSVDPEYCVNPLAHPVFSVAQTDLQAFSMQNGLNGQVDVSLASAASAVESLKPALLAGQPLVYVPSASLFMLYGSLQEGPASGSGSERDDRSSEAPATVELSSAPSAQKRLCEERKPQEEDEPATKRQSREYEDGPLSLVMPKKPSDSTDLASPKTMGNRASIPLKDIHVNGQLPAAEEISGKATANSLVSSEWGNPSRNTDVEKPSKENESTKEPSLLQYLCVQSPAGLNGFNVLLSGSQTPPTVGPSSGQLPSFSVPCMVLPSPPLGPFPVLYSPAMPGPVSSTLGALPNTGPVNFSLPGLGSIAQLLVGPTAVVNPKSSTLPSADPQLQSQPSLNLSPVMSRSHSVVQQPESPVYVGHPVSVVKLHQSPVPVTPKSIQRTHRETFFKTPGSLGDPVLKRRERNQSRNTSSAQRRLEIPSGGAD

SEQ ID NO: 5094 - protein, 558 aa, Homo sapiens
MSNDGRSRNRDRRYDEVPSDLPYQDTTIRTHPTLHDSERAVSADPLPPPPLPLQPPFGPDFYSSDTEEPAIAPDLKPVRRFVPDSWKNFFRGKKKDPEWDKPVSDIRYISDGVECSPPASPARPNHRSPLNSCKDPYGGSEGTFSSRKEADAVFPRDPYGSLDRHTQTVRTYSEKVEEYNLRYSYMKSWAGLLRILGVVELLLGAGVFACVTAYIHKDSEWYNLFGYSQPYGMGGVGGLGSMYGGYYYTGPKTPFVLVVAGLAWITTIIILVLGMSMYYRTILLDSNWWPLTEFGINVALFILYMAAAIVYVNDTNRGGLCYYPLFNTPVNAVFCRVEGGQIAAMIFLFVTMIVYLISALVCLKLWRHEAARRHREYMEQQEINEPSLSSKRKMCEMATSGDRQRDSEVNFKELRTAKMKPELLSGHIPPGHIPKPIVMPDYVAKYPVIQTDDERERYKAVFQDQFSEYKELSAEVQAVLRKFDELDAVMSRLPHHSESRQEHERISRIHEEFKKKKNDPTFLEKKERCDYLKNKLSHIKQRIQEYDKVMNWDVQGYS

SEQ ID NO: 5095 - protein, 166 aa, Homo sapiens
MAASGVEKSSKKKTEKKLAAREEAKLLAGFMGVMNNMRKQKTLCDVILMVQERKIPAHRVVLAAASHFFNLMFTTNMLESKSFEVELKDAEPDIIEQLVEFAYTARISVNSNNVQSLLDAANQYQIEPVKKMCVDFLKEQVDASNCLGEAEKVDQSLPECGMLFTV

SEQ ID NO: 5096 - protein, 668 aa, Homo sapiens
MWLFFGITGLLTAALSGHPSPAPPDQLNTSSAESELWEPGERLPVRLTNGSSSCSGTVEVRLEASWEPACGALWDSRAAEAVCRALGCGGAEAASQLAPPTPELPPPPAAGNTSVAANATLAGAPALLCSGAEWRLCEVVEHACRSDGRRARVTCAENRALRLVDGGGACAGRVEMLEHGEWGSVCDDTWDLEDAHVVCRQLGCGWAVQALPGLHFTPGRGPIHRDQVNCSGAEAYLWDCPGLPGQHYCGHKEDAGAVCSEHQSWRLTGGADRCEGQVEVHFRGVWNTVCDSEWYPSEAKVLCQSLGCGTAVERPKGLPHSLSGRMYYSCNGEELTLSNCSWRFNNSNLCSQSLAARVLCSASRSLHNLSTPEVPASVQTVTIESSVTVKIENKESRELMLLIPSIVLGILLLGSLIFIAFILLRIKGKYALPVMVNHQHLPTTIPAGSNSYQPVPITIPKEVFMLPIQVQAPPPEDSDSGSDSDYEHYDFSAQPPVALTTFYNSQRHRVTDEEVQQSRFQMPPLEEGLEELHASHIPTANPGHCITDPPSLGPQYHPRSNSESSTSSGEDYCNSPKSKLPPWNPQVFSSERSSFLEQPPNLELAGTQPAFSAGPPADDSSSTSSGEWYQNFQPPPQPPSEEQFGCPGSPSPQPDSTDNDDYDDISAA

SEQ ID NO: 5097 - protein, 545 aa, Homo sapiens
MWLDRRGWLRVLGHWRYDLRRPSFTRTWSGDKGPMAETVSTQVGTEGGLRASHQQNGDAGGDAKVELSPGPPKPAGREVEPAPVGGEHPSAAAPGPGKHKKRRGATRERVVPPPKKRRTGVSFGDEHFAETSYYFEGGLRKVRPYYFDFRTYCKGRWVGHSLLHVFSTEFRAQPLAYYEAAVRAGRLQLNEKPVQDLNIVLKDNDFLRNTVHRHEPPVTAEPIRLLAENEDVVVVDKPSSIPVHPCGRFRHNTVIFILGKEHQLKELHPLHRLDRLTSGVLMFAKTAAVSERIHEQVRDRQLEKEYVCRVEGEFPTEEVTCKEPILVVSYKVGVCRVDPRGKPCETVFQRLSYNGQSSVVRCRPLTGRTHQIRVHLQFLGHPILNDPIYNSVAWGPSRGRGGYIPKTNEELLRDLVAEHQAKQSLDVLDLCEGDLSPGLTDSTAPSSELGKDDLEELAAAAQKMEEVAEAAPQELDTIALASEKAVETDVMNQETDPLCAECRLVRQDPLPQDLVMFLHALRYKGPGFEYFSPMPAWAQDDWQKD

SEQ ID NO: 5098 - protein, 1193 aa, Homo sapiens
MWRVKKLSLSLSPSPQTGKPSMRTPLRELTLQPGALTNSGKRSPACSSLTPSLCKLGLQEGSNNSSPVDFVNNKRTDLSSEHFSHSSKWLETCQHESDEQPLDPIPQISSTPKTSEEAVDPLGNYMVKTIVLVPSPLGQQQDMIFEARLDTMAETNSISLNGPLRTDDLVREEVAPCMGDRFSEVAAVSEKPIFQESPSHLLEESPPNPCSEQLHCSKESLSSRTEAVREDLVPSESNAFLPSSVLWLSPSTALAADFRVNHVDPEEEIVEHGAMEEREMRFPTHPKESETEDQALVSSVEDILSTCLTPNLVEMESQEAPGPAVEDVGRILGSDTESWMSPLAWLEKGVNTSVMLENLRQSLSLPSMLRDAAIGTTPFSTCSVGTWFTPSAPQEKSTNTSQTGLVGTKHSTSETEQLLCGRPPDLTALSRHDLEDNLLSSLVILEVLSRQLRDWKSQLAVPHPETQDSSTQTDTSHSGITNKLQHLKESHEMGQALQQARNVMQSWVLISKELISLLHLSLLHLEEDKTTVSQESRRAETLVCCCFDLLKKLRAKLQSLKAEREEARHREEMALRGKDAAEIVLEAFCAHASQRISQLEQDLASMREFRGLLKDAQTQLVGLHAKQEELVQQTVSLTSTLQQDWRSMQLDYTTWTALLSRSRQLTEKLTVKSQQALQERDVAIEEKQEVSRVLEQVSAQLEECKGQTEQLELENSRLATDLRAQLQILANMDSQLKELQSQHTHCAQDLAMKDELLCQLTQSNEEQAAQWQKEEMALKHMQAELQQQQAVLAKEVRDLKETLEFADQENQVAHLELGQVECQLKTTLEVLRERSLQCENLKDTVENLTAKLASTIADNQEQDLEKTRQYSQKLGLLTEQLQSLTLFLQTKLKEKTEQETLLLSTACPPTQEHPLPNDRTFLGSILTAVADEEPESTPVPLLGSDKSAFTRVASMVSLQPAETPGMEESLAEMSIMTTELQSLCSLLQESKEEAIRTLQRKICELQARLQAQEEQHQEVQKAKEADIEKLNQALCLRYKNEKELQEVIQQQNEKILEQIDKSGELISLREEVTHLTRSLRRAETETKVLQEALAGQLDSNCQPMATNWIQEKVWLSQEVDKLRVMFLEMKNEKEKLMIKFQSHRNILEENLRRSDKELEKLDDIVQHIYKTLLSIPEVVRGCKELQGLLEFLS

SEQ ID NO: 5099 - protein, 519 aa, Homo sapiens
MARAGPAWLLLAIWVVLPSWLSSAKVSSLIERISDPKDLKKLLRTRNNVLVLYSKSEVAAENHLRLLSTVAQAVKGQGTICWVDCGDAESRKLCKKMKVDLSPKDKKVELFHYQDGAFHTEYNRAVTFKSIVAFLKDPKGPPLWEEDPGAKDVVHLDSEKDFRRLLKKEEKPLLIMFYAPWCSMCKRMMPHFQKAATQLRGHAVLAGMNVYSSEFENIKEEYSVRGFPTICYFEKGRFLFQYDNYGSTAEDIVEWLKNPQPPQPQVPETPWADEGGSVYHLTDEDFDQFVKEHSSVLVMFHAPWCGHCKKMKPEFEKAAEALHGEADSSGVLAAVDATVNKALAERFHISEFPTLKYFKNGEKYAVPVLRTKKKFLEWMQNPEAPPPPEPTWEEQQTSVLHLVGDNFRETLKKKKHTLVMFYAPWCPHCKKVIPHFTATADAFKDDRKIACAAVDCVKDKNQDLCQQEAVKGYPTFHYYHYGKFAEKYDSDRTELGFTNYIRALREGDHERLGKKKEEL

SEQ ID NO: 5100 - protein, 1130 aa, Homo sapiens
MLEICLKLVGCKSKKGLSSSSSCYLEEALQRPVASDFEPQGLSEAARWNSKENLLAGPSENDPNLFVALYDFVASGDNTLSITKGEKLRVLGYNHNGEWCEAQTKNGQGWVPSNYITPVNSLEKHSWYHGPVSRNAAEYLLSSGINGSFLVRESESSPGQRSISLRYEGRVYHYRINTASDGKLYVSSESRFNTLAELVHHHSTVADGLITTLHYPAPKRNKPTVYGVSPNYDKWEMERTDITMKHKLGGGQYGEVYEGVWKKYSLTVAVKTLKEDTMEVEEFLKEAAVMKEIKHPNLVQLLGVCTREPPFYIITEFMTYGNLLDYLRECNRQEVNAVVLLYMATQISSAMEYLEKKNFIHRDLAARNCLVGENHLVKVADFGLSRLMTGDTYTAHAGAKFPIKWTAPESLAYNKFSIKSDVWAFGVLLWEIATYGMSPYPGIDLSQVYELLEKDYRMERPEGCPEKVYELMRACWQWNPSDRPSFAEIHQAFETMFQESSISDEVEKELGKQGVRGAVSTLLQAPELPTKTRTSRRAAEHRDTTDVPEMPHSKGQGESDPLDHEPAVSPLLPRKERGPPEGGLNEDERLLPKDKKTNLFSALIKKKKKTAPTPPKRSSSFREMDGQPERRGAGEEEGRDISNGALAFTPLDTADPAKSPKPSNGAGVPNGALRESGGSGFRSPHLWKKSSTLTSSRLATGEEEGGGSSSKRFLRSCSASCVPHGAKDTEWRSVTLPRDLQSTGRQFDSSTFGGHKSEKPALPRKRAGENRSDQVTRGTVTPPPRLVKKNEEAADEVFKDIMESSPGSSPPNLTPKPLRRQVTVAPASGLPHKEEAGKGSALGTPAAAEPVTPTSKAGSGAPGGTSKGPAEESRVRRHKHSSESPGRDKGKLSRLKPAPPPPPAASAGKAGGKPSQSPSQEAAGEAVLGAKTKATSLVDAVNSDAAKPSQPGEGLKKPVLPATPKPQSAKPSGTPISPAPVPSTLPSASSALAGDQPSSTAFIPLISTRVSLRKTRQPPERIASGAITKGVVLDSTEALCLAISRNSEQMASHSAVLEAGKNLYTFCVSYVDSIQQMRNKFAFREAINKLENNLRELQICPATAGSGPAATQDFSKLLSSVKEISDIVQR

SEQ ID NO: 5101 - protein, 467 aa, Homo sapiens
MLLLLLLPLLWGRERVEGQKSNRKDYSLTMQSSVTVQEGMCVHVRCSFSYPVDSQTDSDPVHGYWFRAGNDISWKAPVATNNPAWAVQEETRDRFHLLGDPQTKNCTLSIRDARMSDAGRYFFRMEKGNIKWNYKYDQLSVNVTALTHRPNILIPGTLESGCFQNLTCSVPWACEQGTPPMISWMGTSVSPLHPSTTRSSVLTLIPQPQHHGTSLTCQVTLPGAGVTTNRTIQLNVSYPPQNLTVTVFQGEGTASTALGNSSSLSVLEGQSLRLVCAVDSNPPARLSWTWRSLTLYPSQPSNPLVLELQVHLGDEGEFTCRAQNSLGSQHVSLNLSLQQEYTGKMRPVSGVLLGAVGGAGATALVFLSFCVIFIVVRSCRKKSARPAADVGDIGMKDANTIRGSASQGNLTESWADDNPRHHGLAAHSSGEEREIQYAPLSFHKGEPQDLSGQEATNNEYSEIKIPK

SEQ ID NO: 5102 - protein, 634 aa, Homo sapiens
MATSNNPRKFSEKIALHNQKQAEETAAFEEVMKDLSLTRAARLQLQKSQYLQLGPSRGQYYGGSLPNVNQIGSGTMDLPFQTPFQSSGLDTSRTTRHHGLVDRVYRERGRLGSPHRRPLSVDKHGRQADSCPYGTMYLSPPADTSWRRTNSDSALHQSTMTPTQPESFSSGSQDVHQKRVLLLTVPGMEETTSEADKNLSKQAWDTKKTGSRPKSCEVPGINIFPSADQENTTALIPATHNTGGSLPDLTNIHFPSPLPTPLDPEEPTFPALSSSSSTGNLAANLTHLGIGGAGQGMSTPGSSPQHRPAGVSPLSLSTEARRQQASPTLSPLSPITQAVAMDALSLEQQLPYAFFTQAGSQQPPPQPQPPPPPPPASQQPPPPPPPQAPVRLPPGGPLLPSASLTRGPQPPPLAVTVPSSLPQSPPENPGQPSMGIDIASAPALQQYRTSAGSPANQSPTSPVSNQGFSPGSSPQHTSTLGSVFGDAYYEQQMAARQANALSHQLEQFNMMENAISSSSLYSPGSTLNYSQAAMMGLTGSHGSLPDSQQLGYASHSGIPNIILTVTGESPPSLSKELTSSLAGVGDVSFDSDSQFPLDELKIDPLTLDGLHMLNDPDMVLADPATEDTFRMDRL

SEQ ID NO: 5103 - protein, 1963 aa, Homo sapiens
MKQRKGQGSGGSRGRKKRGLSDISPSTSLPPLVEGQLRCFLKLTVNRVIWKIAKPPTCVLVRVRWWGETSDGTLFCPRDALQTEPKAVRTTTRYAIRCGPKQFTSYLTDMAVLVLEVITKLDGLPIGRVQINGLAQLSPTHQINGFFTIVSSTSKKLGELQVSLALEPLSETYDSYHPLPTTDMTENVLLSKQGFRENTEPSSTQFQVPSRPRDIHTIKIDGKELAANSSRSTTPRGKDHVCFAENPDTIKDSSFGLQHSLNSGQSLESVTLKGRAPRKQMSLLNSSEFQPQIRTVAKSHSDSCILSSNNLPTKDLLSALLEQGNKLRNAMVISAMKSSPETSMLLDQVHPPINEDSLRASTQIRAFSRNRFKDHIEDHLLPSTENTFWRHDTKADTRAIQLLLGSAELSQGNFWDGLGSPPDSPSPGSDVYCISELNDPQYDQSLLENLFYTAPKSDTSISDFLSEEDDIVPSKKISQSTALARSSKVLESSDHKLKKRSAGKRNRNLVEQQMLSETPEDAQTMTLSVDRLALLGRTHSVRIIIETMGVPPDSPQMTPGKKSYAGPPPKVTTAKKRTFFVEYHFPVGFSESGLGKTALITEVVRLASSKITDGKVKFQQRFVFPVQFGGPMIEHWWNSNLTFQIYVKKTPQKKPEVIGSVSLSLRAVIQSELLSFSDQLPVQQENGQSPFGPLKVTMELITDNKDFTGINTKLSGNTHYTPLCAPTSPNKALPELNQDMTCTKNPQNLNQIHEETAKKAQNLVLPNRKSPSPVAPHPSTFVATPASHNLVNQTNGTTKESALLLHVLLMVPDGKDFISGESEKQSPCNVYLNCKLFSTEEVTRSVIAWGTTQPVFNFSQVIPVSLSSKYLERLKNNVMVIETWNKVRSPGQDKLLGLVKLPLHQFYMSFKDAKISRLLLDAQYPVVAVDSYMPVIDVFSGHQNGSLRVFLAMGSSNQIMALQRLKNEEGTLPPFSPRPAHFLDQPTAASVAMAEDRGNGLMEHCFEIHIEMVKGLAPLQATVWGEADCYVQYYFPVQHSQSSVLKGPEFLENGITLKPFRTATTLCVPDPIFNSEHHHSLLLPAEVPVQRLLLSAFSAQGLVPGGGVQFEIWCRYYYPNVRDQKVAKGTLPLSRICAMVTTQHREDVGIQTFNLPLTPRIENRKELRNQSSGLLDVGLRYRRSPRTAEGVLAARTVSISVQIIRACGLQAAAKALAEREPALQFSATVGVNASVTTHLSFLPQGEQRRTHPVACSFCPEFSHHVEFTCNLVTQHCSGEACFLAELLEFAEVIFAVYHENTKSASDIISIESCKEYLLGVVKVPTKELLIKRSGITGWYPIILPEDGGLPHGLELMQKIVGGLELSISFTHRGDRERVLEAAEHLGWSFENSLKDFVRMDEGEPATVTISTPRLWLPIHCVLLAGHNHIHKNTYCYLRYKFYDHEAFWTPLKKPKESVNKKQIMVTFKASKRAEVTRGPSLLWYFREERLEIQVWRAYGNDSVERPHQTDSWIGSAYVDLARLGERSARTLTVSGVYPLFGRNASNLSGAALRVHVVLSSLSSHLEPTHELDSMDCSSHSESEQLPRRNDEVQLSPPEVISCHQKSPASTQVPCSSTTAEVRLTQEGPADLDGTFAVSILVERAMHLSLKGSPLTERKVSIPSCCVSFATADESSPVYTQVVENTDSPIWNFQQQSRLSKELLLDPQQTLVFKVWHKGDEERVIGFASVDLSPLLSGFQFVCGWYNITDFSGECQGQIKVAVSPLESLIHFKEERQARRGVETSKSLIPIYSPFSFPASDTYAAFSSHMARQTLDQLAHASSKELDFSSPGRSDTTRSQASRHEEHVQNIRRFHESLHLQGEAPLPCDDKLTTSPLSSQTSILTSLRKNLSELDQIQRYFRQKLTKPFLPLSPQTQTAISQHQESCRDHLGPGASSLDPGSQCILEKSSNLVLQVSSLITGSY

SEQ ID NO: 5104 - protein, 425 aa, Homo sapiens
MNKMPAGEQECEYNKEGKYYSKGVKLVRKKKKIPGYRWGDIKINIIGEKDDLPIHFCDKCDLPIKIYGRIIPCKHAFCYHCANLYDKVGYKVCPRCRYPVLRIEAHKRGSVFMCSIVQQCKRTYLSQKSLQAHIKRRHKRARKQVTSASLEKVRPHIAPPQTEISDIPKRLQDRDHLSYIPPEQHTMVSLPSVQHMLQEQHNQPHKDIQAPPPELSLSLPFPIQWETVSIFTRKHGNLTVDHIQNNSDSGAKKPTPPDYYPECQSQPAVSSPHHIIPQKQHYAPPPSPSSPVNHQMPYPPQDVVTPNSVRSQVPALTTTYDPSSGYIIVKVPPDMNSPPLRAPQSQNGNPSASEFASHHYNLNILPQFTENQETLSPQFTQTDAMDHRRWPAWKRLSPCPPTRSPPPSTLHGRSHHSHQRRHRRY

SEQ ID NO: 5105 - protein, 311 aa, Homo sapiens
MRRNCTLVTEFILLGLTSRRELQILLFTLFLAIYMVTVAGNLGMIVLIQANAWLHMPMYFFLSHLSFVDLCFSSNVTPKMLEIFLSEKKSISYPACLVQCYLFIALVHVEIYILAVMAFDRYMAICNPLLYGSRMSKSVCSFLITVPYVYGALTGLMETMWTYNLAFCGPNEINHFYCADPPLIKLACSDTYNKELSMFIVAGWNLSFSLFIICISYLYIFPAILKIRSTEGRQKAFSTCGSHLTAVTIFYATLFFMYLRPPSKESVEQGKMVAVFYTTVIPMLNLIIYSLRNKNVKEALIKELSMKIYFS

SEQ ID NO: 5106 - protein, 745 aa, Homo sapiens
MKETDREAVATAVQRVAGMLQRPDQLDKVEQYRRREARKKASVEARLKAAIQSQLDGVRTGLSQLHNALNDVKDIQQSLADVSKDWRQSINTIESLKDVKDAVVQHSQLAAAVENLKNIFSVPEIVRETQDLIEQGALLQAHRKLMDLECSRDGLMYEQYRMDSGNTRDMTLIHGYFGSTQGLSDELAKQLWMVLQRSLVTVRRDPTLLVSVVRIIEREEKIDRRILDRKKQTGFVPPGRPKNWKEKMFTILERTVTTRIEGTQADTRESDKMWLVRHLEIIRKYVLDDLIVAKNLMVQCFPPHYEIFKNLLNMYHQALSTRMQDLASEDLEANEIVSLLTWVLNTYTSTEMMRNVELAPEVDVGTLEPLLSPHVVSELLDTYMSTLTSNIIAWLRKALETDKKDWVKETEPEADQDGYYQTTLPAIVFQMFEQNLQVAAQISEDLKTKVLVLCLQQMNSFLSRYKDEAQLYKEEHLRNRQHPHCYVQYMIAIINNCQTFKESIVSLKRKYLKNEVEEGVSPSQPSMDGILDAIAKEGCSGLLEEVFLDLEQHLNELMTKKWLLGSNAVDIICVTVEDYFNDFAKIKKPYKKRMTAEAHRRVVVEYLRAVMQKRISFRSPEERKEGAEKMVREAEQLRFLFRKLASGFGEDVDGYCDTIVAVAEVIKLTDPSLLYLEVSTLVSKYPDIRDDHIGALLAVRGDASRDMKQTIMETLEQGPAQASPSYVPLFKDIVVPSLNVAKLLK

SEQ ID NO: 5107 - protein, 1233 aa, Homo sapiens
MGFLKLIEIENFKSYKGRQIIGPFQRFTAIIGPNGSGKSNLMDAISFVLGEKTSNLRVKTLRDLIHGAPVGKPAANRAFVSMVYSEEGAEDRTFARVIVGGSSEYKINNKVVQLHEYSEELEKLGILIKARNFLVFQGAVESIAMKNPKERTALFEEISRSGELAQEYDKRKKEMVKAEEDTQFNYHRKKNIAAERKEAKQEKEEADRYQRLKDEVVRAQVQLQLFKLYHNEVEIEKLNKELASKNKEIEKDKKRMDKVEDELKEKKKELGKMMREQQQIEKEIKEKDSELNQKRPQYIKAKENTSHKIKKLEAAKKSLQNAQKHYKKRKGDMDELEKEMLSVEKARQEFEERMEEESQSQGRDLTLEENQVKKYHRLKEEASKRAATLAQELEKFNRDQKADQDRLDLEERKKVETEAKIKQKLREIEENQKRIEKLEEYITTSKQSLEEQKKLEGELTEEVEMAKRRIDEINKELNQVMEQLGDARIDRQESSRQQRKAEIMESIKRLYPGSVYGRLIDLCQPTQKKYQIAVTKVLGKNMDAIIVDSEKTGRDCIQYIKEQRGEPETFLPLDYLEVKPTDEKLRELKGAKLVIDVIRYEPPHIKKALQYACGNALVCDNVEDARRIAFGGHQRHKTVALDGTLFQKSGVISGGASDLKAKARRWDEKAVDKLKEKKERLTEELKEQMKAKRKEAELRQVQSQAHGLQMRLKYSQSDLEQTKTRHLALNLQEKSKLESELANFGPRINDIKRIIQSREREMKDLKEKMNQVEDEVFEEFCREIGVRNIREFEEEKVKRQNEIAKKRLEFENQKTRLGIQLDFEKNQLKEDQDKVHMWEQTVKKDENEIEKLKKEEQRHMKIIDETMAQLQDLKNQHLAKKSEVNDKNHEMEEIRKKLGGANKEMTHLQKEVTAIETKLEQKRSDRHNLLQACKMQDIKLPLSKGTMDDISQEEGSSQGEDSVSGSQRISSIYAREALIEIDYGDLCEDLKDAQAEEEIKQEMNTLQQKLNEQQSVLQRIAAPNMKAMEKLESVRDKFQETSDEFEAARKRAKKAKQAFEQIKKERFDRFNACFESVATNIDEIYKALSRNSSAQAFLGPENPEEPYLDGINYNCVAPGKRFRPMDNLSGGEKTVAALALLFAIHSYKPAPFFVLDEIDAALDNTNIGKVANYIKEQSTCNFQAIVISLKEEFYTKAESLIGVYPEQGDCVISKVLTFDLTKYPDANPNPNEQ

SEQ ID NO: 5108 - protein, 309 aa, Homo sapiens
MKNKTVLTEFILLGLTDVPELQVAVFTFLFLAYLLSILGNLTILILTLLDSHLQTPMYFFLRNFSFLEISFTNIFIPRVLISITTGNKSISFAGCFTQYFFAMFLGATEFYLLAAMSYDRYVAICKPLHYTTIMSSRICIQLIFCSWLGGLMAIIPTITLMSQQDFCASNRLNHYFCDYEPLLELSCSDTSLIEKVVFLVASVTLVVTLVLVILSYAFIIKTILKLPSAQQRTKAFSTCSSHMIVISLSYGSCMFMYINPSAKEGDTFNKGVALLITSVAPLLNPFIYTLRNQQVKQPFKDMVKKLLNL

SEQ ID NO: 5109 - protein, 1091 aa, Homo sapiens
MAKRKEENFSSPKNAKRPRQEELEDFDKDGDEDECKGTTLTAAEVGIIESIHLKNFMCHSMLGPFKFGSNVNFVVGNNGSGKSAVLTALIVGLGGRAVATNRGSSLKGFVKDGQNSADISITLRNRGDDAFKASVYGNSILIQQHISIDGSRSYKLKSATGSVVSTRKEELIAILDHFNIQVDNPVSVLTQEMSKQFLQSKNEGDKYKFFMKATQLEQMKEDYSYIMETKERTKEQIHQGEERLTELKRQCVEKEERFQSIAGLSTMKTNLESLKHEMAWAVVNEIEKQLNAIRDNIKIGEDRAARLDRKMEEQQVRLNEAEQKYKDIQDKLEKISEETNARAPECMALKADVVAKKRAYNEAEVLYNRSLNEYKALKKDDEQLCKRIEELKKSTDQSLEPERLERQKKISWLKERVKAFQNQENSVNQEIEQFQQAIEKDKEEHGKIKREELDVKHALSYNQRQLKELKDSKTDRLKRFGPNVPALLEAIDDAYRQGHFTYKPVGPLGACIHLRDPELALAIESCLKGLLQAYCCHNHADERVLQALMKRFYLPGTSRPPIIVSEFRNEIYDVRHRAAYHPDFPTVLTALEIDNAVVANSLIDMRGIETVLLIKNNSVARAVMQSQKPPKNCREAFTADGDQVFAGRYYSSENTRPKFLSRDVDSEISDLENEVENKTAQILNLQQHLSALEKDIKHNEELLKRCQLHYKELKMKIRKNISEIRELENIEEHQSVDIATLEDEAQENKSKMKMVEEHMEQQKENMEHLKSLKIEAENKYDAIKFKINQLSELADPLKDELNLADSEVDNQKRGKRHYEEKQKEHLDTLNKKKRELDMKEKELEEKMSQARQICPERIEVEKSASILDKEINRLRQKIQAEHASHGDREEIMRQYQEARETYLDLDSKVRTLKKFIKLLGEIMEHRFKTYQQFRRCLTLRCKLYFDNLLSQRAYCGKMNFDHKNETLSISVQPGEGNKAAFNDMRALSGGERSFSTVCFILSLWSIAESPFRCLDEFDVYMDMVNRRIAMDLILKMADSQRFRQFILLTPQSMSSLPSSKLIRILRMSDPERGQTTLPFRPVTQEEDDDQR

SEQ ID NO: 5110 - protein, 496 aa, Homo sapiens
MKLGKKPMYKPVDPYSRMQSTYNYNMRGGAYPPRYFYPFPVPPLLYQVELSVGGQQFNGKGKTRQAAKHDAAAKALRILQNEPLPERLEVNGRESEEENLNKSEISQVFEIALKRNLPVNFEVARESGPPHMKNFVTKVSVGEFVGEGEGKSKKISKKNAAIAVLEELKKLPPLPAVERVKPRIKKKTKPIVKPQTSPEYGQGINPISRLAQIQQAKKEKEPEYTLLTERGLPRRREFVMQVKVGNHTAEGTGTNKKVAKRNAAENMLEILGFKVPQAQPTKPALKSEEKTPIKKPGDGRKVTFFEPGSGDENGTSNKEDEFRMPYLSHQQLPAGILPMVPEVAQAVGVSQGHHTKDFTRAAPNPAKATVTAMIARELLYGGTSPTAETILKNNISSGHVPHGPLTRPSEQLDYLSRVQGFQVEYKDFPKNNKNEFVSLINCSSQPPLISHGIGKDVESCHDMAALNILKLLSELDQQSTEMPRTGNGPMSVCGRC

SEQ ID NO: 5111 - protein, 331 aa, Homo sapiens
MASALWTVLPSRMSLRSLKWSLLLLSLLSFFVMWYLSLPHYNVIERVNWMYFYEYEPIYRQDFHFTLREHSNCSHQNPFLVILVTSHPSDVKARQAIRVTWGEKKSWWGYEVLTFFLLGQEAEKEDKMLALSLEDEHLLYGDIIRQDFLDTYNNLTLKTIMAFRWVTEFCPNAKYVMKTDTDVFINTGNLVKYLLNLNHSEKFFTGYPLIDNYSYRGFYQKTHISYQEYPFKVFPPYCSGLGYIMSRDLVPRIYEMMGHVKPIKFEDVYVGICLNLLKVNIHIPEDTNLFFLYRIHLDVCQLRRVIAAHGFSSKEIITFWQVMLRNTTCHY

SEQ ID NO: 5112 - protein, 1121 aa, Homo sapiens
MGAGGRRMRGAPARLLLPLLPWLLLLLAPEARGAPGCPLSIRSCKCSGERPKGLSGGVPGPARRRVVCSGGDLPEPPEPGLLPNGTVTLLLSNNKITGLRNGSFLGLSLLEKLDLRNNIISTVQPGAFLGLGELKRLDLSNNRIGCLTSETFQGLPRLLRLNISGNIFSSLQPGVFDELPALKVVDLGTEFLTCDCHLRWLLPWAQNRSLQLSEHTLCAYPSALHAQALGSLQEAQLCCEGALELHTHHLIPSLRQVVFQGDRLPFQCSASYLGNDTRIRWYHNRAPVEGDEQAGILLAESLIHDCTFITSELTLSHIGVWASGEWECTVSMAQGNASKKVEIVVLETSASYCPAERVANNRGDFRWPRTLAGITAYQSCLQYPFTSVPLGGGAPGTRASRRCDRAGRWEPGDYSHCLYTNDITRVLYTFVLMPINASNALTLAHQLRVYTAEAASFSDMMDVVYVAQMIQKFLGYVDQIKELVEVMVDMASNLMLVDEHLLWLAQREDKACSRIVGALERIGGAALSPHAQHISVELSAFPREVGGAGAGLHPVVYPCTALLLLCLFATIITYILNHSSIRVSRKGWHMLLNLCFHIAMTSAVFAGGITLTNYQMVCQAVGITLHYSSLSTLLWMGVKARVLHKELTWRAPPPQEGDPALPTPSPMLRFYLIAGGIPLIICGITAAVNIHNYRDHSPYCWLVWRPSLGAFYIPVALILLITWIYFLCAGLRLRGPLAQNPKAGNSRASLEAGEELRGSTRLRGSGPLLSDSGSLLATGSARVGTPGPPEDGDSLYSPGVQLGALVTTHFLYLAMWACGALAVSQRWLPRVVCSCLYGVAASALGLFVFTHHCARRRDVRASWRACCPPASPAAPHAPPRALPAAAEDGSPVFGEGPPSLKSSPSGSSGHPLALGPCKLTNLQLAQSQVCEAGAAAGGEGEPEPAGTRGNLAHRHPNNVHHGRRAHKSRAKGHRAGEACGKNRLKALRGGAAGALELLSSESGSLHNSPTDSYLGSSRNSPGAGLQLEGEPMLTPSEGSDTSAAPLSEAGRAGQRRSASRDSLKGGGALEKESHRRSYPLNAASLNGAPKGGKYDDVTLMGAEVASGGCMKTGLWKSETTV

SEQ ID NO: 5113 - protein, 424 aa, Homo sapiens
MHNLQTLPPKPPKPTTVANNGMNNNMSLQDAEWYWGDISREEVNEKLRDTADGTFLVRDASTKMHGDYTLTLRKGGNNKLIKIFHRDGKYGFSDPLTFSSVVELINHYRNESLAQYNPKLDVKLLYPVSKYQQDQVVKEDNIEAVGKKLHEYNTQFQEKSREYDRLYEEYTRTSQEIQMKRTAIEAFNETIKIFEEQCQTQERYSKEYIEKFKREGNEKEIQRIMHNYDKLKSRISEIIDSRRRLEEDLKKQAAEYREIDKRMNSIKPDLIQLRKTRDQYLMWLTQKGVRQKKLNEWLGNENTEDQYSLVEDDEDLPHHDEKTWNVGSSNRNKAENLLRGKRDGTFLVRESSKQGCYACSVVVDGEVKHCVINKTATGYGFAEPYNLYSSLKELVLHYQHTSLVQHNDSLNVTLAYPVYAQQRR

SEQ ID NO: 5114 - protein, 735 aa, Homo sapiens
MAAGGAVAAAPECRLLPYALHKWSSFSSTYLPENILVDKPNDQSSRWSSESNYPPQYLILKLERPAIVQNITFGKYEKTHVCNLKKFKVFGGMNEENMTELLSSGLKNDYNKETFTLKHKIDEQMFPCRFIKIVPLLSWGPSFNFSIWYVELSGIDDPDIVQPCLNWYSKYREQEAIRLCLKHFRQHNYTEAFESLQKKTKIALEHPMLTDIHDKLVLKGDFDACEELIEKAVNDGLFNQYISQQEYKPRWSQIIPKSTKGDGEDNRPGMRGGHQMVIDVQTETVYLFGGWDGTQDLADFWAYSVKENQWTCISRDTEKENGPSARSCHKMCIDIQRRQIYTLGRYLDSSVRNSKSLKSDFYRYDIDTNTWMLLSEDTAADGGPKLVFDHQMCMDSEKHMIYTFGGRILTCNGSVDDSRASEPQFSGLFAFNCQCQTWKLLREDSCNAGPEDIQSRIGHCMLFHSKNRCLYVFGGQRSKTYLNDFFSYDVDSDHVDIISDGTKKDSGMVPMTGFTQRATIDPELNEIHVLSGLSKDKEKREENVRNSFWIYDIVRNSWSCVYKNDQAAKDNPTKSLQEEEPCPRFAHQLVYDELHKVHYLFGGNPGKSCSPKMRLDDFWSLKLCRPSKDYLLRHCKYLIRKHRFEEKAQVDPLSALKYLQNDLYITVDHSDPEETKEFQLLASALFKSGSDFTALGFSDVDHTYAQRTQLFDTLVNFFPDSMTPPKGNLVDLITL

SEQ ID NO: 5115 - protein, 2446 aa, Homo sapiens
MLRGPGPGLLLLAVQCLGTAVPSTGASKSKRQAQQMVQPQSPVAVSQSKPGCYDNGKHYQINQQWERTYLGNALVCTCYGGSRGFNCESKPEAEETCFDKYTGNTYRVGDTYERPKDSMIWDCTCIGAGRGRISCTIANRCHEGGQSYKIGDTWRRPHETGGYMLECVCLGNGKGEWTCKPIAEKCFDHAAGTSYVVGETWEKPYQGWMMVDCTCLGEGSGRITCTSRNRCNDQDTRTSYRIGDTWSKKDNRGNLLQCICTGNGRGEWKCERHTSVQTTSSGSGPFTDVRAAVYQPQPHPQPPPYGHCVTDSGVVYSVGMQWLKTQGNKQMLCTCLGNGVSCQETAVTQTYGGNSNGEPCVLPFTYNGRTFYSCTTEGRQDGHLWCSTTSNYEQDQKYSFCTDHTVLVQTRGGNSNGALCHFPFLYNNHNYTDCTSEGRRDNMKWCGTTQNYDADQKFGFCPMAAHEEICTTNEGVMYRIGDQWDKQHDMGHMMRCTCVGNGRGEWTCIAYSQLRDQCIVDDITYNVNDTFHKRHEEGHMLNCTCFGQGRGRWKCDPVDQCQDSETGTFYQIGDSWEKYVHGVRYQCYCYGRGIGEWHCQPLQTYPSSSGPVEVFITETPSQPNSHPIQWNAPQPSHISKYILRWRPKNSVGRWKEATIPGHLNSYTIKGLKPGVVYEGQLISIQQYGHQEVTRFDFTTTSTSTPVTSNTVTGETTPFSPLVATSESVTEITASSFVVSWVSASDTVSGFRVEYELSEEGDEPQYLDLPSTATSVNIPDLLPGRKYIVNVYQISEDGEQSLILSTSQTTAPDAPPDTTVDQVDDTSIVVRWSRPQAPITGYRIVYSPSVEGSSTELNLPETANSVTLSDLQPGVQYNITIYAVEENQESTPVVIQQETTGTPRSDTVPSPRDLQFVEVTDVKVTIMWTPPESAVTGYRVDVIPVNLPGEHGQRLPISRNTFAEVTGLSPGVTYYFKVFAVSHGRESKPLTAQQTTKLDAPTNLQFVNETDSTVLVRWTPPRAQITGYRLTVGLTRRGQPRQYNVGPSVSKYPLRNLQPASEYTVSLVAIKGNQESPKATGVFTTLQPGSSIPPYNTEVTETTIVITWTPAPRIGFKLGVRPSQGGEAPREVTSDSGSIVVSGLTPGVEYVYTIQVLRDGQERDAPIVNKVVTPLSPPTNLHLEANPDTGVLTVSWERSTTPDITGYRITTTPTNGQQGNSLEEVVHADQSSCTFDNLSPGLEYNVSVYTVKDDKESVPISDTIIPEVPQLTDLSFVDITDSSIGLRWTPLNSSTIIGYRITVVAAGEGIPIFEDFVDSSVGYYTVTGLEPGIDYDISVITLINGGESAPTTLTQQTAVPPPTDLRFTNIGPDTMRVTWAPPPSIDLTNFLVRYSPVKNEEDVAELSISPSDNAVVLTNLLPGTEYVVSVSSVYEQHESTPLRGRQKTGLDSPTGIDFSDITANSFTVHWIAPRATITGYRIRHHPEHFSGRPREDRVPHSRNSITLTNLTPGTEYVVSIVALNGREESPLLIGQQSTVSDVPRDLEVVAATPTSLLISWDAPAVTVRYYRITYGETGGNSPVQEFTVPGSKSTATISGLKPGVDYTITVYAVTGRGDSPASSKPISINYRTEIDKPSQMQVTDVQDNSISVKWLPSSSPVTGYRVTTTPKNGPGPTKTKTAGPDQTEMTIEGLQPTVEYVVSVYAQNPSGESQPLVQTAVTNIDRPKGLAFTDVDVDSIKIAWESPQGQVSRYRVTYSSPEDGIHELFPAPDGEEDTAELQGLRPGSEYTVSVVALHDDMESQPLIGTQSTAIPAPTDLKFTQVTPTSLSAQWTPPNVQLTGYRVRVTPKEKTGPMKEINLAPDSSSVVVSGLMVATKYEVSVYALKDTLTSRPAQGVVTTLENVSPPRRARVTDATETTITISWRTKTETITGFQVDAVPANGQTPIQRTIKPDVRSYTITGLQPGTDYKIYLYTLNDNARSSPVVIDASTAIDAPSNLRFLATTPNSLLVSWQPPRARITGYIIKYEKPGSPPREVVPRPRPGVTEATITGLEPGTEYTIYVIALKNNQKSEPLIGRKKTDELPQLVTLPHPNLHGPEILDVPSTVQKTPFVTHPGYDTGNGIQLPGTSGQQPSVGQQMIFEEHGFRRTTPPTTATPIRHRPRPYPPNVGQEALSQTTISWAPFQDTSEYIISCHPVGTDEEPLQFRVPGTSTSATLTGLTRGATYNVIVEALKDQQRHKVREEVVTVGNSVNEGLNQPTDDSCFDPYTVSHYAVGDEWERMSESGFKLLCQCLGFGSGHFRCDSSRWCHDNGVNYKIGEKWDRQGENGQMMSCTCLGNGKGEFKCDPHEATCYDDGKTYHVGEQWQKEYLGAICSCTCFGGQRGWRCDNCRRPGGEPSPEGTTGQSYNQYSQRYHQRTNTNVNCPIECFMPLDVQADREDSRE

SEQ ID NO: 5116 - protein, 524 aa, Homo sapiens
MTEDKVTGTLVFTVITAVLGSFQFGYDIGVINAPQQVIISHYRHVLGVPLDDRKAINNYVINSTDELPTISYSMNPKPTPWAEEETVAAAQLITMLWSLSVSSFAVGGMTASFFGGWLGDTLGRIKAMLVANILSLVGALLMGFSKLGPSHILIIAGRSISGLYCGLISGLVPMYIGEIAPTALRGALGTFHQLAIVTGILISQIIGLEFILGNYDLWHILLGLSGVRAILQSLLLFFCPESPRYLYIKLDEEVKAKQSLKRLRGYDDVTKDINEMRKEREEASSEQKVSIIQLFTNSSYRQPILVALMLHVAQQFSGINGIFYYSTSIFQTAGISKPVYATIGVGAVNMVFTAVSVFLVEKAGRRSLFLIGMSGMFVCAIFMSVGLVLLNKFSWMSYVSMIAIFLFVSFFEIGPGPIPWFMVAEFFSQGPRPAALAIAAFSNWTCNFIVALCFQYIADFCGPYVFFLFAGVLLAFTLFTFFKVPETKGKSFEEIAAEFQKKSGSAHRPKAAVEMKFLGATETV

SEQ ID NO: 5117 - protein, 245 aa, Homo sapiens
MDRRSRAQQWRRARHNYNDLCPPIGRRAATALLWLSCSIALLRALATSNARAQQRAAAQQRRSFLNAHHRSGAQVFPESPESESDHEHEEADLELSLPECLEYEEEFDYETESETESEIESETDFETEPETAPTTEPETEPEDDRGPVVPKHSTFGQSLTQRLHALKLRSPDASPSRAPPSTQEPQSPREGEELKPEDKDPRDPEESKEPKEEKQRRRCKPKKPTRRDASPESPSKKGPIPIRRH

SEQ ID NO: 5118 - protein, 833 aa, Homo sapiens
MKFTNTKVQMMQNVHLAPETDEDDLYSGYNDYNPIYDIEELENDAAFQQAVRTSHGRRPPITAKISSTAVTRPIATGYGSKTSLASSIGRPMTGAIQDGVTRPMTAVRAAGFTKAALRGSAFDPLSQSRGPASPLEAKKKDSPEEKIKQLEKEVNELVEESCIANSCGDLKLALEKAKDAGRKERVLVRQREQVTTPENINLDLTYSVLFNLASQYSVNEMYAEALNTYQVIVKNKMFSNAGILKMNMGNIYLKQRNYSKAIKFYRMALDQVPSVNKQMRIKIMQNIGVTFIQAGQYSDAINSYEHIMSMAPNLKAGYNLTICYFAIGDREKMKKAFQKLITVPLEIDEDKYISPSDDPHTNLVTEAIKNDHLRQMERERKAMAEKYIMTSAKLIAPVIETSFAAGYDWCVEVVKASQYVELANDLEINKAVTYLRQKDYNQAVEILKVLEKKDSRVKSAAATNLSALYYMGKDFAQASSYADIAVNSDRYNPAALTNKGNTVFANGDYEKAAEFYKEALRNDSSCTEALYNIGLTYEKLNRLDEALDCFLKLHAILRNSAEVLYQIANIYELMENPSQAIEWLMQVVSVIPTDPQVLSKLGELYDREGDKSQAFQYYYESYRYFPCNIEVIEWLGAYYIDTQFWEKAIQYFERASLIQPTQVKWQLMVASCFRRSGNYQKALDTYKDTHRKFPENVECLRFLVRLCTDLGLKDAQEYARKLKRLEKMKEIREQRIKSGRDGSGGSRGKREGSASGDSGQNYSASSKGERLSARLRALPGTNEPYESSSNKEIDASYVDPLGPQIERPKTAAKKRIDEDDFADEELGDDLLPE

SEQ ID NO: 5119 - protein, 1032 aa, Homo sapiens
MCNEETEIKEAQSYQNSPVSSATNQDAGYGSPFSESSDQLAHFKGSSSREEKEDPQCPDSVSYPQDSLAQIKAVYANLFSESCWSSLALDLKKSGSTTSTNDASQKESSAPTPTPPTCPVSTTGPTTSTPSTSCSSSTSHSSTTSTSSSSGYDWHQAALAKTLQQTSSYGLLPEPSLFSTVQLYRQNNKLYGSVFTGASKFRCKDCSAAYDTLVELTVHMNETGHYRDDNRDKDSEKTKRWSKPRKRSLMEMEGKEDAQKVLKCMYCGHSFESLQDLSVHMIKTKHYQKVPLKEPVPAITKLVPSTKKRALQDLAPPCSPEPAGMAAEVALSESAKDQKAANPYVTPNNRYGYQNGASYTWQFEARKAQILKCMECGSSHDTLQQLTAHMMVTGHFLKVTTSASKKGKQLVLDPVVEEKIQSIPLPPTTHTRLPASSIKKQPDSPAGSTTSEEKKEPEKEKPPVAGDAEKIKEESEDSLEKFEPSTLYPYLREEDLDDSPKGGLDILKSLENTVSTAISKAQNGAPSWGGYPSIHAAYQLPGTVKPLPAAVQSVQVQPSYAGGVKSLSSAEHNALLHSPGSLTPPPHKSNVSAMEELVEKVTGKVNIKKEERPPEKEKSSLAKAASPIAKENKDFPKTEEVSGKPQKKGPEAETGKAKKEGPLDVHTPNGTEPLKAKVTNGCNNLGIIMDHSPEPSFINPLSALQSIMNTHLGKVSKPVSPSLDPLAMLYKISNSMLDKPVYPATPVKQADAIDRYYYENSDQPIDLTKSKNKPLVSSVADSVASPLRESALMDISDMVKNLTGRLTPKSSTPSTVSEKSDADGSSFEEALDELSPVHKRKGRQSNWNPQHLLILQAQFASSLRETTEGKYIMSDLGPQERVHISKFTGLSMTTISHWLANVKYQLRRTGGTKFLKNLDTGHPVFFCNDCASQFRTASTYISHLETHLGFSLKDLSKLPLNQIQEQQNVSKVLTNKTLGPLGATEEDLGSTFQCKLCNRTFASKHAVKLHLSKTHGKSPEDHLIYVTELEKQ

SEQ ID NO: 5120 - protein, 311 aa, Homo sapiens
MGRRNNTNVPDFILTGLSDSEEVQMALFILFLLIYLITMLGNVGMILIIRLDLQLHTPMYFFLTHLSFIDLSYSTVITPKTLANLLTSNYISFMGCFAQMFFFVFLGAAECFLLSSMAYDRYVAICSPLRYPVIMSKRLCCALVTGPYVISFINSFVNVVWMSRLHFCDSNVVRHFFCDTSPILALSCMDTYDIEIMIHILAGSTLMVSLITISASYVSILSTILKINSTSGKQKALSTCASHLLGVTIFYGTMIFTYLKPRKSYSLGRDQVASVFYTIVIPMLNPLIYSLRNKEVKNALIRVMQRRQDSR

SEQ ID NO: 5121 - protein, 312 aa, Homo sapiens
MKNHTVIRTFILLGLTGDPHLQVLLFIFLFLTYMLSVTGNLTIITLTLVDHHLKTPMYFFLRNFSFLEVSFTTVCIPRFLYNISMGDNTITYNACASQIFFVILFGATEFFLLAAMSYDRYVAICKPLHYVVIMNNRVCTLLVLCCWVAGLMIIVPPLSLGLQLEFCDSNAIDHFSCDAGPLLKISCSDTWVIEQMVILMAVFALIITLVCVILSYLYIVRTILKFPSVQQRKKAFSTCSSHMIVVSIAYGSCIFIYIKPSAKDEVAINKGVSVLTTSVAPLLNPFIYTLRNKQVKQAFSDSIKRIAFLSKK

SEQ ID NO: 5122 - protein, 322 aa, Homo sapiens
MDKLSSGLDIYRNPLKNKTEVTMFILTGFTDDFELQVFLFLLFFAIYLFTLIGNLGLVVLVIEDSWLHNPMYYFLSVLSFLDACYSTVVTPKMLVNFLAKNKSISFIGCATQMLLFVTFGTTECFLLAAMAYDHYVAIYNPLLYSVSMSPRVYVPLITASYVAGILHATIHIVATFSLSFCGSNEIRHVFCDMPPLLAISCSDTHTNQLLLFYFVGSIEIVTILIVLISCDFILLSILKMHSAKGRQKAFSTCGSHLTGVTIYHGTILVSYMRPSSSYASDHDIIVSIFYTIVIPKLNPIIYSLRNKEVKKAVKKMLKLVYK

SEQ ID NO: 5123 - protein, 1321 aa, Homo sapiens
MVLTLGESWPVLVGRRFLSLSAADGSDGSHDSWDVERVAEWPWLSGTIRAVSHTDVTKKDLKVCVEFDGESWRKRRWIEVYSLLRRAFLVEHNLVLAERKSPEISERIVQWPAITYKPLLDKAGLGSITSVRFLGDQQRVFLSKDLLKPIQDVNSLRLSLTDNQIVSKEFQALIVKHLDESHLLKGDKNLVGSEVKIYSLDPSTQWFSATVINGNPASKTLQVNCEEIPALKIVDPSLIHVEVVHDNLVTCGNSARIGAVKRKSSENNGTLVSKQAKSCSEASPSMCPVQSVPTTVFKEILLGCTAATPPSKDPRQQSTPQAANSPPNLGAKIPQGCHKQSLPEEISSCLNTKSEALRTKPDVCKAGLLSKSSQIGTGDLKILTEPKGSCTQPKTNTDQENRLESVPQALTGLPKECLPTKASSKAELEIANPPELQKHLEHAPSPSDVSNAPEVKAGVNSDSPNNCSGKKVEPSALACRSQNLKESSVKVDNESCCSRSNNKIQNAPSRKSVLTDPAKLKKLQQSGEAFVQDDSCVNIVAQLPKCRECRLDSLRKDKEQQKDSPVFCRFFHFRRLQFNKHGVLRVEGFLTPNKYDNEAIGLWLPLTKNVVGIDLDTAKYILANIGDHFCQMVISEKEAMSTIEPHRQVAWKRAVKGVREMCDVCDTTIFNLHWVCPRCGFGVCVDCYRMKRKNCQQGAAYKTFSWLKCVKSQIHEPENLMPTQIIPGKALYDVGDIVHSVRAKWGIKANCPCSNRQFKLFSKPASKEDLKQTSLAGEKPTLGAVLQQNPSVLEPAAVGGEAASKPAGSMKPACPASTSPLNWLADLTSGNVNKENKEKQPTMPILKNEIKCLPPLPPLSKSSTVLHTFNSTILTPVSNNNSGFLRNLLNSSTGKTENGLKNTPKILDDIFASLVQNKTTSDLSKRPQGLTIKPSILGFDTPHYWLCDNRLLCLQDPNNKSNWNVFRECWKQGQPVMVSGVHHKLNSELWKPESFRKEFGEQEVDLVNCRTNEIITGATVGDFWDGFEDVPNRLKNEKEPMVLKLKDWPPGEDFRDMMPSRFDDLMANIPLPEYTRRDGKLNLASRLPNYFVRPDLGPKMYNAYGLITPEDRKYGTTNLHLDVSDAANVMVYVGIPKGQCEQEEEVLKTIQDGDSDELTIKRFIEGKEKPGALWHIYAAKDTEKIREFLKKVSEEQGQENPADHDPIHDQSWYLDRSLRKRLHQEYGVQGWAIVQFLGDVVFIPAGAPHQVHNLYSCIKVAEDFVSPEHVKHCFWLTQEFRYLSQTHTNHEDKLQVKNVIYHAVKDAVAMLKASESSFGKP

SEQ ID NO: 5124 - protein, 584 aa, Homo sapiens
MAGGVDGPIGIPFPDHSSDILSGLNEQRTQGLLCDVVILVEGREFPTHRSVLAACSQYFKKLFTSGAVVDQQNVYEIDFVSAEALTALMDFAYTATLTVSTANVGDILSAARLLEIPAVSHVCADLLDRQILAADAGADAGQLDLVDQIDQRNLLRAKEYLEFFQSNPMNSLPPAAAAAAASFPWSAFGASDDDLDATKEAVAAAVAAVAAGDCNGLDFYGPGPPAERPPTGDGDEGDSNPGLWPERDEDAPTGGLFPPPVAPPAATQNGHYGRGGEEEAASLSEAAPEPGDSPGFLSGAAEGEDGDGPDVDGLAASTLLQQMMSSVGRAGAAAGDSDEESRADDKGVMDYYLKYFSGAHDGDVYPAWSQKVEKKIRAKAFQKCPICEKVIQGAGKLPRHIRTHTGEKPYECNICKVRFTRQDKLKVHMRKHTGEKPYLCQQCGAAFAHNYDLKNHMRVHTGLRPYQCDSCCKTFVRSDHLHRHLKKDGCNGVPSRRGRKPRVRGGAPDPSPGATATPGAPAQPSSPDARRNGQEKHFKDEDEDEDVASPDGLGRLNVAGAGGGGDSGGGPGAATDGNFTAGLA

SEQ ID NO: 5125 - protein, 377 aa, Homo sapiens
MLRLVPTGARAIVDMSYARHFLDFQGSAIPQAMQKLVVTRLSPNFREAVTLSRDCPVPLPGDGDLLVRNRFVGVNASDINYSAGRYDPSVKPPFDIGFEGIGEVVALGLSASARYTVGQAVAYMAPGSFAEYTVVPASIATPVPSVKPEYLTLLVSGTTAYISLKELGGLSEGKKVLVTAAAGGTGQFAMQLSKKAKCHVIGTCSSDEKSAFLKSLGCDRPINYKTEPVGTVLKQEYPEGVDVVYESVGGAMFDLAVDALATKGRLIVIGFISGYQTPTGLSPVKAGTLPAKLLKKSASVQGFFLNHYLSKYQAAMSHLLEMCVSGDLVCEVDLGDLSPEGRFTGLESIFRAVNYMYMGKNTGKIVVELPHSVNSKL

SEQ ID NO: 5126 - protein, 717 aa, Homo sapiens
MELRCGGLLFSSRFDSGNLAHVEKVESLSSDGEGVGGGASALTSGIASSPDYEFNVWTRPDCAETEFENGNRSWFYFSVRGGMPGKLIKINIMNMNKQSKLYSQGMAPFVRTLPTRPRWERIRDRPTFEMTETQFVLSFVHRFVEGRGATTFFAFCYPFSYSDCQELLNQLDQRFPENHPTHSSPLDTIYYHRELLCYSLDGLRVDLLTITSCHGLREDREPRLEQLFPDTSTPRPFRFAGKRIFFLSSRVHPGETPSSFVFNGFLDFILRPDDPRAQTLRRLFVFKLIPMLNPDGVVRGHYRTDSRGVNLNRQYLKPDAVLHPAIYGAKAVLLYHHVHSRLNSQSSSEHQPSSCLPPDAPVSDLEKANNLQNEAQCGHSADRHNAEAWKQTEPAEQKLNSVWIMPQQSAGLEESAPDTIPPKESGVAYYVDLHGHASKRGCFMYGNSFSDESTQVENMLYPKLISLNSAHFDFQGCNFSEKNMYARDRRDGQSKEGSGRVAIYKASGIIHSYTLECNYNTGRSVNSIPAACHDNGRASPPPPPAFPSRYTVELFEQVGRAMAIAALDMAECNPWPRIVLSEHSSLTNLRAWMLKHVRNSRGLSSTLNVGVNKKRGLRTPPKSHNGLPVSCSENTLSRARSFSTGTSAGGSSSSQQNSPQMKNSPSFPFHGSRPAGLPGLGSSTQKVTHRVLGPVRGKPVWEPLQHVFGCLGHCWGK

SEQ ID NO: 5127 - protein, 359 aa, Homo sapiens
MSYSIYKSTVNIPLSHGVVHSFCHNMNCNFMHIFKFVLDFNMKNVTEVTLFVLKGFTDNLELQTIFFFLFLAIYLFTLMGNLGLILVVIRDSQLHKPMYYFLSMLSSVDACYSSVITPNMLVDFTTKNKVISFLGCVAQVFLACSFGTTECFLLAAMAYDRYVAIYNPLLYSVSMSPRVYMPLINASYVAGILHATIHTVATFSLSFCGANEIRRVFCDIPPLLAISYSDTHTNQLLLFYFVGSIELVTILIVLISYGLILLAILKMYSAEGRRKVFSTCGAHLTGVSIYYGTILFMYVRPSSSYASDHDMIVSIFYTIVIPLLNPVIYSLRNKDVKDSMKKMFGKNQVINKVYFHTKK

SEQ ID NO: 5128 - protein, 1454 aa, Homo sapiens
MAPVQLENHQLVPPGGGGGGSGGPPSAPAPPPPGAAVAAAAAAAASPGYRLSTLIEFLLHRAYSELMVLTDLLPRKSDVERKIEIVQFASRTRQLFVRLLALVKWANNAGKVEKCAMISSFLDQQAILFVDTADRLASLARDALVHARLPSFAIPYAIDVLTTGSYPRLPTCIRDKIIPPDPITKIEKQATLHQLNQILRHRLVTTDLPPQLANLTVANGRVKFRVEGEFEATLTVMGDDPDVPWRLLKLEILVEDKETGDGRALVHSMQISFIHQLVQSRLFADEKPLQDMYNCLHSFCLSLQLEVLHSQTLMLIRERWGDLVQVERYHAGKCLSLSVWNQQVLGRKTGTASVHKVTIKIDENDVSKPLQIFHDPPLPASDSKLVERAMKIDHLSIEKLLIDSVHARAHQKLQELKAILRGFNANENSSIETALPALVVPILEPCGNSECLHIFVDLHSGMFQLMLYGLDQATLDDMEKSVNDDMKRIIPWIQQLKFWLGQQRCKQSIKHLPTISSETLQLSNYSTHPIGNLSKNKLFIKLTRLPQYYIVVEMLEVPNKPTQLSYKYYFMSVNAADREDSPAMALLLQQFKENIQDLVFRTKTGKQTRTNAKRKLSDDPCPVESKKTKRAGEMCAFNKVLAHFVAMCDTNMPFVGLRLELSNLEIPHQGVQVEGDGFSHAIRLLKIPPCKGITEETQKALDRSLLDCTFRLQGRNNRTWVAELVFANCPLNGTSTREQGPSRHVYLTYENLLSEPVGGRKVVEMFLNDWNSIARLYECVLEFARSLPDIPAHLNIFSEVRVYNYRKLILCYGTTKGSSISIQWNSIHQKFHISLGTVGPNSGCSNCHNTILHQLQEMFNKTPNVVQLLQVLFDTQAPLNAINKLPTVPMLGLTQRTNTAYQCFSILPQSSTHIRLAFRNMYCIDIYCRSRGVVAIRDGAYSLFDNSKLVEGFYPAPGLKTFLNMFVDSNQDARRRSVNEDDNPPSPIGGDMMDSLISQLQPPPQQQPFPKQPGTSGAYPLTSPPTSYHSTVNQSPSMMHTQSPGNLHAASSPSGALRAPSPASFVPTPPPSSHGISIGPGASFASPHGTLDPSSPYTMVSPSGRAGNWPGSPQVSGPSPAARMPGMSPANPSLHSPVPDASHSPRAGTSSQTMPTNMPPPRKLPQRSWAASIPTILTHSALNILLLPSPTPGLVPGLAGSYLCSPLERFLGSVIMRRHLQRIIQQETLQLINSNEPGVIMFKTDALKCRVALSPKTNQTLQLKVTPENAGQWKPDELQVLEKFFETRVAGPPFKANTLIAFTKLLGAPTHILRDCVHIMKLELFPDQATQLKWNVQFCLTIPPSAPPIAPPGTPAVVLKSKMLFFLQLTQKTSVPPQEPVSIIVPIIYDMASGTTQQADIPRQQNSSVAAPMMVSNILKRFAEMNPPRQGECTIFAAVRDLMANLTLPPGGRP

SEQ ID NO: 5129 - protein, 441 aa, Homo sapiens
MCVCQTMEVGQYGKNASRAGDRGVLLEPFIHQVGGHSSMMRYDDHTVCKPLISREQRFYESLPPEMKEFTPEYKGVVSVCFEGDSDGYINLVAYPYVESETVEQDDTTEREQPRRKHSRRSLHRSGSGSDHKEEKASLSLETSESSQEAKSPKVELHSHSEVPFQMLDGNSGLSSEKISHNPWSLRCHKQQLSRMRSESKDRKLYKFLLLENVVHHFKYPCVLDLKMGTRQHGDDASAEKAARQMRKCEQSTSATLGVRVCGMQVYQLDTGHYLCRNKYYGRGLSIEGFRNALYQYLHNGLDLRRDLFEPILSKLRGLKAVLERQASYRFYSSSLLVIYDGKECRAESCLDRRSEMRLKHLDMVLPEVASSCGPSTSPSNTSPEAGPSSQPKVDVRMIDFAHSTFKGFRDDPTVHDGPDRGYVFGLENLISIMEQMRDENQ

SEQ ID NO: 5130 - protein, 411 aa, Homo sapiens
MAEAELHKERLQAIAEKRKRQTEIEGKRQQLDEQILLLQHSKSKVLREKWLLQGIPAGTAEEEEARRRQSEEDEFRVKQLEDNIQRLEQEIQTLESEESQISAKEQIILEKLKETEKSFKDFQKGFSSTDGDAVNYISSQLPDLPILCSRTAEPSPGQDGTSRAAAVYAMEINVEKDKQTGETKILSTSTIGPEGVHQKGVKVYDDGTKVVYEVRSGGTVVENGVHKLSTKDVEELIQKAGQSSLGGGHVSERTVIADGSLSHPKEHMLCKEAKLEMVHKSRKDHSSGNPGQQAQAPSAAGPEANLDQPVTMIFMGYQNIEDEEETKKVLGYDETIKAELVLIDEDDEKSLREKTVTDVSTIDGNAAELVSGRPVSDTTEPSSPEGKEESLATEPAPGTQKKKRCQCCVVM

SEQ ID NO: 5131 - protein, 578 aa, Homo sapiens [sequence omitted]

SEQ ID NO: 5132 - protein, 421 aa, Homo sapiens
MSKRLRSSEVCADCSGPDPSWASVNRGTFLCDECCSVHRSLGRHISQVRHLKHTPWPPTLLQMVETLYNNGANSIWEHSLLDPASIMSGRRKANPQDKVHPNKAEFIRAKYQMLAFVHRLPCRDDDSVTAKDLSKQLHSSVRTGNLETCLRLLSLGAQANFFHPEKGNTPLHVASKAGQILQAELLAVYGADPGTQDSSGKTPVDYARQGGHHELAERLVEIQYELTDRLAFYLCGRKPDHKNGQHFIIPQMADSSLDLSELAKAAKKKLQSLSNHLFEELAMDVYDEVDRRETDAVWLATQNHSALVTETTVVPFLPVNPEYSSTRNQGRQKLARFNAHEFATLVIDILSDAKRRQQGSSLSGSKDNVELILKTINNQHSVESQDNDQPDYDSVASDEDTDLETTASKTNRQKLLGKDAN

SEQ ID NO: 5133 - protein, 307 aa, Homo sapiens
MGQHNLTVLTEFILMELTRRPELQIPLFGVFLVIYLITVVGNLTMIILTKLDSHLHTPMYFSIRHLAFVDLGNSTVICPKVLANFVVDRNTISYYACAAQLAFFLMFIISEFFILSAMAYDRYVAICNPLLYYVIMSQRLCHVLVGIQYLYSTFQALMFTIKIFTLTFCGSNVISHFYCDDVPLLPMLCSNAQEIELLSILFSVFNLISSFLIVLVSYMLILLAICQMHSAEGRKKAFSTCGSHLTVVVVFYGSLLFMYMQPNSTHFFDTDKMASVFYTLVIPMLNPLIYSLRNEEVKNAFYKLFEN

SEQ ID NO: 5134 - protein, 4684 aa, Homo sapiens
MVAGMLMPRDQLRAIYEVLFREGVMVAKKDRRPRSLHPHVPGVTNLQVMRAMASLRARGLVRETFAWCHFYWYLTNEGIAHLRQYLHLPPEIVPASLQRVRRPVAMVMPARRTPHVQAVQGPLGSPPKRGPLPTEEQRVYRRKELEEVSPETPVVPATTQRTLARPGPEPAPATDERDRVQKKTFTKWVNKHLIKAQRHISDLYEDLRDGHNLISLLEVLSGDSLPREKGRMRFHKLQNVQIALDYLRHRQVKLVNIRNDDIADGNPKLTLGLIWTIILHFQISDIQVSGQSEDMTAKEKLLLWSQRMVEGYQGLRCDNFTSSWRDGRLFNAIIHRHKPLLIDMNKVYRQTNLENLDQAFSVAERDLGVTRLLDPEDVDVPQPDEKSIITYVSSLYDAMPRVPDVQDGVRANELQLRWQEYRELVLLLLQWMRHHTAAFEERRFPSSFEEIEILWSQFLKFKEMELPAKEADKNRSKGIYQSLEGAVQAGQLKVPPGYHPLDVEKEWGKLHVAILEREKQLRSEFERLECLQRIVTKLQMEAGLCEEQLNQADALLQSDVRLLAAGKVPQRAGEVERDLDKADSMIRLLFNDVQTLKDGRHPQGEQMYRRVYRLHERLVAIRTEYNLRLKAGVAAPATQVAQVTLQSVQRRPELEDSTLRYLQDLLAWVEENQHRVDGAEWGVDLPSVEAQLGSHRGLHQSIEEFRAKIERARSDEGQLSPATRGAYRDCLGRLDLQYAKLLNSSKARLRSLESLHSFVAAATKELMWLNEKEEEEVGFDWSDRNTNMTAKKESYSALMRELELKEKKIKELQNAGDRLLREDHPARPTVESFQAALQTQWSWMLQLCCCIEAHLKENAAYFQFFSDVREAEGQLQKLQEALRRKYSCDRSATVTRLEDLLQDAQDEKEQLNEYKGHLSGLAKRAKAVVQLKPRHPAHPMRGRLPLLAVCDYKQVEVTVHKGDECQLVGPAQPSHWKVLSSSGSEAAVPSVCFLVPPPNQEAQEAVTRLEAQHQALVTLWHQLHVDMKSLLAWQSLRRDVQLIRSWSLATFRTLKPEEQRQALHSLELHYQAFLRDSQDAGGFGPEDRLMAEREYGSCSHHYQQLLQSLEQGAQEESRCQRCISELKDIRLQLEACETRTVHRLRLPLDKEPARECAQRIAEQQKAQAEVEGLGKGVARLSAEAEKVLALPEPSPAAPTLRSELELTLGKLEQVRSLSAIYLEKLKTISLVIRGTQGAEEVLRAHEEQLKEAQAVPATLPELEATKASLKKLRAQAEAQQPTFDALRDELRGAQEVGERLQQRHGERDVEVERWRERVAQLLERWQAVLAQTDVRQRELEQLGRQLRYYRESADPLGAWLQDARRRQEQIQAMPLADSQAVREQLRQEQALLEEIERHGEKVEECQRFAKQYINAIKDYELQLVTYKAQLEPVASPAKKPKVQSGSESVIQEYVDLRTHYSELTTLTSQYIKFISETLRRMEEEERLAEQQRAEERERLAEVEAALEKQRQLAEAHAQAKAQAEREAKELQQRMQEEVVRREEAAVDAQQQKRSIQEELQQLRQSSEAEIQAKARQAEAAERSRLRIEEEIRVVRLQLEATERQRGGAEGELQALRARAEEAEAQKRQAQEEAERLRRQVQDESQRKRQAEVELASRVKAEAEAAREKQRALQALEELRLQAEEAERRLRQAEVERARQVQVALETAQRSAEAELQSKRASFAEKTAQLERSLQEEHVAVAQLREEAERRAQQQAEAERAREEAERELERWQLKANEALRLRLQAEEVAQQKSLAQAEAEKQKEEAEREARRRGKAEEQAVRQRELAEQELEKQRQLAEGTAQQRLAAEQELIRLRAETEQGEQQRQLLEEELARLQREAAAATQKRQELEAELAKVRAEMEVLLASKARAEEESRSTSEKSKQRLEAEAGRFRELAEEAARLRALAEEAKRQRQLAEEDAARQRAEAERVLAEKLAAIGEATRLKTEAEIALKEKEAENERLRRLAEDEAFQRRRLEEQAAQHKADIEERLAQLRKASDSELERQKGLVEDTLRQRRQVEEEILALKASFEKAAAGKAELELELGRIRSNAEDTLRSKEQAELEAARQRQLAAEEERRRREAEERVQKSLAAEEEAARQRKAALEEVERLKAKVEEARRLRERAEQESARQLQLAQEAAQKRLQAEEKAHAFAVQQKEQELQQTLQQEQSVLDQLRGEAEAARRAAEEAEEARVQAEREAAQSRRQVEEAERLKQSAEEQAQARAQAQAAAEKLRKEAEQEAARRAQAEQAALRQKQAADAEMEKHKKFAEQTLRQKAQVEQELTTLRLQLEETDHQKNLLDEELQRLKAEATEAARQRSQVEEELFSVRVQMEELSKLKARIEAENRALILRDKDNTQRFLQEEAEKMKQVAEEAARLSVAAQEAARLRQLAEEDLAQQRALAEKMLKEKMQAVQEATRLKAEAELLQQQKELAQEQARRLQEDKEQMAQQLAEETQGFQRTLEAERQRQLEMSAEAERLKLRVAEMSRAQARAEEDAQRFRKQAEEIGEKLHRTELATQEKVTLVQTLEIQRQQSDHDAERLREAIAELEREKEKLQQEAKLLQLKSEEMQTVQQEQLLQETQALQQSFLSEKDSLLQRERFIEQEKAKLEQLFQDEVAKAQQLREEQQRQQQQMEQERQRLVASMEEARRRQHEAEEGVRRKQEELQQLEQQRRQQEELLAEENQRLREQLQLLEEQHRAALAHSEEVTASQVAATKTLPNGRDALDGPAAEAEPEHSFDGLRRKVSAQRLQEAGILSAEELQRLAQGHTTVDELARREDVRHYLQGRSSIAGLLLKATNEKLSVYAALQRQLLSPGTALILLEAQAASGFLLDPVRNRRLTVNEAVKEGVVGPELHHKLLSAERAVTGYKDPYTGQQISLFQAMQKGLIVREHGIRLLEAQIATGGVIDPVHSHRVPVDVAYRRGYFDEEMNRVLADPSDDTKGFFDPNTHENLTYLQLLERCVEDPETGLCLLPLTDKAAKGGELVYTDSEARDVFEKATVSAPFGKFQGKTVTIWEIINSEYFTAEQRRDLLRQFRTGRITVEKIIKIIITVVEEQEQKGRLCFEGLRSLVPAAELLESRVIDRELYQQLQRGERSVRDVAEVDTVRRALRGANVIAGVWLEEAGQKLSIYNALKKDLLPSDMAVALLEAQAGTGHIIDPATSARLTVDEAVRAGLVGPEFHEKLLSAEKAVTGYRDPYTGQSVSLFQALKKGLIPREQGLRLLDAQLSTGGIVDPSKSHRVPLDVACARGCLDEETSRALSAPRADAKAYSDPSTGEPATYGELQQRCRPDQLTGLSLLPLSEKAARARQEELYSELQARETFEKTPVEVPVGGFKGRTVTVWELISSEYFTAEQRQELLRQFRTGKVTVEKVIKILITIVEEVETLRQERLSFSGLRAPVPASELLASGVLSRAQFEQLKDGKTTVKDLSELGSVRTLLQGSGCLAGIYLEDTKEKVSIYEAMRRGLLRATTAALLLEAQAATGFLVDPVRNQRLYVHEAVKAGVVGPELHEQLLSAEKAVTGYRDPYSGSTISLFQAMQKGLVLRQHGIRLLEAQIATGGIIDPVHSHRVPVDVAYQRGYFSEEMNRVLADPSDDTKGFFDPNTHENLTYRQLLERCVEDPETGLRLLPLKGAEKAEVVETTQVYTEEETRRAFEETQIDIPGGGSHGGSTMSLWEVMQSDLIPEEQRAQLMADFQAGRVTKERMIIIIIEIIEKTEIIRQQGLASYDYVRRRLTAEDLFEARIISLETYNLLREGTRSLREALEAESAWCYLYGTGSVAGVYLPGSRQTLSIYQALKKGLLSAEVARLLLEAQAATGFLLDPVKGERLTVDEAVRKGLVGPELHDRLLSAERAVTGYRDPYTEQTISLFQAMKKELIPTEEALRLLDAQLATGGIVDPRLGFHLPLEVAYQRGYLNKDTHDQLSEPSEVRSYVDPSTDERLSYTQLLRRCRRDDGTGQLLLPLSDARKLTFRGLRKQITMEELVRSQVMDEATALQLREGLTSIEEVTKNLQKFLEGTSCIAGVFVDATKERLSVYQAMKKGIIRPGTAFELLEAQAATGYVIDPIKGLKLTVEEAVRMGIVGPEFKDKLLSAERAVTGYKDPYSGKLISLFQAMKKGLILKDHGIRLLEAQIATGGIIDPEESHRLPVEVAYKRGLFDEEMNEILTDPSDDTKGFFDPNTEENLTYLQLMERCITDPQTGLCLLPLKEKKRERKTSSKSSVRKRRVVIVDPETGKEMSVYEAYRKGLIDHQTYLELSEQECEWEEITISSSDGVVKSMIIDRRSGRQYDIDDAIAKNLIDRSALDQYRAGTLSITEFADMLSGNAGGFRSRSSSVGSSSSYPISPAVSRTQLASWSDPTEETGPVAGILDTETLEKVSITEAMHRNLVDNITGQRLLEAQACTGGIIDPSTGERFPVTDAVNKGLVDKIMVDRINLAQKAFCGFEDPRTKTKMSAAQALKKGWLYYEAGQRFLEVQYLTGGLIEPDTPGRVPLDEALQRGTVDARTAQKLRDVGAYSKYLTCPKTKLKISYKDALDRSMVEEGTGLRLLEAAAQSTKGYYSPYSVSGSGSTAGSRTGSRTGSRAGSRRGSFDATGSGFSMTFSSSSYSSSGYGRRYASGSSASLGGPESAVA

SEQ ID NO: 5135 - protein, 882 aa, Homo sapiens
MAADKGPAAGPRSRAAMAQWRKKKGLRKRRGAASQARGSDSEDGEFEIQAEDDARARKLGPGRPLPTFPTSECTSDVEPDTREMVRAQNKKKKKSGGFQSMGLSYPVFKGIMKKGYKVPTPIQRKTIPVILDGKDVVAMARTGSGKTACFLLPMFERLKTHSAQTGARALILSPTRELALQTLKFTKELGKFTGLKTALILGGDRMEDQFAALHENPDIIIATPGRLVHVAVEMSLKLQSVEYVVFDEADRLFEMGFAEQLQEIIARLPGGHQTVLFSATLPKLLVEFARAGLTEPVLIRLDVDTKLNEQLKTSFFLVREDTKAAVLLHLLHNVVRPQDQTVVFVATKHHAEYLTELLTTQRVSCAHIYSALDPTARKINLAKFTLGKCSTLIVTDLAARGLDIPLLDNVINYSFPAKGKLFLHRVGRVARAGRSGTAYSLVAPDEIPYLLDLHLFLGRSLTLARPLKEPSGVAGVDGMLGRVPQSVVDEEDSGLQSTLEASLELRGLARVADNAQQQYVRSRPAPSPESIKRAKEMDLVGLGLHPLFSSRFEEEELQRLRLVDSIKNYRSRATIFEINASSRDLCSQVMRAKRQKDRKAIARFQQGQQGRQEQQEGPVGPAPSRPALQEKQPEKEEEEEAGESVEDIFSEVVGRKRQRSGPNRGAKRRREEARQRDQEFYIPYRPKDFDSERGLSISGEGGAFEQQAAGAVLDLMGDEAQNLTRGRQQLKWDRKKKRFVGQSGQEDKKKIKTESGRYISSSYKRDLYQKWKQKQKIDDRDSDEEGASDRRGPERRGGKRDRGQAGASRPHAPGTPAGRVRPELKTKQQILKQRRRAQKLHFLQRGGLKQLSARNRRRVQELQQGAFGRGARSKKGKMRKRM

SEQ ID NO: 5136 - protein, 340 aa, Homo sapiens
METVISSDSSPAVENEHPQETPESNNSVYTSFMKSHRCYDLIPTSSKLVVFDTSLQVKKAFFALVTNGVRAAPLWDSKKQSFVVLRALSCPLGMLTITDFINILHRYYKSALVQIYELEEHKIETWREVYLQDSFKPLVCISPNASLFDAVSSLIRNKIHRLPVIDPESGNTLYILTHKRILKFLKLFITEFPKPEFMSKSLEELQIGTYANIAMVRTTTPVYVALGIFVQHRVSALPVVDEKGRVVDIYSKFDVINLAAEKTYNNLDVSVTKALQHRSHYFEGVLKCYLHETLETIINRLVEAEVHRLVVVDENDVVKGIVSLSDILQALVLTGGEKKP

SEQ ID NO: 5137 - protein, 1112 aa, Homo sapiens
MEMDAPRPPSLAVPGAASRPGRLLDGGHGRQQVQALSSQLLEVIPDSMRKQEVRTGREAGQGHGTGSPAEQVKALMDLLAGKGSQGSQAPQALDRTPDAPLGPCSNDSRIQRHRKALLSKVGGGPELGGPWHRLASLLLVEGLTDLQLREHDFTQVEATRGGGHPARTVALDRLFLPLSRVSVPPRVSITIGVAGMGKTTLVRHFVRLWAHGQVGKDFSLVLPLTFRDLNTHEKLCADRLICSVFPHVGEPSLAVAVPARALLILDGLDECRTPLDFSNTVACTDPKKEIPVDHLITNIIRGNLFPEVSIWITSRPSASGQIPGGLVDRMTEIRGFNEEEIKVCLEQMFPEDQALLGWMLSQVQADRALYLMCTVPAFCRLTGMALGHLWRSRTGPQDAELWPPRTLCELYSWYFRMALSGEGQEKGKASPRIEQVAHGGRKMVGTLGRLAFHGLLKKKYVFYEQDMKAFGVDLALLQGAPCSCFLQREETLASSVAYCFTHLSLQEFVAAAYYYGASRRAIFDLFTESGVSWPRLGFLTHFRSAAQRAMQAEDGRLDVFLRFLSGLLSPRVNALLAGSLLAQGEHQAYRTQVAELLQGCLRPDAAVCARAINVLHCLHELQHTELARSVEEAMESGALARLTGPAHRAALAYLLQVSDACAQEANLSLSLSQGVLQSLLPQLLYCRKLRLDTNQFQDPVMELLGSVLSGKDCRIQKISLAENQISNKGAKALARSLLVNRSLTSLDLRGNSIGPQGAKALADALKINRTLTSLSLQGNTVRDDGARSMAEALASNRTLSMLHLQKNSIGPMGAQRMADALKQNRSLKELMFSSNSIGDGGAKALAEALKVNQGLESLDLQSNSISDAGVAALMGALCTNQTLLSLSLRENSISPEGAQAIAHALCANSTLKNLDLTANLLHDQGARAIAVAVRENRTLTSLHLQWNFIQAGAAQALGQALQLNRSLTSLDLQENAIGDDGACAVARALKVNTALTALYLQVASIGASGAQVLGEALAVNRTLEILDLRGNAIGVAGAKALANALKVNSSLRRLNLQENSLGMDGAICIATALSGNHRLQHINLQGNHIGDSGARMISEAIKTNAPTCTVEM

SEQ ID NO: 5138 - protein, 548 aa, Homo sapiens
MSASLNYKSFSKEQQTMDNLEKQLICPICLEMFTKPVVILPCQHNLCRKCASDIFQASNPYLPTRGGTTMASGGRFRCPSCRHEVVLDRHGVYGLQRNLLVENIIDIYKQESTRPEKKSDQPMCEEHEEERINIYCLNCEVPTCSLCKVFGAHKDCQVAPLTHVFQRQKSELSDGIAILVGSNDRVQGVISQLEDTCKTIEECCRKQKQELCEKFDYLYGILEERKNEMTQVITRTQEEKLEHVRALIKKYSDHLENVSKLVESGIQFMDEPEMAVFLQNAKTLLKKISEASKAFQMEKIEHGYENMNHFTVNLNREEKIIREIDFYREDEDEEEEEGGEGEKEGEGEVGGEAVEVEEVENVQTEFPGEDENPEKASELSQVELQAAPGALPVSSPEPPPALPPAADAPVTQGEVVPTGSEQTTESETPVPAAAETADPLFYPSWYKGQTRKATTNPPCTPGSEGLGQIGPPGSEDSNVRKAEVAAAAASERAAVSGKETSAPAATSQIGFEAPPLQGQAAAPASGSGADSEPARHIFSFSWLNSLNE

SEQ ID NO: 5139 - protein, 1104 aa, Homo sapiens
MSFRAARLSMRNRRNDTLDSTRTLYSSASRSTDLSYSESDLVNFIQANFKKRECVFFTKDSKATENVCKCGYAQSQHMEGTQINQSEKWNYKKHTKEFPTDAFGDIQFETLGKKGKYIRLSCDTDAEILYELLTQHWHLKTPNLVISVTGGAKNFALKPRMRKIFSRLIYIAQSKGAWILTGGTHYGLMKYIGEVVRDNTISRSSEENIVAIGIAAWGMVSNRDTLIRNCDAEGYFLAQYLMDDFTRDPLYILDNNHTHLLLVDNGCHGHPTVEAKLRNQLEKYISERTIQDSNYGGKIPIVCFAQGGGKETLKAINTSIKNKIPCVVVEGSGQIADVIASLVEVEDALTSSAVKEKLVRFLPRTVSRLPEEETESWIKWLKEILECSHLLTVIKMEEAGDEIVSNAISYALYKAFSTSEQDKDNWNGQLKLLLEWNQLDLANDEIFTNDRRWESADLQEVMFTALIKDRPKFVRLFLENGLNLRKFLTHDVLTELFSNHFSTLVYRNLQIAKNSYNDALLTFVWKLVANFRRGFRKEDRNGRDEMDIELHDVSPITRHPLQALFIWAILQNKKELSKVIWEQTRGCTLAALGASKLLKTLAKVKNDINAAGESEELANEYETRAVELFTECYSSDEDLAEQLLVYSCEAWGGSNCLELAVEATDQHFIAQPGVQNFLSKQWYGEISRDTKNWKIILCLFIIPLVGCGFVSFRKKPVDKHKKLLWYYVAFFTSPFVVFSWNVVFYIAFLLLFAYVLLMDFHSVPHPPELVLYSLVFVLFCDEVRQWYVNGVNYFTDLWNVMDTLGLFYFIAGIVFRLHSSNKSSLYSGRVIFCLDYIIFTLRLIHIFTVSRNLGPKIIMLQRMLIDVFFFLFLFAVWMVAFGVARQGILRQNEQRWRWIFRSVIYEPYLAMFGQVPSDVDGTTYDFAHCTFTGNESKPLCVELDEHNLPRFPEWITIPLVCIYMLSTNILLVNLLVAMFGYTVGTVQENNDQVWKFQRYFLVQEYCSRLNIPFPFIVFAYFYMVVKKCFKCCCKEKNMESSVCCFKNEDNETLAWEGVMKENYLVKINTKANDTSEEMRHRFRQLDTKLNDLKGLLKEIANKIK

SEQ ID NO: 5140 - protein, 1474 aa, Homo sapiens
MGKNKLLHPSLVLLLLVLLPTDASVSGKPQYMVLVPSLLHTETTEKGCVLLSYLNETVTVSASLESVRGNRSLFTDLEAENDVLHCVAFAVPKSSSNEEVMFLTVQVKGPTQEFKKRTTVMVKNEDSLVFVQTDKSIYKPGQTVKFRVVSMDENFHPLNELIPLVYIQDPKGNRIAQWQSFQLEGGLKQFSFPLSSEPFQGSYKVVVQKKSGGRTEHPFTVEEFVLPKFEVQVTVPKIITILEEEMNVSVCGLYTYGKPVPGHVTVSICRKYSDASDCHGEDSQAFCEKFSGQLNSHGCFYQQVKTKVFQLKRKEYEMKLHTEAQIQEEGTVVELTGRQSSEITRTITKLSFVKVDSHFRQGIPFFGQVRLVDGKGVPIPNKVIFIRGNEANYYSNATTDEHGLVQFSINTTNVMGTSLTVRVNYKDRSPCYGYQWVSEEHEEAHHTAYLVFSPSKSFVHLEPMSHELPCGHTQTVQAHYILNGGTLLGLKKLSFYYLIMAKGGIVRTGTHGLLVKQEDMKGHFSISIPVKSDIAPVARLLIYAVLPTGDVIGDSAKYDVENCLANKVDLSFSPSQSLPASHAHLRVTAAPQSVCALRAVDQSVLLMKPDAELSASSVYNLLPEKDLTGFPGPLNDQDNEDCINRHNVYINGITYTPVSSTNEKDMYSFLEDMGLKAFTNSKIRKPKMCPQLQQYEMHGPEGLRVGFYESDVMGRGHARLVHVEEPHTETVRKYFPETWIWDLVVVNSAGVAEVGVTVPDTITEWKAGAFCLSEDAGLGISSTASLRAFQPFFVELTMPYSVIRGEAFTLKATVLNYLPKCIRVSVQLEASPAFLAVPVEKEQAPHCICANGRQTVSWAVTPKSLGNVNFTVSAEALESQELCGTEVPSVPEHGRKDTVIKPLLVEPEGLEKETTFNSLLCPSGGEVSEELSLKLPPNVVEESARASVSVLGDILGSAMQNTQNLLQMPYGCGEQNMVLFAPNIYVLDYLNETQQLTPEIKSKAIGYLNTGYQRQLNYKHYDGSYSTFGERYGRNQGNTWLTAFVLKTFAQARAYIFIDEAHITQALIWLSQRQKDNGCFRSSGSLLNNAIKGGVEDEVTLSAYITIALLEIPLTVTHPVVRNALFCLESAWKTAQEGDHGSHVYTKALLAYAFALAGNQDKRKEVLKSLNEEAVKKDNSVHWERPQKPKAPVGHFYEPQAPSAEVEMTSYVLLAYLTAQPAPTSEDLTSATNIVKWITKQQNAQGGFSSTQDTVVALHALSKYGAATFTRTGKAAQVTIQSSGTFSSKFQVDNNNRLLLQQVSLPELPGEYSMKVTGEGCVYLQTSLKYNILPEKEEFPFALGVQTLPQTCDEPKAHTSFQISLSVSYTGSRSASNMAIVDVKMVSGFIPLKPTVKMLERSNHVSRTEVSSNHVLIYLDKVSNQTLSLFFTVLQDVPVRDLKPAIVKVYDYYETDEFAIAEYNAPCSKDLGNA

SEQ ID NO: 5141 - protein, 317 aa, Homo sapiens
MPGEQQAEEEEEEEMQEEMVLLVKGEEDEGEEKYEVVKLKIPMDNKEVPGEAPAPSADPARPHACPDCGRAFARRSTLAKHARTHTGERPFGCTECGRRFSQKSALTKHGRTHTGERPYECPECDKRFSAASNLRQHRRRHTGEKPYACAHCGRRFAQSSNYAQHLRVHTGEKPYACPDCGRAFGGSSCLARHRRTHTGERPYACADCGTRFAQSSALAKHRRVHTGEKPHRCAVCGRRFGHRSNLAEHARTHTGERPYPCAECGRRFRLSSHFIRHRRAHMRRRLYICAGCGRDFKLPPGATAATATERCPECEGS

SEQ ID NO: 5142 - protein, 744 aa, Homo sapiens
MGLGLLLPLLLLWTRGTQGSELDPKGQHVCVASSPSAELQCCAGWRQKDQECTIPICEGPDACQKDEVCVKPGLCRCKPGFFGAHCSSRCPGQYWGPDCRESCPCHPHGQCEPATGACQCQADRWGARCEFPCACGPHGRCDPATGVCHCEPGWWSSTCRRPCQCNTAAARCEQATGACVCKPGWWGRRCSFRCNCHGSPCEQDSGRCACRPGWWGPECQQQCECVRGRCSAASGECTCPPGFRGARCELPCPAGSHGVQCAHSCGRCKHNEPCSPDTGSCESCEPGWNGTQCQQPCLPGTFGESCEQQCPHCRHGEACEPDTGHCQPGSGSRDTALIAGSLVPLLLLFLGLACCACCCWAPRSDLKDRPARDGATVSRMKLQVWGTLTSLGSTLPCRSLSSHKLPWVTVSHHDPEVPFNHSFIEPPSAGWATDDSFSSDPESGEADEVPAYCVPPQEGMVPVAQAGSSEASLAAGAFPPPEDASTPFAIPRTSSLARAKRPSVSFAEGTKFAPQSRRSSGELSSPLRKPKRLSRGAQSGPEGREAEESTGPEEAEAPESFPAAASPGDSATGHRRPPLGGRTVAEHVEAIEGSVQESSGPVTTIYMLAGKPRGSEGPVRSVFRHFGSFQKGQAEAKVKRAIPKPPRQALNRKKGSPGLASGSVGQSPNSAPKAGLPGATGPMAVRPEEAVRGLGAGTESSRRAQEPVSGCGSPEQDPQKQAEEERQEEPEYENVVPISRPPEP

SEQ ID NO: 5143 - protein, 1182 aa, Homo sapiens
MRAVLTWRDKAEHCINDIAFKPDGTQLILAAGSRLLVYDTSDGTLLQPLKGHKDTVYCVAYAKDGKRFASGSADKSVIIWTSKLEGILKYTHNDAIQCVSYNPITHQLASCSSSDFGLWSPEQKSVSKHKSSSKIICCSWTNDGQYLALGMFNGIISIRNKNGEEKVKIERPGGSLSPIWSICWNPSREERNDILAVADWGQKVSFYQLSGKQIGKDRALNFDPCCISYFTKGEYILLGGSDKQVSLFTKDGVRLGTVGEQNSWVWTCQAKPDSNYVVVGCQDGTISFYQLIFSTVHGLYKDRYAYRDSMTDVIVQHLITEQKVRIKCKELVKKIAIYRNRLAIQLPEKILIYELYSEDLSDMHYRVKEKIIKKFECNLLVVCANHIILCQEKRLQCLSFSGVKEREWQMESLIRYIKVIGGPPGREGLLVGLKNGQILKIFVDNLFAIVLLKQATAVRCLDMSASRKKLAVVDENDTCLVYDIDTKELLFQEPNANSVAWNTQCEDMLCFSGGGYLNIKASTFPVHRQKLQGFVVGYNGSKIFCLHVFSISAVEVPQSAPMYQYLDRKLFKEAYQIACLGVTDTDWRELAMEALEGLDFETAKKAFIRVQDLRYLELISSIEERKKRGETNNDLFLADVFSYQGKFHEAAKLYKRSGHENLALEMYTDLCMFEYAKDFLGSGDPKETKMLITKQADWARNIKEPKAAVEMYISAGEHVKAIEICGDHGWVDMLIDIARKLDKAEREPLLLCATYLKKLDSPGYAAETYLKMGDLKSLVQLHVETQRWDEAFALGEKHPEFKDDIYMPYAQWLAENDRFEEAQKAFHKAGRQREAVQVLEQLTNNAVAESRFNDAAYYYWMLSMQCLDIAQDPAQKDTMLGKFYHFQRLAELYHGYHAIHRHTEDPFSVHRPETLFNISRFLLHSLPKDTPSGISKVKILFTLAKQSKALGAYRLARHAYDKLRGLYIPARFQKSIELGTLTIRAKPFHDSEELVPLCYRCSTNNPLLNNLGNVCINCRQPFIFSASSYDVLHLVEFYLEEGITDEEAISLIDLEVLRPKRDDRQLEIANNSSQILRLVETKDSIGDEDPFTAKLSFEQGGSEFVPVVVSRLVLRSMSRRDVLIKRWPPPLRWQYFRSLLPDASITMCPSCFQMFHSEDYELLVLQHGCCPYCRRCKDDPGP

SEQ ID NO: 5144 - protein, 312 aa, Homo sapiens
MMGRRNNTNVADFILMGLTLSEEIQMALFMLFLLIYLITMLGNVGMILIIRLDLQLHTPMYFFLTHLSFIDLSYSTVVTPKTLANLLTSNYISFTGCFAQMFFFAFLGTAECYLLSSMAHDRYAAICSPLHYTVIMSKRLCLALITGPYVIGFIDSFVNVVSMSRLHFYDSNVIHHFFCDTSPILALSCTDTYNTEILIFIIVGSTLMVSLFTISASYVFILFTILKINSTSGKQKAFSTCVSHLLGVTIFYSTLIFTYLKPRKSYSLGRDQVASVFYTIVIPVLNPLIYSLRNKEVKNAVIRVMQRRQDSR

SEQ ID NO: 5145 - protein, 1241 aa, Homo sapiens
MRAVLTWRDKAEHCINDIAFKPDGTQLILAAGSRLLVYDTSDGTLLQPLKGHKDTVYCVAYAKDGKRFASGSADKSVIIWTSKLEGILKYTHNDAIQCVSYNPITHQLASCSSSDFGLWSPEQKSVSKHKSSSKIICCSWTNDGQYLALGMFNGIISIRNKNGEEKVKIERPGGSLSPIWSICWNPSSRWESFWMNRENEDAEDVIVNRYIQEIPSTLKSAVYSSQGSEAEEEEPEEEDDSPRDDNLEERNDILAVADWGQKVSFYQLSGKQIGKDRALNFDPCCISYFTKGEYILLGGSDKQVSLFTKDGVRLGTVGEQNSWVWTCQAKPDSNYVVVGCQDGTISFYQLIFSTVHGLYKDRYAYRDSMTDVIVQHLITEQKVRIKCKELVKKIAIYRNRLAIQLPEKILIYELYSEDLSDMHYRVKEKIIKKFECNLLVVCANHIILCQEKRLQCLSFSGVKEREWQMESLIRYIKVIGGPPGREGLLVGLKNGQILKIFVDNLFAIVLLKQATAVRCLDMSASRKKLAVVDENDTCLVYDIDTKELLFQEPNANSVAWNTQCEDMLCFSGGGYLNIKASTFPVHRQKLQGFVVGYNGSKIFCLHVFSISAVEVPQSAPMYQYLDRKLFKEAYQIACLGVTDTDWRELAMEALEGLDFETAKKAFIRVQDLRYLELISSIEERKKRGETNNDLFLADVFSYQGKFHEAAKLYKRSGHENLALEMYTDLCMFEYAKDFLGSGDPKETKMLITKQADWARNIKEPKAAVEMYISAGEHVKAIEICGDHGWVDMLIDIARKLDKAEREPLLLCATYLKKLDSPGYAAETYLKMGDLKSLVQLHVETQRWDEAFALGEKHPEFKDDIYMPYAQWLAENDRFEEAQKAFHKAGRQREAVQVLEQLTNNAVAESRFNDAAYYYWMLSMQCLDIAQDPAQKDTMLGKFYHFQRLAELYHGYHAIHRHTEDPFSVHRPETLFNISRFLLHSLPKDTPSGISKVKILFTLAKQSKALGAYRLARHAYDKLRGLYIPARFQKSIELGTLTIRAKPFHDSEELVPLCYRCSTNNPLLNNLGNVCINCRQPFIFSASSYDVLHLVEFYLEEGITDEEAISLIDLEVLRPKRDDRQLEIANNSSQILRLVETKDSIGDEDPFTAKLSFEQGGSEFVPVVVSRLVLRSMSRRDVLIKRWPPPLRWQYFRSLLPDASITMCPSCFQMFHSEDYELLVLQHGCCPYCRRCKDDPGP

SEQ ID NO: 5146 - protein, 1388 aa, Homo sapiens
MAPGCKTELRSVTNGQSNQPSNEGDAIKVFVRIRPPAERSGSADGEQNLCLSVLSSTSLRLHSNPEPKTFTFDHVADVDTTQESVFATVAKSIVESCMSGYNGTIFAYGQTGSGKTFTMMGPSESDNFSHNLRGVIPRSFEYLFSLIDREKEKAGAGKSFLCKCSFIEIYNEQIYDLLDSASAGLYLREHIKKGVFVVGAVEQVVTSAAEAYQVLSGGWRNRRVASTSMNRESSRSHAVFTITIESMEKSNEIVNIRTSLLNLVDLAGSERQKDTHAEGMRLKEAGNINRSLSCLGQVITALVDVGNGKQRHVCYRDSKLTFLLRDSLGGNAKTAIIANVHPGSRCFGETLSTLNFAQRAKLIKNKAVVNEDTQGNVSQLQAEVKRLKEQLAELASGQTPPESFLTRDKKKTNYMEYFQEAMLFFKKSEQEKKSLIEKVTQLEDLTLKKEKFIQSNKMIVKFREDQIIRLEKLHKESRGGFLPEEQDRLLSELRNEIQTLREQIEHHPRVAKYAMENHSLREENRRLRLLEPVKRAQEMDAQTIAKLEKAFSEISGMEKSDKNQQGFSPKAQKEPCLFANTEKLKAQLLQIQTELNNSKQEYEEFKELTRKRQLELESELQSLQKANLNLENLLEATKACKRQEVSQLNKIHAETLKIITTPTKAYQLHSRPVPKLSPEMGSFGSLYTQNSSILDNDILNEPVPPEMNEQAFEAISEELRTVQEQMSALQAKLDEEEHKNLKLQQHVDKLEHHSTQMQELFSSERIDWTKQQEELLSQLNVLEKQLQETQTKNDFLKSEVHDLRVVLHSADKELSSVKLEYSSFKTNQEKEFNKLSERHMHVQLQLDNLRLENEKLLESKACLQDSYDNLQEIMKFEIDQLSRNLQNFKKENETLKSDLNNLMELLEAEKERNNKLSLQFEEDKENSSKEILKVLEAVRQEKQKETAKCEQQMAKVQKLEESLLATEKVISSLEKSRDSDKKVVADLMNQIQELRTSVCEKTETIDTLKQELKDINCKYNSALVDREESRVLIKKQEVDILDLKETLRLRILSEDIERDMLCEDLAHATEQLNMLTEASKKHSGLLQSAQEELTKKEALIQELQHKLNQKKEEVEQKKNEYNFKMRQLEHVMDSAAEDPQSPKTPPHFQTHLAKLLETQEQEIEDGRASKTSLEHLVTKLNEDREVKNAEILRMKEQLREMENLRLESQQLIEKNWLLQGQLDDIKRQKENSDQNHPDNQQLKNEQEESIKERLAKSKIVEEMLKMKADLEEVQSALYNKEMECLRMTDEVERTQTLESKAFQEKEQLRSKLEEMYEERERTSQEMEMLRKQVECLAEENGKLVGHQNLHQKIQYVVRLKKENVRLAEETEKLRAENVFLKEKKRSES

SEQ ID NO: 5147 - protein, 618 aa, Homo sapiens
MERAVEPWGPDLHRPEEREPQRGARTGLGSENVISQPNEFEHTPQEDDLGFKEEDLAPDHEVGNASLKPEGIQNWDDLWVQREGLGKPQPRDRGPRLLGEPRWGQASSDRAAVCGECGKSFRQMSDLVKHQRTHTGEKPYKCGVCGKGFGDSSARIKHQRTHSGEKPYRARPPAQGPPKIPRSRIPAGERPTICGECGKSFRQSSDLVKHQRTHTGEKPYKCGICGKGFGDSSARIKHQRTHRGEQPPRPVVPRRQPSRAATAATQGPKAQDKPYICTDCGKRFVLSCSLLSHQRSHLGPKPFGCDVCGKEFARGSDLVKHLRVHTGEKPYLCPECGKGFADSSARVKHLRTHSGERPHACPECDRTFSLSSTLLRHRLTHMEPQDFSFPGYPLPALIPSPPPPPLGTSPPLTPRSPSHSGEPFGLPGLEPEPGGPQAGEPPPPLAGDKPHKCPECGKGFRRSSDLVKHHRVHTGEKPYLCPECGKGFADSSARVKHLRTHRGERARPPPPSTLLRPHNPPGPVPMAPRPRVRAQPSGPSQPHVCGFCGKEFPRSSDLVKHRRTHTGEKPYKCAECGKGFGDSSARIKHQRGHLVLTPFGIGDGRARPLKQEAATGLE

SEQ ID NO: 5148 - protein, 554 aa, Homo sapiens [sequence omitted]

SEQ ID NO: 5149 - protein, 324 aa, Homo sapiens
MLESNYTMPTEFLFVGFTDYLPLRVTLFLVFLLVYTLTMVGNILLIILVNINSSLQIPMYYFLSNLSFLDISCSTAITPKMLANFLASRKSISPYGCALQMFFFASFADAECLILAAMAYDRYAAICNPLLYTTLMSRRVCVCFIVLAYFSGSTTSLVHVCLTFRLSFCGSNIVNHFFCDIPPLLALSCTDTQINQLLLFALCSFIQTSTFVVIFISYFCILITVLSIKSSGGRSKTFSTCASHLIAVTLFYGALLFMYLQPTTSYSLDTDKVVAVFYTVVFPMFNPIIYSFRNKDVKNALKKLLERIGYSNEWYLNRLRIVNI

SEQ ID NO: 5150 - protein, 1047 aa, Homo sapiens
MEGRSAAAETFVWVNNASAHSQSVAKAKYEFLFGRSEGKAPDTSDHGGSTLLPPNVTNEFPEYGTMEEGGEGLRASLEFDGEALPCHPQEQQGVQPLTGCHSGLDSVTEGPKDVREAPSQSHLKEQSLQPIDSLISALKATEARIISGTLQATKVLDQDAVSSFSVQQVEKELDTASRKTQRVNKTLPAGQKNLPEIPLSAEVTTEESFYLSIQKDLTALLTGDTQAEISQIMNNGRKGAVCVQEPSCPLASLGSSAVTCHSAGSVGFLKEQRSALGREHPGGCDRSSSMGRPGRVKHVEFQGVEILWTGGDKRETQHPIDFETSLQRTASPDSKESSKVPRHLISSAGLCNSSSLTENVWDESWKAPSERPGTSSGTFSPVRLDESGEDEVFLQENKQHLEKTPKPERDRERISEQEEHVKGEDEDILGPGYTEDSTDVYSSQFETILDNTSLYYSAESLETLYSEPDSYFSFEMPLTPMIQQRIKEGGQFLERTSGGGHQDILSVSADGGIVMGYSSGVTNGLNDASDSIYTKGTPEIAFWGSNAGVKTTRLEAHSEMGSTEILEKETPENLSNGTSSNVEAAKRLAKRLYQLDRFKRSDVAKHLGKNNEFSKLVAEEYLKFFDFTGMTLDQSLRYFFKAFSLVGETQERERVLIHFSNRYFYCNPDTIASQDGVHCLTCAIMLLNTDLHGHNIGKKMTCQEFIANLQGVNEGVDFSKDLLKALYNSIKNEKLEWAVDDEEKKKSPSESTEEKANGTHPKTISRIGSTTNPFLDIPHDPNAAVYKSGFLARKIHADMDGKKTPRGKRGWKTFYAVLKGTVLYLQKDEYKPEKALSEEDLKNAVSVHHALASKATDYEKKPNVFKLKTADWRVLLFQTQSPEEMQGWINKINCVAAVFSAPPFPAAIGSQKKFSRPLLPATTTKLSQEEQLKSHESKLKQITTELAEHRSYPPDKKVKAKDVDEYKLKDHYLEFEKTRYEMYVSILKEGGKELLSNDESEAAGLKKSHSSPSLNPDTSPITAKVKRNVSERKDHRPETPSIKQKVT

SEQ ID NO: 5151 - protein, 630 aa, Homo sapiens
MGLPRGPEGQGLPEVETREDEEQNVKLTEILELLVAAGYFRARIKGLSPFDKVVGGMTWCITTCNFDVDVDLLFQENSTIGQKIALSEKIVSVLPRMKCPHQLEPHQIQGMDFIHIFPVVQWLVKRAIETKEEMGDYIRSYSVSQFQKTYSLPEDDDFIKRKEKAIKTVVDLSEVYKPRRKYKRHQGAEELLDEESRIHATLLEYGRYGFSRQSKMEKAEDKKTALPAGLSATEKADAHEEDELRAAEEQRIQSLMTKMTAMANEESRLTASSVGQIVGLCSAEIKQIVSEYAEKQSELSAEESPEKLGTSQLHRRKVISLNKQIAQKTKHLEELRASHTSLQARYNEAKKTLTELKTYSEKLDKEQAALEKIESKADPSILQNLRALVAMNENLKSQEQEFKAHCREEMTRLQQEIENLKAERAPRGDEKTLSSGEPPGTLTSAMTHDEDLDRRYNMEKEKLYKIRLLQARRNREIAILHRKIDEVPSRAELIQYQKRFIELYRQISAVHKETKQFFTLYNTLDDKKVYLEKEISLLNSIHENFSQAMASPAARDQFLRQMEQIVEGIKQSRMKMEKKKQENKMRRDQLNDQYLELLEKQRLYFKTVKEFKEEGRKNEMLLSKVKAKAS

SEQ ID NO: 5152 - protein, 1131 aa, Homo sapiens
MRAVLTWRDKAEHCINDIAFKPDGTQLILAAGSRLLVYDTSDGTLLQPLKGHKDTVYCVAYAKDGLWSPEQKSVSKHKSSSKIICCSWTNDGQYLALGMFNGIISIRNKNGEEKVKIERPGGSLSPIWSICWNPSREERNDILAVADWGQKVSFYQLSGKQIGKDRALNFDPCCISYFTKGEYILLGGSDKQVSLFTKDGVRLGTVGEQNSWVWTCQAKPDSNYVVVGCQDGTISFYQLIFSTVHGLYKDRYAYRDSMTDVIVQHLITEQKVRIKCKELVKKIAIYRNRLAIQLPEKILIYELYSEDLSDMHYRVKEKIIKKFECNLLVVCANHIILCQEKRLQCLSFSGVKEREWQMESLIRYIKVIGGPPGREGLLVGLKNGQILKIFVDNLFAIVLLKQATAVRCLDMSASRKKLAVVDENDTCLVYDIDTKELLFQEPNANSVAWNTQCEDMLCFSGGGYLNIKASTFPVHRQKLQGFVVGYNGSKIFCLHVFSISAVEVPQSAPMYQYLDRKLFKEAYQIACLGVTDTDWRELAMEALEGLDFETAKKAFIRVQDLRYLELISSIEERKKRGETNNDLFLADVFSYQGKFHEAAKLYKRSGHENLALEMYTDLCMFEYAKDFLGSGDPKETKMLITKQADWARNIKEPKAAVEMYISAGEHVKAIEICGDHGWVDMLIDIARKLDKAEREPLLLCATYLKKLDSPGYAAETYLKMGDLKSLVQLHVETQRWDEAFALGEKHPEFKDDIYMPYAQWLAENDRFEEAQKAFHKAGRQREAVQVLEQLTNNAVAESRFNDAAYYYWMLSMQCLDIAQADPAQKDTMLGKFYHFQRLAELYHGYHAIHRHTEDPFSVHRPETLFNISRFLLHSLPKDTPSGISKVKILFTLAKQSKALGAYRLARHAYDKLRGLYIPARFQKSIELGTLTIRAKPFHDSEELVPLCYRCSTNNPLLNNLGNVCINCRQPFIFSASSYDVLHLVEFYLEEGITDEEAISLIDLEVLRPKRDDRQLEIANNSSQILRLVETKDSIGDEDPFTAKLSFEQGGSEFVPVVVSRLVLRSMSRRDVLIKRWPPPLRWQYFRSLLPDASITMCPSCFQMFHSEDYELLVLQHGCCPYCRRCKDDPGP

SEQ ID NO: 5153 - protein, 1188 aa, Homo sapiens
MGDMTNSDFYSKNQRNESSHGGEFGCTMEELRSLMELRGTEAVVKIKETYGDTEAICRRLKTSPVEGLPGTAPDLEKRKQIFGQNFIPPKKPKTFLQLVWEALQDVTLIILEIAAIISLGLSFYHPPGEGNEGCATAQGGAEDEGEAEAGWIEGAAILLSVICVVLVTAFNDWSKEKQFRGLQSRIEQEQKFTVVRAGQVVQIPVAEIVVGDIAQVKYGDLLPADGLFIQGNDLKIDESSLTGESDQVRKSVDKDPMLLSGTHVMEGSGRMLVTAVGVNSQTGIIFTLLGAGGEEEEKKDKKAADGAAASNAADSANASLVNGKMQDGNVDASQSKAKQQDGAAAMEMQPLKSAEGGDADDRKKASMHKKEKSVLQGKLTKLAVQIGKAGLVMSAITVIILVLYFTVDTFVVNKKPWLPECTPVYVQYFVKFFIIGVTVLVVAVPEGLPLAVTISLAYSVKKMMKDNNLVRHLDACETMGNATAICSDKTGTLTTNRMTVVQAYVGDVHYKEIPDPSSINTKTMELLINAIAINSAYTTKILPPEKEGALPRQVGNKTECGLLGFVLDLKQDYEPVRSQMPEEKLYKVYTFNSVRKSMSTVIKLPDESFRMYSKGASEIVLKKCCKILNGAGEPRVFRPRDRDEMVKKVIEPMACDGLRTICVAYRDFPSSPEPDWDNENDILNELTCICVVGIEDPVRPEVPEAIRKCQRAGITVRMVTGDNINTARAIAIKCGIIHPGEDFLCLEGKEFNRRIRNEKGEIEQERIDKIWPKLRVLARSSPTDKHTLVKGIIDSTHTEQRQVVAVTGDGTNDGPALKKADVGFAMGIAGTDVAKEASDIILTDDNFSSIVKAVMWGRNVYDSISKFLQFQLTVNVVAVIVAFTGACITQDSPLKAVQMLWVNLIMDTFASLALATEPPTETLLLRKPYGRNKPLISRTMMKNILGHAVYQLALIFTLLFVGEKMFQIDSGRNAPLHSPPSEHYTIIFNTFVMMQLFNEINARKIHGERNVFDGIFRNPIFCTIVLGTFAIQIVIVQFGGKPFSCSPLQLDQWMWCIFIGLGELVWGQVIATIPTSRLKFLKEAGRLTQKEEIPEEELNEDVEEIDHAERELRRGQILWFRGLNRIQTQIEVVNTFKSGASFQGALRRQSSVTSQSQDVANLSSPSRVSLSNALSSPTSLPPAAAGQG

SEQ ID NO: 5154 - protein, 415 aa, Homo sapiens
MTLAASSQRSQIIRSKFRSVLQLRIHRRNQEQISDPDPWISASDPPLAPALPSGTAPFLFSPGVLLPEPEYCPPWRSPKKESPKISQRWRESKPRGNLTYHQYMPPEPRQGSRADPQAEGSALGPPGPSLWEGTDSQQPHPRMKPSPLTPCPPGVPSPSPPPHKLELQTLKLEELTVSELRQQLRLRGLPVSGTKSMLLERMRGGAPPRERPKPRREDSPAGAPWPRLKPKALAAARRQGSVKPSAASHRPPLPRAADTPGTAPAPTPTPAPAAAPALTPSSGPGSAALTLEEELQEAIRRAQLLPNRGIDDILEDQVEPDDPLPPIPLDFPGSFDVLSPSPDSEGLSSVFSSSLPSPTNSSSPSPRDPTDSLDWLEALSGGPPLGSGPPPPSIFSADLSDSSSSRLWDLLEDPW

SEQ ID NO: 5155 - protein, 142 aa, Homo sapiens
MGAPTLPPAWQPFLKDHRISTFKNWPFLEGCACTPERMAEAGFIHCPTENEPDLAQCFFCFKELEGWEPDDDPIEEHKKHSSGCAFLSVKKQFEELTLGEFLKLDRERAKNKIAKETNNKKKEFEETAEKVRRAIEQLAAMD

SEQ ID NO: 5156 - protein, 1374 aa, Homo sapiens
MSSSFFNPSFAFSSHFDPDGAPLSELSWPSSLAVVAVSFSGLFAVIVLMLACLCCKKGGIGFKEFENAEGDEYAADLAQGSPATAAQNGPDVYVLPLTEVSLPMAKQPGRSVQLLKSTDVGRHSLLYLKEIGRGWFGKVFLGEVNSGISSAQVVVKELQASASVQEQMQFLEEVQPYRALKHSNLLQCLAQCAEVTPYLLVMEFCPLGDLKGYLRSCRVAESMAPDPRTLQRMACEVACGVLHLHRNNFVHSDLALRNCLLTADLTVKIGDYGLAHCKYREDYFVTADQLWVPLRWIAPELVDEVHSNLLVVDQTKSGNVWSLGVTIWELFELGTQPYPQHSDQQVLAYTVREQQLKLPKPQLQLTLSDRWYEVMQFCWLQPEQRPTAEEVHLLLSYLCAKGATEAEEEFERRWRSLRPGGGGVGPGPGAAGPMLGGVVELAAASSFPLLEQFAGDGFHADGDDVLTVTETSRGLNFEYKWEAGRGAEAFPATLSPGRTARLQELCAPDGAPPGVVPVLSAHSPSLGSEYFIRLEEAAPAAGHDPDCAGCAPSPPATADQDDDSDGSTAASLAMEPLLGHGPPVDVPWGRGDHYPRRSLARDPLCPSRSPSPSAGPLSLAEGGAEDADWGVAAFCPAFFEDPLGTSPLGSSGAPPLPLTGEDELEEVGARRAAQRGHWRSNVSANNNSGSRCPESWDPVSAGGHAEGCPSPKQTPRASPEPGYPGEPLLGLQAASAQEPGCCPGLPHLCSAQGLAPAPCLVTPSWTETASSGGDHPQAEPKLATEAEGTTGPRLPLPSVPSPSQEGAPLPSEEASAPDAPDALPDSPTPATGGEVSAIKLASALNGSSSSPEVEAPSSEDEDTAEATSGIFTDTSSDGLQARRPDVVPAFRSLQKQVGTPDSLDSLDIPSSASDGGYEVFSPSATGPSGGQPRALDSGYDTENYESPEFVLKEAQEGCEPQAFAELASEGEGPGPETRLSTSLSGLNEKNPYRDSAYFSDLEAEAEATSGPEKKCGGDRAPGPELGLPSTGQPSEQVCLRPGVSGEAQGSGPGEVLPPLLQLEGSSPEPSTCPSGLVPEPPEPQGPAKVRPGPSPSCSQFFLLTPVPLRSEGNSSEFQGPPGLLSGPAPQKRMGGPGTPRAPLRLALPGLPAALEGRPEEEEEDSEDSDESDEELRCYSVQEPSEDSEEEAPAVPVVVAESQSARNLRSLLKMPSLLSETFCEDLERKKKAVSFFDDVTVYLFDQESPTRELGEPFPGAKESPPTFLRGSPGSPSAPNRPQQADGSPNGSTAEEGGGFAWDDDFPLMTAKAAFAMALDPAAPAPAAPTPTPAPFSRFTVSPAPTSRFSITHVSDSDAESKRGPEAGAGGESKEA

SEQ ID NO: 5157 - protein, 1377 aa, Homo sapiens
MDEVEQDQHEARLKELFDSFDTTGTGSLGQEELTDLCHMLSLEEVAPVLQQTLLQDNLLGRVHFDQFKEALILILSRTLSNEEHFQEPDCSLEAQPKYVRGGKRYGRRSLPEFQESVEEFPEVTVIEPLDEEARPSHIPAGDCSEHWKTQRSEEYEAEGQLRFWNPDDLNASQSGSSPPQDWIEEKLQEVCEDLGITRDGHLNRKKLVSICEQYGLQNVDGEMLEEVFHNLDPDGTMSVEDFFYGLFKNGKSLTPSASTPYRQLKRHLSMQSFDESGRRTTTSSAMTSTIGFRVFSCLDDGMGHASVERILDTWQEEGIENSQEILKALDFSLDGNINLTELTLALENELLVTKNSIHQAALASFKAEIRHLLERVDQVVREKEKLRSDLDKAEKLKSLMASEVDDHHAAIERRNEYNLRKLDEEYKERIAALKNELRKEREQILQQAGKQRLELEQEIEKAKTEENYIRDRLALSLKENSRLENELLENAEKLAEYENLTNKLQRNLENVLAEKFGDLDPSSAEFFLQEERLTQMRNEYERQCRVLQDQVDELQSELEEYRAQGRVLRLPLKNSPSEEVEANSGGIEPEHGLGSEECNPLNMSIEAELVIEQMKEQHHRDICCLRLELEDKVRHYEKQLDETVVSCKKAQENMKQRHENETHTLEKQISDLKNEIAELQGQAAVLKEAHHEATCRHEEEKKQLQVKLEEEKTHLQEKLRLQHEMELKARLTQAQASFEREREGLQSSAWTEEKVRGLTQELEQFHQEQLTSLVEKHTLEKEELRKELLEKHQRELQEGRYESEKLQQENSILRNEITTLNEEDSISNLKLGTLNGSQEEMWQKTETVKQENAAVQKMVENLKKQISELKIKNQQLDLENTELSQKNSQNQEKLQELNQRLTEMLCQKEKEPGNSALEEREQEKFNLKEELERCKVQSSTLVSSLEAELSEVKIQTHIVQQENHLLKDELEKMKQLHRCPDLSDFQQKISSVLSYNEKLLKEKEALSEELNSCVDKLAKSSLLEHRIATMKQEQKSWEHQSASLKSQLVASQEKVQNLEDTVQNVNLQMSRMKSDLRVTQQEKEALKQEVMSLHKQLQNAGGKSWAPEIATHPSGLHNQQKRLSWDKLDHLMNEEQQLLWQENERLQTMVQNTKAELTHSREKVRQLESNLLPKHQKHLNPSGTMNPTEQEKLSLKRECDQFQKEQSPANRKVSQMNSLEQELETIHLENEGLKKKQVKLDEQLMEMQHLRSTATPSPSPHAWDLQLLQQQACPMVPREQFLQLQRQLLQAERINQHLQEELENRTSETNTPQGNQEQLVTVMEERMIEVEQKLKLVKRLLQEKVNQLKEQVSLPGHLCSPTSHSSFNSSFTSLYCH

SEQ ID NO: 5158 - protein, 572 aa, Homo sapiens
MDDDYEAYHSLFLSLLGLCPSKTPINENAPVFDPEPVIAHCFKQFQQKDFRLPQTRRRIIMVPRKEDQTPLNPASQPQAPPKPIPSFKVLEARDIQEQPEDRKTWLSQRSKLRQELESFGDVKRWLENKPSITPSEAKVLHMIHEEQSAQPNASQATTRTTRKKAPRLSRLSRQMVPQLQLPEPPALSVMYSYLHSRKIKILEIFHKVGQGENQRITREEFIAAVKAVGVPLKNQEVEDIVIYLSSLGKHNTITMDILANTYKQWSMAQQRSSLATAREHYILAKHRDSLKGPLKKQEVDSAPQLPKVDLLTVPAVDTQMETRPMTLEEMEEVGKRYRERQRQHKLTIPSIQYTEQCHLVRCGNRHFDEHCLPSTIHGDMRELIDSARRHNFLVYLQCWKLCKSYGLPLTEDILMKALLYPGDKIIFQMDKVCPIRQPGGYYSDWKVFSPNLALLRSQGPGKSKRTDKKTPKKSKKMRFKEFEEFTRKLKVKRSSGLQQTHPNSFWPGHLLDKLQLYLPTVATDRSLALFSCVQHQPHVYPATYHPDHWWPLRNKNYMTHAHYDAAKVYYIN

SEQ ID NO: 5159 - protein, 847 aa, Homo sapiens
MEALGPGGDRASPASSTSSLDLWHLSMRADSAYSSFSAASGGPEPRTQSPGTDLLPYLDWDYVRVVWGGPGPAPPDAALCTSPRPRPAVAARSGPQPTEVPGTPGPLNRQATPLLYALAAEAEAAAQAAEPPSPPASRAAYRQRLQGAQRRVLRETSFQRKELRMSLPARLRPTVPARPPATHPRSASLSHPGGEGEPARSRAPAPGTAGRGPLANQQRKWCFSEPGKLDRVGRGGGPARECLGEACSSSGLPGPEPLEFQHPALAKFEDHEVGWLPETQPQGSMNLDSGSLKLGDAFRPASRSRSASGEVLGSWGGSGGTIPIVQAVPQGAETPRPLFQTKLSRFLPQKEAAVMYPAELPQSSPADSEQRVSETCIVPAWLPSLPDEVFLEEAPLVRMRSPPDPHASQGPPASVHASDQPYGTGLGQRTGQVTVPTEYPLHECPGTAGADDCWQGVNGSVGISRPTSHTPTGTANDNIPTIDPTGLTTNPPTAAESDLLKPVPADALGLSGNDTPGPSHNTALARGTGQPGSRPTWPSQCLEELVQELARLDPSLCDPLASQPSPEPPLGLLDGLIPLAEVRAAMRPACGEAGEEAASTFEPGSYQFSFTQLLPAPREETRLENPATHPVLDQPCGQGLPAPNNSIQGKKVELAARLQKMLQDLHTEQERLQGEAQAWARRQAALEAAVRQACAPQELERFSRFMADLERVLGLLLLLGSRLARVRRALARAASDSDPDEQRLRLLQRQEEDAKELKEHVARRERAVREVLVRALPVEELRVYCALLAGKAAVLAQQRNLDERIRLLQDQLDAIRDDLGHHAPSPSPARPPGTCPPVQPPFPLLLT

SEQ ID NO: 5160 - protein, 413 aa, Homo sapiens
MLEMLEYNHYQVQTHLENPTKYHIQQAQRQQVKQYLSTTLANKHANQVLSLPCPNQPGDHVMPPVPGSSAPNSPMAMLTLNSNCEKEGFYKFEEQNRAESECPGMNTHSRASCMQMDDVIDDIISLESSYNEEILGLMDPALQMANTLPVSGNLIDLYGNQGLPPPGLTISNSCPANLPNIKRELTESEARALAKERQKKDNHNLIERRRRFNINDRIKELGTLIPKSNDPDMRWNKGTILKASVDYIRKLQREQQRAKELENRQKKLEHANRHLLLRIQELEMQARAHGLSLIPSTGLCSPDLVNRIIKQEPVLENCSQDLLQHHADLTCTTTLDLTDGTITFNNNLGTGTEANQAYSVPTKMGSKLEDILMDDTLSPVGVTDPLLSSVSPGASKTSSRRSSMSMEETEHTC

SEQ ID NO: 5161 - protein, 267 aa, Homo sapiens
MARFLTLCTWLLLLGPGLLATVRAECSQDCATCSYRLVRPADINFLACVMECEGKLPSLKIWETCKELLQLSKPELPQDGTSTLRENSKPEESHLLAKRYGGFMKRYGGFMKKMDELYPMEPEEEANGSEILAKRYGGFMKKDAEEDDSLANSSDLLKELLETGDNRERSHHQDGSDNEEEVSKRYGGFMRGLKRSPQLEDEAKELQKRYGGFMRRVGRPEWWMDYQKRYGGFLKRFAEALPSDEEGESYSKEVPEMEKRYGGFMRF

SEQ ID NO: 5162 - protein, 312 aa, Homo sapiens
MERVNETVVREVIFLGFSSLARLQQLLFVIFLLLYLFTLGTNAIIISTIVLDRALHIPMYFFLAILSCSEICYTFIIVPKMLVDLLSQKKTISFLGCAIQMFSFLFLGCSHSFLLAVMGYDRYIAICNPLRYSVLMGHGVCMGLVAAACACGFTVAQIITSLVFHLPFYSSNQLHHFFCDIAPVLKLASHHNHFSQIVIFMLCTLVLAIPLLLILVSYVHILSAILQFPSTLGRCKAFSTCVSHLIIVTVHYGCASFIYLRPQSNYSSSQDALISVSYTIITPLFNPMIYSLRNKEFKSALCKIVRRTISLL

SEQ ID NO: 5163 - protein, 250 aa, Homo sapiens
MRILQLILLALATGLVGGETRIIKGFECKPHSQPWQAALFEKTRLLCGATLIAPRWLLTAAHCLKPRYIVHLGQHNLQKEEGCEQTRTATESFPHPGFNNSLPNKDHRNDIMLVKMASPVSITWAVRPLTLSSRCVTAGTSCLISGWGSTSSPQLRLPHTLRCANITIIEHQKCENAYPGNITDTMVCASVQEGGKDSCQGDSGGPLVCNQSLQGIISWGQDPCAITRKPGVYTKVCKYVDWIQETMKNN

SEQ ID NO: 5164 - protein, 525 aa, Homo sapiens
MSGNWVHPGQILIWAIWVLAAPTKGPSAEGPQRNTRLGWIQGKQVTVLGSPVPVNVFLGVPFAAPPLGSLRFTNPQPASPWDNLREATSYPNLCLQNSEWLLLDQHMLKVHYPKFGVSEDCLYLNIYAPAHADTGSKLPVLVWFPGGAFKTGSASIFDGSALAAYEDVLVVVVQYRLGIFGFFTTWDQHAPGNWAFKDQVAALSWVQKNIEFFGGDPSSVTIFGESAGAISVSSLILSPMAKGLFHKAIMESGVAIIPYLEAHDYEKSEDLQVVAHFCGNNASDSEALLRCLRTKPSKELLTLSQKTKSFTRVVDGAFFPNEPLDLLSQKAFKAIPSIIGVNNHECGFLLPMKEAPEILSGSNKSLALHLIQNILHIPPQYLHLVANEYFHDKHSLTEIRDSLLDLLGDVFFVVPALITARYHREGATEEEKLLSRKMMKYWATFARTGNPNGNDLSLWPAYNLTEQYLQLDLNMSLGQRLKEPRVDFWTSTIPLILSASDMLHSPLSSLTFLSLLQPFFFFCAP

SEQ ID NO: 5165 - protein, 1091 aa, Homo sapiens
SLLGDDVFSTMAGLEEADAEVSGISEADPQALLQAMKDLDGMDADILGLKKSNSAPSKKAAKDPGKGELPNHPKPAGGAIPTKKSLPSPSSSGHQNRRFSSEDLEDPLRGLLSYDEGGITKQPPVTQSKTASDKSPSTVRDQGPSIPLTPGDTPIRKKEELLFDDGDDIMATLGFGDSPKAEKRQIGDQEGPRPARSTLDELLGRGMATKLLARPGTGEHREFKLDKKYQRPQDSEDMWGDEDFTFGAYQPTVVSSEGRQSRRQSVRFFADSGADPKGEPGSKQSPPMASSPIQPRKGGADWLGLKDEDLDLFPASPTREAHRESSVPVTPSVPPPASQHSTPAGLPPSRAKPPTEGAGSPAKASQASKLRASKEEKEDWLSHALSRKKSQGLAREQHAGTSEGLHLAGTAGHPPSGSQPLTSTQGLEHAAAGGSSGTTARERPCVRPGVSGSPVTQNHAASALPTGSPKRGTAPGDLSATEPATCFPSTQKPTEPSVPVQPLLPESLARSLLPSTEYQKQLLAAQVQLQCSPAELQAELLHSQARLAELEAQVRKLELERAQHELLLGSLQQQHQADLELIESAHRSRIKVLETSYQQREERLRRENEELSARYLSQCQEAEQARAELTAQHQRRLAAIAQEKDQEMERLRELQRASILDMRRDHEEQLQRLKLLKDREVDAATSATSHTRSLNSIIHQMEKFSSSLHELSSRVEASHLTTSQERELGIRQRDEQLRALQERLGQQQRDMEEERSRQQEVIGKMEARLNEQSRLLEQERWRVTAEQSKAESMQRALEEQRKVTAQQMAMERAELERAKSALLEEQKSVMLKCGEERRRLAAEWAEFSAQQKLSKERAEREAERALQVDTQREGTLISLAKEQAELKIRASELRAEEKQLAAERAALEQERQELRLEKERINATALRVKLRAEEVESMSKVASEKYEEGERALREAQQVQAEQQARLQAVQQQQERLRKQEQHMHQEHLSLAQQRLQLDRARQDLPSSLVGLFPRAQGPAASSQSALMPPAPTTRWCSQPPTGLDPSPLHLHARLALLRHMAEQDRDFLENEQFFLETLKKGSYNLTSHSA

SEQ ID NO: 5166 - protein, 1197 aa, Homo sapiens
MGRSGKLPSGVSAKLKRWKKGHSSDSNPAICRHRQAARSRFFSRPSGRSDLTVDAVKLHNELQSGSLRLGKSEAPETPMEEEAELVLTEKSSGTFLSGLSDCTNVTFSKVQRFWESNSAAHKEICAVLAAVTEVIRSQGGKETETEYFAALIRKAAQHGVCSVLKGSEFMFEKAPAHHPAAISTAKFCIQEIEKSGGSKEATTTLHMLTLLKDLLPCFPEGLVKSCSETLLRVMTLSHVLVTACAMQAFHSLFHARPGLSTLSAELNAQIITALYDYVPSENDLQPLLAWLKVMEKAHINLVRLQWDLGLGHLPRFFGTAVTCLLSPHSQVLTAATQSLKEILKECVAPHMADIGSVTSSASGPAQSVAKMFRAVEEGLTYKFHAAWSSVLQLLCVFFEACGRQAHPVMRKCLQSLCDLRLSPHFPHTAALDQAVGAAVTSMGPEVVLQAVPLEIDGSEETLDFPRSWLLPVIRDHVQETRLGFFTTYFLPLANTLKSKAMDLAQAGSTVESKIYDTLQWQMWTLLPGFCTRPTDVAISFKGLARTLGMAISERPDLRVTVCQALRTLITKGCQAEADRAEVSRFAKNFLPILFNLYGQPVAAGDTPAPRRAVLETIRTYLTITDTQLVNSLLEKASEKVLDPASSDFTRLSVLDLVVALAPCADEAAISKLYSTIRPYLESKAHGVQKKAYRVLEEVCASPQGPGALFVQSHLEDLKKTLLDSLRSTSSPAKRPRLKCLLHIVRKLSAEHKEFITALIPEVILCTKEVSVGARKNAFALLVEMGHAFLRFGSNQEEALQCYLVLIYPGLVGAVTMVSCSILALTHLLFEFKGLMGTSTVEQLLENVCLLLASRTRDVVKSALGFIKVAVTVMDVAHLAKHVQLVMEAIGKLSDDMRRHFRMKLRNLFTKFIRKFGFELVKRLLPEEYHRVLVNIRKAEARAKRHRALSQAAVEEEEEEEEEEEPAQGKGDSIEEILADSEDEEDNEEEERSRGKEQRKLARQRSRAWLKEGGGDEPLNFLDPKVAQRVLATQPGPGRGRKKDHGFKVSADGRLIIREEADGNKMEEEEGAKGEDEEMADPMEDVIIRNKKHQKLKHQKEAEEEELEIPPQYQAGGSGIHRPVAKKAMPGAEYKAKKAKGDVKKKGRPDPYAYIPLNRSKLNRRKKMKLQGQFKGLVKAARRGSQVGHKNRRKDRRP

SEQ ID NO: 5167 - protein, 735 aa, Homo sapiens
MEDAGGGEETPAPEAPHPPQLAPPEEQGLLFQEETIDLGGDEFGSEENETASEGSSPLADKLNEHMMESVLISDSPNSEGDAGDLGRVRDEAEPGGEGDPGPEPAGTPSPSGEADGDCAPEDAAPSSGGAPRQDAAREVPGSEAARPEQEPPVAEPVPVCTIFSQRAPPASGDGFEPQMVKSPSFGGASEASARTPPQVVQPSPSLSTFFGDTAASHSLASDFFDSFTTSAFISVSNPGAGSPAPASPPPLAVPGTEGRPEPVAMRGPQAAAPPASPEPFAHIQAVFAGSDDPFATALSMSEMDRRNDAWLPGEATRGVLRAVATQQRGAVFVDKENLTMPGLRFDNIQGDAVKDLMLRFLGEKAAAKRQVLNADSVEQSFVGLKQLISCRNWRAAVDLCGRLLTAHGQGYGKSGLLTSHTTDSLQLWFVRLALLVKLGLFQNAEMEFEPFGNLDQPDLYYEYYPHVYPGRRGSMVPFSMRILHAELQQYLGNPQESLDRLHKVKTVCSKILANLEQGLAEDGGMSSVTQEGRQASIRLWRSRLGRVMYSMANCLLLMKDYVLAVEAYHSVIKYYPEQEPQLLSGIGRISLQIGDIKTAEKYFQDVEKVTQKLDGLQGKIMVLMNSAFLHLGQNNFAEAHRFFTEILRMDPRNAVANNNAAVCLLYLGKLKDSLRQLEAMVQQDPRHYLHESVLFNLTTMYELESSRSMQKKQALLEAVAGKEGDSFNTQCLKLA

SEQ ID NO: 5168 - protein, 384 aa, Homo sapiens
MAGAEWKSLEECLEKHLPLPDLQEVKRVLYGKELRKLDLPREAFEAASREDFELQGYAFEAAEEQLRRPRIVHVGLVQNRIPLPANAPVAEQVSALHRRIKAIVEVAAMCGVNIICFQEAWTMPFAFCTREKLPWTEFAESAEDGPTTRFCQKLAKNHDMVVVSPILERDSEHGDVLWNTAVVISNSGAVLGKTRKNHIPRVGDFNESTYYMEGNLGHPVFQTQFGRIAVNICYGRHHPLNWLMYSINGAEIIFNPSATIGALSESLWPIEARNAAIANHCFTCAINRVGTEHFPNEFTSGDGKKAHQDFGYFYGSSYVAAPDSSRTPGLSRSRDGLLVAKLDLNLCQQVNDVWNFKMTGRYEMYARELAEAVKSNYSPTIVKE

SEQ ID NO: 5169 - protein, 1063 aa, Homo sapiens
MECPSCQHVSKEETPKFCSQCGERLPPAAPIADSENNNSTMASASEGEMECGQELKEEGGPCLFPGSDSWQENPEEPCSKASWTVQESKKKKRKKKKKGNKSASSELASLPLSPASPCHLTLLSNPWPQDTALPHSQAQQSGPTGQPSQPPGTATTPLEGDGLSAPTEVGDSPLQAQALGEAGVATGSEAQSSPQFQDHTEGEDQDASIPSGGRGLSQEGTGPPTSAGEGHSRTEDAAQELLLPESKGGSSEPGTELQTTEQQAGASASMAVDAVAEPANAVKGAGKEMKEKTQRMKQPPATTPPFKTHCQEAETKTKDEMAAAEEKVGKNEQGEPEDLKKPEGKNRSAAAVKNEKEQKNQEADVQEVKASTLSPGGGVTVFFHAIISLHFPFNPDLHKVFIRGGEEFGESKWDSNICELHYTRDLGHDRVLVEGIVCISKKHLDKYIPYKYVIYNGESFEYEFIYKHQQKKGEYVNRCLFIKSSLLGSGDWHQYYDIVYMKPHGRLQKVMNHITDGPRKDLVKGKQIAAALMLDSTFSILQTWDTINLNSFFTQFEQFCFVLQQPMIYEGQAQLWTDLQYREKEVKRYLWQHLKKHVVPLPDGKSTDFLPVDCPVRSKLKTGLIVLFVVEKIELLLEGSLDWLCHLLTSDASSPDEFHRDLSHILGIPQSWRLYLVNLCQRCMDTRTYTWLGALPVLHCCMELAPRHKDAWRQPEDTWAALEGLSFSPFREQMLDTSSLLQFMREKQHLLSIDEPLFRSWFSLLPLSHLVMYMENFIEHLGRFPAHILDCLSGIYYRLPGLEQVLNTQDVQDVQNVQNILEMLLRLLDTYRDKIPEEALSPSYLTVCLKLHEAICSSTKLLKFYELPALSAEIVCRMIRLLSLVDSAGQRDETGNNSVQTVFQGTLAATKRWLREVFTKNMLTSSGASFTYVKEIEVWRRLVEIQFPAEHGWKESLLGDMEWRLTKEEPLSQITAYCNSCWDTKGLEDSVAKTFEKCIIEAVSSACQVNNLSSWETDSGSQLCSAMTQLRAMKHPLGLSSSANSEIGKWAPSSLAKGNGAEI

SEQ ID NO: 5170 - protein, 531 aa, Homo sapiens
MELQSRPEALAVELARHQNGDLKKQLHERQPRIAALSDKQALGTITAVPVTGPQVSSLQRLAGQGAAVLPQVRPKTLIPDSLPVAPGRDRPPKQPPTFQKATVVSVKNPSPALPTANNTVSHVPAPGSQPQALAEPAALASPLSSAGVAYAIISTSPSNAAAMAPSTAVSVVSDSIKVQPLLISADNKPPPRLLSSPHPATHHCPLHPSSLPLTPPSPSLSPSPLHGIFQVIIIQPQVQTQPESTAESRPPTEEPSQGAQATKKKKEDRPPTQENPEKIAFMVALGLVTTEHLEEIQSKRQERKRRSTANPAYSGLLETERKRLASNYLNNPLFLTARANEDPCWKNEITHDEHCAACKRGANLQPCGTCPGAYHLSCLEPPLKTAPKGVWVCPRCQQKALKKDEGVPWTGMLAIVHSYVTHKTVKEEEKQKLLQRGSELQNEHQQLEERDRRLASAVQKCLELKTSLLARQRGTQSSLDRLRALLRLIQGEQLLQVTMTTTSPAPLLAGPWTKPSVAATHPTVQHPQGHN

SEQ ID NO: 5171 - protein, 498 aa, Homo sapiens
MALPTLPSYWCSQQRLNQQLARQREQEARLRQQWEQNSRYFRMSDICSSKQAEWSSKTSYQRSMHAYQREKMKEEKRRSLEARREKLRQLMQEEQDLLARELEELRLSMNLQERRIREQHGKLKSAKEEQRKLIAEQLLYEHWKKNNPKLREMELDLHQKHVVNSWEMQKEEKKQQEATAEQENKRYENEYERARREALERMKAEEERRQLEDKLQAEALLQQMEELKLKEVEATKLKKEQENLLKQRWELERLEEERKQMEAFRQKAELGRFLRHQYNAQLSRRTQQIQEELEADRRILQALLEKEDESQRLHLARREQVMADVAWMKQAIEEQLQLERAREAELQMLLREEAKEMWEKREAEWARERSARDRLMSEVLTGRQQQIQEKIEQNRRAQEESLKHREQLIRNLEEVRELARREKEESEKLKSARKQELEAQVAERRLQAWEADQQEEEEEEEARRVEQLSDALLQQEAETMAEQGYRPKPYGHPKIAWN

SEQ ID NO: 5172 - protein, 491 aa, Homo sapiens
MPGARDALCHQALQLLAELCARGALEHDSCQDFIYHLRDRARPRLRDPDISVSLLTLVVTACGLALFGVSLFVSWKLCWVPWRERGLPSGSKDNNQEPLNYMDTETNEQENSEDFLDPPTPCPDSSMKISHTSPDIPLSTQTGIQENCAHGVRVQRQVTEPTSSARHNSIRRQLNLSNPDFNIQQLQKQEQLTGIGRIKPELYKQRSLDNDDGRRSNSKACGKLNFILKYDCDLEQLIVKIHKAVNLPAKDFSGTSDPYVKIYLLPDRKTKHQTKVHRKTLNPVFDEVFLFPVPYNDLEARKLHFSVYDFDRFSRHDLIGQVVVDHFLDLADFPRECILWKDIEYVTNDNVDLGELMFSLCYLPTAGRLTITIIKARNLKAMDITGASDPYVKVSLMCDGRRLKKRKTSTKRNTLNPVYNEAIVFDVPPENIDQIHLSIAVMDYDRVGHNEIIGVCQVGNEAERLGRDHWSEMLSYPRKPIAHWHSLVEKR

SEQ ID NO: 5173 - protein, 572 aa, Homo sapiens
MAAPRPSPAISVSVSAPAFYAPQKKFGPVVAPKPKVNPFRPGDSEPPPAPGAQRAQMGRVGEIPPPPPEDFPLPPPPLAGDGDDAEGALGGAFPPPPPPIEESFPPAPLEEEIFPSPPPPPEEEGGPEAPIPPPPQPREKVSSIDLEIDSLSSLLDDMTKNDPFKARVSSGYVPPPVATPFSSKSSTKPAAGGTAPLPPWKSPSSSQPLPQVPAPAQSQTQFHVQPQPQPKPQVQLHVQSQTQPVSLANTQPRGPPASSPAPAPKFSPVTPKFTPVASKFSPGAPGGSGSQPNQKLGHPEALSAGTGSPQPPSFTYAQQREKPRVQEKQHPVPPPAQNQNQVRSPGAPGPLTLKEVEELEQLTQQLMQDMEHPQRQNVAVNELCGRCHQPLARAQPAVRALGQLFHIACFTCHQCAQQLQGQQFYSLEGAPYCEGCYTDTLEKCNTCGEPITDRMLRATGKAYHPHCFTCVVCARPLEGTSFIVDQANRPHCVPDYHKQYAPRCSVCSEPIMPEPGRDETVRVVALDKNFHMKCYKCEDCGKPLSIEADDNGCFPLDGHVLCRKCHTARAQT

SEQ ID NO: 5174 - protein, 462 aa, Homo sapiens
MLCDEEAQKRKAKESGMALPQGRLTFMDVAIEFSQEEWKSLDPGQRALYRDVMLENYRNLVFLGICLPDLSIISMLKQRREPLILQSQVKIVKNTDGRECVRSVNTGRSCVLGSNAENKPIKNQLGLTLEAHLSELQLFQAGRKIYRSNQVEKFTNHRSSVSPLQKISSSFTTHIFNKYRNDLIDFPLLPQEEKAYIRGKSYEYECSEDGEVFRVRASLTNHQVIHTAEKPYKCTECGKVFSRNSHLVEHWRIHTGQKPYKCSECDKVFNRNSNLARHQRIHTGEKPHKCNECGKAFRECSGLTTHLVIHTGEKPYKCNECGKNFRHKFSLTNHQRSHTAEKPYKCNECGKVFSLLSYLARHQIIHSTEKPYKCNECGRAFHKRPGLMAHLLIHTGEKPYKCNECDKVFGRKLYLTNHQRIHTGERPYKCNACGKVFNQNPHLSRHRKIHAGENSLRTLQME

SEQ ID NO: 5175 - protein, 504 aa, Homo sapiens
MEALRVQMFMPCSFESLYLSSAEHPGASKPPISSSSMTSRILLRQQLMREQMQEQERREQQQKLQAAQFMQQRVPVSQTPAINVSVPTTLPSATQVPMEVLKVQTHLENPTKYHIQQAQRQQVKQYLSTTLANKHANQVLSLPCPNQPGDHVMPPVPGSSAPNSPMAMLTLNSNCEKEGFYKFEEQNRAESECPGMNTHSRASCMQMDDVIDDIISLESSYNEEILGLMDPALQMANTLPVSGNLIDLYGNQGLPPPGLTISNSCPANLPNIKRELTESEARALAKERQKKDNHNLIERRRRFNINDRIKELGTLIPKSNDPDMRWNKGTILKASVDYIRKLQREQQRAKELENRQKKLEHANRHLLLRIQELEMQARAHGLSLIPSTGLCSPDLVNRIIKQEPVLENCSQDLLQHHADLTCTTTLDLTDGTITFNNNLGTGTEANQAYSVPTKMGSKLEDILMDDTLSPVGVTDPLLSSVSPGASKTSSRRSSMSMEETEHTC

SEQ ID NO: 5176 - protein, 2146 aa, Homo sapiens
MYPNWGRYGGSSHYPPPPVPPPPPVALPEASPGPGYSSSTTPAAPSSSGFMSFREQHLAQLQQLQQMHQKQMQCVLQPHHLPPPPLPPPPVMPGGGYGDWQPPPPPMPPPPGPALSYQKQQQYKHQMLHHQRDGPPGLVPMELESPPESPPVPPGSYMPPSQSYMPPPQPPPSYYPPTSSQPYLPPAQPSPSQSPPSQSYLAPTPSYSSSSSSSQSYLSHSQSYLPSSQASPSRPSQGHSKSQLLAPPPPSAPPGNKTTVQQEPLESGAKNKSTEQQQAAPEPDPSTMTPQEQQQYWYRQHLLSLQQRTKVHLPGHKKGPVVAKDTPEPVKEEVTVPATSQVPESPSSEEPPLPPPNEEVPPPLPPEEPQSEDPEEDARLKQLQAAAAHWQQHQQHRVGFQYQGIMQKHTQLQQILQQYQQIIQPPPHIQTMSVDMQLRHYEMQQQQFQHLYQEWEREFQLWEEQLHSYPHKDQLQEYEKQWKTWQGHMKATQSYLQEKVNSFQNMKNQYMGNMSMPPPFVPYSQMPPPLPTMPPPVLPPSLPPPVMPPALPATVPPPGMPPPVMPPSLPTSVPPPGMPPSLSSAGPPPVLPPPSLSSAGPPPVLPPPSLSSTAPPPVMPLPPLSSATPPPGIPPPGVPQGIPPQLTAAPVPPASSSQSSQVPEKPRPALLPTPVSFGSAPPTTYHPPLQSAGPSEQVNSKAPLSKSALPYSSFSSDQGLGESSAAPSQPITAVKDMPVRSGGLLPDPPRSSYLESPRGPRFDGPRRFEDLGSRCEGPRPKGPRFEGNRPDGPRPRYEGHPAEGTKSKWGMIPRGPASQFYITPSTSLSPRQSGPQWKGPKPAFGQQHQQQPKSQAEPLSGNKEPLADTSSNQQKNFKMQSAAFSIAADVKDVKAAQSNENLSDSQQEPPKSEVSEGPVEPSNWDQNVQSMETQIDKAQAVTQPVPLANKPVPAQSTFPSKTGGMEGGTAVATSSLTADNDFKPVGIGLPHSENNQDKGLPRPDNRDNRLEGNRGNSSSYRGPGQSRMEDTRDKGLVNRGRGQAISRGPGLVKQEDFRDKMMGRREDSREKMNRGEGSRDRGLVRPGSSREKVPGGLQGSQDRGAAGSRERGPPRRAGSQERGPLRRAGSRERIPPRRAGSRERGPPRGPGSRERGLGRSDFGRDRGPFRPEPGDGGEKMYPYHRDEPPRAPWNHGEERGHEEFPLDGRNAPMERERLDDWDRERYWRECERDYQDDTLELYNREDRFSAPPSRSHDGDRRGPWWDDWERDQDMDEDYNREMERDMDRDVDRISRPMDMYDRSLDNEWDRDYGRPLDEQESQFRERDIPSLPPLPPLPPLPPLDRYRDDRWREERNREHGYDRDFRDRGELRIREYPERGDTWREKRDYVPDRMDWERERLSDRWYPSDVDRHSPMAEHMPSSHHSSEMMGSDASLDSDQGLGGVMVLSQRQHEIILKAAQELKMLREQKEQLQKMKDFGSEPQMADHLPPQESRLQNTSSRPGMYPPPGSYRPPPPMGKPPGSIVRPSAPPARSSVPVTRPPVPIPPPPPPPPLPPPPPVIKPQTSAVEQERWDEDSFYGLWDTNDEQGLNSEFKSETAAIPSAPVLPPPPVHSSIPPPGPVPMGMPPMSKPPPVQQTVDYGHGRDISTNKVEQIPYGERITLRPDPLPERSTFETEHAGQRDRYDRERDREPYFDRQSNVIADHRDFKRDRETHRDRDRDRGVIDYDRDRFDRERRPRDDRAQSYRDKKDHSSSRRGGFDRPSYDRKSDRPVYEGPSMFGGERRTYPEERMPLPAPSLSHQPPPAPRVEKKPESKNVDDILKPPGRESRPERIVVIMRGLPGSGKTHVAKLIRDKEVEFGGPAPRVLSLDDYFITEVEKEEKDPDSGKKVKKKVMEYEYEAEMEETYRTSMFKTFKKTLDDGFFPFIILDAINDRVRHFDQFWSAAKTKGFEVYLAEMSADNQTCGKRNIHGRKLKEINKMADHWETAPRHMMRLDIRSLLQDAAIEEVEMEDFDANIEEQKEEKKDAEEEESELGYIPKSKWEMDTSEAKLDKLDGLRTGTKRKRDWEAIASRMEDYLQLPDDYDTRASEPGKKRVRWADLEEKKDADRKRAIGFVVGQTDWEKITDESGHLAEKALNRTKYI

SEQ ID NO: 5177 - protein, 1187 aa, Homo sapiens
MRPRGAAFAAGPPGDLHLGTAIGFAGAIWRSRSPAMSTLLDIKSSVLRQVQVCPSFRRRTEQDPGSASADPQEPATGAWKPGDGVEFFAHMRLMLKKGEGRQGLPCLEVPLRSGSPAPPEPVDPSLGLRALAPEEVEMLYEEALYTVLYRAGTMGPDQVDDEEALLSYLQQVFGTSLEEHTEAIERVRKAKAPTYALKVSVMRAKNLLAKDPNGFSDPYCMLGILPASDATREPRAQKEQRFGFRKGSKRGGPLPAKCIQVTEVKSSTLNPVWKEHFLFEIEDVSTDQLHLDIWDHDDDVSLVEACRKLNEVIGLKGMGRYFKQIVKSARANGTAGPTEDHTDDFLGCLNIPVREVPVAGVDRWFKLEPRSSASRVQGHCHLVLKLITTQRDTAMSQRGRSGFLSHLLLLSHLLRLEHSAEEPNSSSWRGELSTPAATILCLHGAQSNLSPLQLAVLHWQVSSRHHQTCTLDYSYLLGLLEDMQAHWEEAPSLPQEQEESLADSLSAFSEFGLQLLRQLRDYFPATNSTAVHRLELLLKCLGKLQLFQPSFEICPFESELNMDIAAALKRGNREWYDRILNDKSPREQPGPQRLPGLVVLADAVYDDLQFCYSVYASLFHSILNVDVFTLTFRQLERLVAEEAWVLTEELSPKMTLEVASGLFELYLTLADLQRFWDSIPGRDSRSLALAGIHAPFLPAVKLWFQVLRDQAKWRLQGAVDMDTLEPVDASSRHSSSAATAGLCLSHIQELWVRLAWPDPAQAQGLGTQLGQDVCEATLFYTELLRKKVDTQPGAAGEAVSEALCVVLNNVELVRKAAGQALKGLAWPEGATGPEGVLPRPLLSCTQALDDDLQREAHTVTAHLTSKMVGDIRKYVQHISLSPDSIQNDEAVAPLMKYLDEKLALLNASLVKGNLSRVLEALWELLLQAILQALGANRDVSADFYSRFHFTLEALVSFFHAEGQGLPLESLRDGSYKRLKEELRLHKCSTRECIEQFYLDKLKQRTLEQNRFGRLSVRCHYEAAEQRLAVEVLHAADLLPLDANGLSDPFVIVELGPPHLFPLVRSQRTQVKTRTLHPVYDELFYFSVPAEACRRRAACVLFTVMDHDWLSTNDFAGEAALGLGGVTGVARPQVGGGARAGQPVTLHLCRPRAQVRSALRRLEGRTSKEAQEFVKKLKELEKCMEADP

SEQ ID NO: 5178 - protein, 1006 aa, Homo sapiens
MAEQESLEFGKADFVLMDTVSMPEFMANLRLRFEKGRIYTFIGEVVVSVNPYKLLNIYGRDTIEQYKGRELYERPPHLFAIADAAYKAMKRRSKDTCIVISGESGAGKTEASKYIMQYIAAITNPSQRAEVERVKNMLLKSNCVLEAFGNAKTNRNDNSSRFGKYMDINFDFKGDPIGGHINNYLLEKSRVIVQQPGERSFHSFYQLLQGGSEQMLRSLHLQKSLSSYNYIHVGAQLKSSINDAAEFRVVADAMKVIGFKPEEIQTVYKILAAILHLGNLKFVVDGDTPLIENGKVVSIIAELLSTKTDMVEKALLYRTVATGRDIIDKQHTEQEASYGRDAFAKAIYERLFCWIVTRINDIIEVKNYDTTIHGKNTVIGVLDIYGFEIFDNNSFEQFCINYCNEKLQQLFIQLVLKQEQEEYQREGIPWKHIDYFNNQIIVDLVEQQHKGIIAILDDACMNVGKVTDEMFLEALNSKLGKHAHFSSRKLCASDKILEFDRDFRIRHYAGDVVYSVIGFIDKNKDTLFQDFKRLMYNSSNPVLKNMWPEGKLSITEVTKRPLTAATLFKNSMIALVDNLASKEPYYVRCIKPNDKKSPQIFDDERCRHQVEYLGLLENVRVRRAGFAFRQTYEKFLHRYKMISEFTWPNHDLPSDKEAVKKLIERCGFQDDVAYGKTKIFIRTPRTLFTLEELRAQMLIRIVLFLQKVWRGTLARMRYKRTKAALTIIRYYRRYKVKSYIHEVARRFHGVKTMRDYGKHVKWPSPPKVLRRFEEALQTIFNRWRASQLIKSIPASDLPQVRAKVAAVEMLKGQRADLGLQRAWEGNYLASKPDTPQTSGTFVPVANELKRKDKYMNVLFSCHVRKVNRFSKVEDRAIFVTDRHLYKMDPTKQYKVMKTIPLYNLTGLSVSNGKDQLVVFHTKDNKDLIVCLFSKQPTHESRIGELVGVLVNHFKSEKRHLQVNVTNPVQCSLHGKKCTVSVETRLNQPQPDFTKNRSGFILSVPGN

SEQ ID NO: 5179 - protein, 3333 aa, Homo sapiens
MAAAARPRGRALGPVLPPTPLLLLVLRVLPACGATARDPGAAAGLSLHPTYFNLAEAARIWATATCGERGPGEGRPQPELYCKLVGGPTAPGSGHTIQGQFCDYCNSEDPRKAHPVTNAIDGSERWWQSPPLSSGTQYNRVNLTLDLGQLFHVAYILIKFANSPRPDLWVLERSVDFGSTYSPWQYFAHSKVDCLKEFGREANMAVTRDDDVLCVTEYSRIVPLENGEVVVSLINGRPGAKNFTFSHTLREFTKATNIRLRFLRTNTLLGHLISKAQRDPTVTRRYYYSIKDISIGGQCVCNGHAEVCNINNPEKLFRCECQHHTCGETCDRCCTGYNQRRWRPAAWEQSHECEACNCHGHASNCYYDPDVERQQASLNTQGIYAGGGVCINCQHNTAGVNCEQCAKGYYRPYGVPVDAPDGCIPCSCDPEHADGCEQGSGRCHCKPNFHGDNCEKCAIGYYNFPFCLRIPIFPVSTPSSEDPVAGDIKGCDCNLEGVLPEICDAHGRCLCRPGVEGPRCDTCRSGFYSFPICQACWCSALGSYQMPCSSVTGQCECRPGVTGQRCDRCLSGAYDFPHCQGSSSACDPAGTINSNLGYCQCKLHVEGPTCSRCKLLYWNLDKENPSGCSECKCHKAGTVSGTGECRQGDGDCHCKSHVGGDSCDTCEDGYFALEKSNYFGCQGCQCDIGGALSSMCSGPSGVCQCREHVVGKVCQRPENNYYFPDLHHMKYEIEDGSTPNGRDLRFGFDPLAFPEFSWRGYAQMTSVQNDVRITLNVGKSSGSLFRVILRYVNPGTEAVSGHITIYPSWGAAQSKEIIFLPSKEPAFVTVPGNGFADPFSITPGIWVACIKAEGVLLDYLVLLPRDYYEASVLQLPVTEPCAYAGPPQENCLLYQHLPVTRFPCTLACEARHFLLDGEPRPVAVRQPTPAHPVMVDLSGREVELHLRLRIPQVGHYVVVVEYSTEAAQLFVVDVNVKSSGSVLAGQVNIYSCNYSVLCRSAVIDHMSRIAMYELLADADIQLKGHMARFLLHQVCIIPIEEFSAEYVRPQVHCIASYGRFVNQSATCVSLAHETPPTALILDVLSGRPFPHLPQQSSPSVDVLPGVTLKAPQNQVTLRGRVPHLGRYVFVIHFYQAAHPTFPAQVSVDGGWPRAGSFHASFCPHVLGCRDQVIAEGQIEFDISEPEVAATVKVPEGKSLVLVRVLVVPAENYDYQILHKKSMDKSLEFITNCGKNSFYLDPQTASRFCKNSARSLVAFYHKGALPCECHPTGATGPHCSPEGGQCPCQPNVIGRQCTRCATGHYGFPRCKPCSCGRRLCEEMTGQCRCPPRTVRPQCEVCETHSFSFHPMAGCEGCNCSRRGTIEAAMPECDRDSGQCRCKPRITGRQCDRCASGFYRFPECVPCNCNRDGTEPGVCDPGTGACLCKENVEGTECNVCREGSFHLDPANLKGCTSCFCFGVNNQCHSSHKRRTKFVDMLGWHLETADRVDIPVSFNPGSNSMVADLQELPATIHSASWVAPTSYLGDKVSSYGGYLTYQAKSFGLPGDMVLLEKKPDVQLTGQHMSIIYEETNTPRPDRLHHGRVHVVEGNFRHASSRAPVSREELMTVLSRLADVRIQGLYFTETQRLTLSEVGLEEASDTGSGRIALAVEICACPPAYAGDSCQGCSPGYYRDHKGLYTGRCVPCNCNGHSNQCQDGSGICVNCQHNTAGEHCERCQEGYYGNAVHGSCRACPCPHTNSFATGCVVNGGDVRCSCKAGYTGTQCERCAPGYFGNPQKFGGSCQPCSCNSNGQLGSCHPLTGDCINQEPKDSSPAEECDDCDSCVMTLLNDLATMGEQLRLVKSQLQGLSASAGLLEQMRHMETQAKDLRNQLLNYRSAISNHGSKIEGLERELTDLNQEFETLQEKAQVNSRKAQTLNNNVNRATQSAKELDVKIKNVIRNVHILLKQISGTDGEGNNVPSGDFSREWAEAQRMMRELRNRNFGKHLREAEADKRESQLLLNRIRTWQKTHQGENNGLANSIRDSLNEYEAKLSDLRARLQEAAAQAKQANGLNQENERALGAIQRQVKEINSLQSDFTKYLTTADSSLLQTNIALQLMEKSQKEYEKLAASLNEARQELSDKVRELSRSAGKTSLVEEAEKHARSLQELAKQLEEIKRNASGDELVRCAVDAATAYENILNAIKAAEDAANRAASASESALQTVIKEDLPRKAKTLSSNSDKLLNEAKMTQKKLKQEVSPALNNLQQTLNIVTVQKEVIDTNLTTLRDGLHGIQRGDIDAMISSAKSMVRKANDITDEVLDGLNPIQTDVERIKDTYGRTQNEDFKKALTDADNSVNKLTNKLPDLWRKIESINQQLLPLGNISDNMDRIRELIQQARDAASKVAVPMRFNGKSGVEVRLPNDLEDLKGYTSLSLFLQRPNSRENGGTENMFVMYLGNKDASRDYIGMAVVDGQLTCVYNLGDREAELQVDQILTKSETKEAVMDRVKFQRIYQFARLNYTKGATSSKPETPGVYDMDGRNSNTLLNLDPENVVFYVGGYPPDFKLPSRLSFPPYKGCIELDDLNENVLSLYNFKKTFNLNTTEVEPCRRRKEESDKNYFEGTGYARVPTQPHAPIPTFGQTIQTTVDRGLLFFAENGDRFISLNIEDGKLMVRYKLNSELPKERGVGDAINNGRDHSIQIKIGKLQKRMWINVDVQNTIIDGEVFDFSTYYLGGIPIAIRERFNISTPAFRGCMKNLKKTSGVVRLNDTVGVTKKCSEDWKLVRSASFSRGGQLSFTDLGLPPTDHLQASFGFQTFQPSGILLDHQTWTRNLQVTLEDGYIELSTSDSGGPIFKSPQTYMDGLLHYVSVISDNSGLRLLIDDQLLRNSKRLKHISSSRQSLRLGGSNFEGCISNVFVQRLSLSPEVLDLTSNSLKRDVSLGGCSLNKPPFLMLLKGSTRFNKTKTFRINQLLQDTPVASPRSVKVWQDACSPLPKTQANHGALQFGDIPTSHLLFKLPQELLKPRSQFAVDMQTTSSRGLVFHTGTKNSFMALYLSKGRLVFALGTDGKKLRIKSKEKCNDGKWHTVVFGHDGEKGRLVVDGLRAREGSLPGNSTISIRAPVYLGSPPSGKPKSLPTNSFVGCLKNFQLDSKPLYTPSSSFGVSSCLGGPLEKGIYFSEEGGHVVLAHSVLLGPEFKLVFSIRPRSLTGILIHIGSQPGKHLCVYLEAGKVTASMDSGAGGTSTSVTPKQSLCDGQWHSVAVTIKQHILHLELDTDSSYTAGQIPFPPASTQEPLHLGGAPANLTTLRIPVWKSFFGCLRNIHVNHIPVPVTEALEVQGPVSLNGCPDQ

SEQ ID NO: 5180 - protein, 312 aa, Homo sapiens
MPNSTTVMEFLLMRFSDVWTLQILHSASFFMLYLVTLMGNILIVTVTTCDSSLHMPMYFFLRNLSILDACYISVTVPTSCVNSLLDSTTISKAGCVAQVFLVVFFVYVELLFLTIMAHDRYVAVCQPLHYPVIVNSRICIQMTLASLLSGLVYAGMHTGSTFQLPFCRSNVIHQFFCDIPSLLKLSCSDTFSNEVMIVVSALGVGGGCFIFIIRSYIHIFSTVLGFPRGADRTKAFSTCIPHILVVSVFLSSCSSVYLRPPAIPAATQDLILSGFYSIMPPLFNPIIYSLRNKQIKVAIKKIMKRIFYSENV

SEQ ID NO: 5181 - protein, 353 aa, Homo sapiens
MPSPVGLLRALPLPWPQFLACTLRRLAGPRESTGPSQKPPPLCSVPCRVPAMTEEVAREALLSFVDSKCCYSSTVAGDLVIQELKRQTLCRYRLETFSESRISEWTFQPFTNHSVDGPQRGASPRLWDIKVQGPPMFQEDTRKFQVPHSSLVKECHKCHGRGRYKCSGCHGAGTVRCPSCCGAKRKAKQSRRCQLCAGSGRRRCSTCSGRGNKTCATCKGEKKLLHFIQLVIMWKNSLFEFVSEHRLNCPRELLAKAKGENLFKDENSVVYPIVDFPLRDISLASQRGIAEHSAALASRARVLQQRQTIELIPLTEVHYWYQGKTYVYYIYGTDHQVYAVDYPERYCCGCTIV

SEQ ID NO: 5182 - protein, 814 aa, Homo sapiens
MEPEINCSELCDSFPGQELDRRPLHDLCKTTITSSHHSSKTISSLSPVLLGIVWTFLSCGLLLILFFLAFTIHCRKNRIVKMSSPNLNIVTLLGSCLTYSSAYLFGIQDVLVGSSMETLIQTRLSMLCIGTSLVFGPILGKSWRLYKVFTQRVPDKRVIIKDLQLLGLVAALLMADVILLMTWVLTDPIQCLQILSVSMTVTGKDVSCTSTSTHFCASRYSDVWIALIWGCKGLLLLYGAYLAGLTGHVSSPPVNQSLTIMVGVNLLVLAAGLLFVVTRYLHSWPNLVFGLTSGGIFVCTTTINCFIFIPQLKQWKAFEEENQTIRRMAKYFSTPNKSFHTQYGEEENCHPRGEKSSMERLLTEKNAVIESLQEQVNNAKEKIVRLMSAECTYDLPEGAAPPASSPNKDVQAVASVHTLAAAQGPSGHLSDFQNDPGMAARDSQCTSGPSSYAQSLEGPGKDSSFSPGKEEKISDSKDFSDHLDSGCSQKPWTEQSLGPERGDQVPMNPSQSLLPERGGSDPQRQRHLENSEEPPERRSRVSSVIREKLQEVLQDLGLGPEASLSTAPSCHQQTWKNSAAFSPQKMPLSKELGFSPYMVRRRRAAQRARSHFPGSAPSSVGHRANRTVPGAHSRLHVQNGDSPSLAPQTTDSRVRRPSSRKPSLPSDPQDRPGTLEGSKQSQTEPEGARGSKAAFLRQPSGSGRAPSPAAPCLSKASPDLPEQWQLWPPVPSGCASLSSQHSYFDTESSSSDEFFCRCHRPYCEICFQSSSDSSDSGTSDTDPEPTGGLASWEKLWARSKPIVNFKDDLKPTLV

SEQ ID NO: 5183 - protein, 312 aa, Homo sapiens
MAWENQTFNSDFLLLGIFNHSPTHTFLFFLVLAIFSVAFMGNSIMVLLIYLDTQLHTPMYFLLSQLSLMDLMLICTTVPKMAFNYLSGSKSISMAGCATQIFFYISLLGSECFLLAVMSYDRYTAICHPLRYTNLMRPKICGLMTAFSWILGSTDGIIDAVATFSFSYCGSREIAHFCCDFPSLLILSCNDTSIFEEVIFICCIVMLVFPVAIIITSYARVILAVIHMGSGEGRRKAFTTCSSHLMVVGMYYGAGLFMCIQPTSHHSPMQDKMVSVFYTIVTPMLNPLIYSLRNKEVTRALMKILGKGKSGD

SEQ ID NO: 5184 - protein, 1050 aa, Homo sapiens
MEPGRGGTETVGKFEFSRKDLIGHGAFAVVFKGRHREKHDLEVAVKCINKKNLAKSQTLLGKEIKILKELKHENIVALYDFQEMANSVYLVMEYCNGGDLADYLHAMRTLSEDTIRLFLQQIAGAMRLLHSKGIIHRDLKPQNILLSNPAGRRANPNSIRVKIADFGFARYLQSNMMAATLCGSPMYMAPEVIMSQHYDGKADLWSIGTIVYQCLTGKAPFQASSPQDLRLFYEKNKTLVPTIPRETSAPLRQLLLALLQRNHKDRMDFDEFFHHPFLDASPSVRKSPPVPVPSYPSSGSGSSSSSSSTSHLASPPSLGEMQQLQKTLASPADTAGFLHSSRDSGGSKDSSCDTDDFVMVPAQFPGDLVAEAPSAKPPPDSLMCSGSSLVASAGLESHGRTPSPSPPCSSSPSPSGRAGPFSSSRCGASVPIPVPTQVQNYQRIERNLQSPTQFQTPRSSAIRRSGSTSPLGFARASPSPPAHAEHGGVLARKMSLGGGRPYTPSPQVGTIPERPGWSGTPSPQGAEMRGGRSPRPGSSAPEHSPRTSGLGCRLHSAPNLSDLHVVRPKLPKPPTDPLGAVFSPPQASPPQPSHGLQSCRNLRGSPKLPDFLQRNPLPPILGSPTKAVPSFDFPKTPSSQNLLALLARQGVVMTPPRNRTLPDLSEVGPFHGQPLGPGLRPGEDPKGPFGRSFSTSRLTDLLLKAAFGTQAPDPGSTESLQEKPMEIAPSAGFGGSLHPGARAGGTSSPSPVVFTVGSPPSGSTPPQGPRTRMFSAGPTGSASSSARHLVPGPCSEAPAPELPAPGHGCSFADPITANLEGAVTFEAPDLPEETLMEQEHTEILRGLRFTLLFVQHVLEIAALKGSASEAAGGPEYQLQESVVADQISLLSREWGFAEQLVLYLKVAELLSSGLQSAIDQIRAGKLCLSSTVKQVVRRLNELYKASVVSCQGLSLRLQRFFLDKQRLLDRIHSITAERLIFSHAVQMVQSAALDEMFQHREGCVPRYHKALLLLEGLQHMLSDQADIENVTKCKLCIERRLSALLTGICA

SEQ ID NO: 5185 - protein, 1269 aa, Homo sapiens
MEATGVLPFVRGVDLSGNDFKGGYFPENVKAMTSLRWLKLNRTGLCYLPEELAALQKLEHLSVSHNNLTTLHGELSSLPSLRAIVARANSLKNSGVPDDIFKLDDLSVLDLSHNQLTECPRELENAKNMLVLNLSHNSIDTIPNQLFINLTDLLYLDLSENRLESLPPQMRRLVHLQTLVLNGNPLLHAQLRQLPAMTALQTLHLRSTQRTQSNLPTSLEGLSNLADVDLSCNDLTRVPECLYTLPSLRRLNLSSNQITELSLCIDQWVHVETLNLSRNQLTSLPSAICKLSKLKKLYLNSNKLDFDGLPSGIGKLTNLEEFMAANNNLELVPESLCRCPKLRKLVLNKNHLVTLPEAIHFLTEIEVLDVRENPNLVMPPKPADRAAEWYNIDFSLQNQLRLAGASPATVAAAAAAGSGPKDPMARKMRLRRRKDSAQDDQAKQVLKGMSDVAQEKNKKQEESADARAPSGKVRRWDQGLEKPRLDYSEFFTEDVGQLPGLTIWQIENFVPVLVEEAFHGKFYEADCYIVLKTFLDDSGSLNWEIYYWIGGEATLDKKACSAIHAVNLRNYLGAECRTVREEMGDESEEFLQVFDNDISYIEGGTASGFYTVEDTHYVTRMYRVYGKKNIKLEPVPLKGTSLDPRFVFLLDRGLDIYVWRGAQATLSSTTKARLFAEKINKNERKGKAEITLLVQGQELPEFWEALGGEPSEIKKHVPEDFWPPQPKLYKVGLGLGYLELPQINYKLSVEHKQRPKVELMPRMRLLQSLLDTRCVYILDCWSDVFIWLGRKSPRLVRAAALKLGQELCGMLHRPRHATVSRSLEGTEAQVFKAKFKNWDDVLTVDYTRNAEAVLQSPGLSGKVKRDAEKKDQMKADLTALFLPRQPPMSLAEAEQLMEEWNEDLDGMEGFVLEGKKFARLPEEEFGHFYTQDCYVFLCRYWVPVEYEEEEKKEDKEEKAEGKEGEEATAEAEEKQPEEDFQCIVYFWQGREASNMGWLTFTFSLQKKFESLFPGKLEVVRMTQQQENPKFLSHFKRKFIIHRGKRKAVQGAQQPSLYQIRTNGSALCTRCIQINTDSSLLNSEFCFILKVPFESEDNQGIVYAWVGRASDPDEAKLAEDILNTMFDTSYSKQVINEGEEPENFFWVGIGAQKPYDDDAEYMKHTRLFRCSNEKGYFAVTEKCSDFCQDDLADDDIMLLDNGQEVYMWVGTQTSQVEIKLSLKACQVYIQHMRSKEHERPRRLRLVRKGNEQHAFTRCFHAWSAFCKALA

SEQ ID NO: 5186 - protein, 441 aa, Homo sapiens
MKAAVDLKPTLTIIKTEKVDLELFPSPDMECADVPLLTPSSKEMMSQALKATFSGFTKEQQRLGIPKDPRQWTETHVRDWVMWAVNEFSLKGVDFQKFCMNGAALCALGKDCFLELAPDFVGDILWEHLEILQKEDVKPYQVNGVNPAYPESRYTSDYFISYGIEHAQCVPPSEFSEPSFITESYQTLHPISSEELLSLKYENDYPSVILRDPLQTDTLQNDYFAIKQEVVTPDNMCMGRTSRGKLGGQDSFESIESYDSCDRLTQSWSSQSSFNSLQRVPSYDSFDSEDYPAALPNHKPKGTFKDYVRDRADLNKDKPVIPAAALAGYTGSGPIQLWQFLLELLTDKSCQSFISWTGDGWEFKLSDPDEVARRWGKRKNKPKMNYEKLSRGLRYYYDKNIIHKTAGKRYVYRFVCDLQSLLGYTPEELHAMLDVKPDADE

SEQ ID NO: 5187 - protein, 320 aa, Homo sapiens
MEMRNTTPDFILLGLFNHTRAHQVLFMMLLATVLTSLFSNALMILLIHWDHRLHRPMYFLLSQLSLMDMMLVSTTVPKMAADYLTGNKAISRAGCGVQIFFLPTLGGGECFLLAAMAYDRYAAVCHPLRYPTLMSWQLCLRMTMSSWLLGAADGLLQAVATLSFPYCGAHEIDHFFCEAPVLVRLACADTSVFENAMYICCVLMLLVPFSLILSSYGLILAAVLLMRSTEARKKAFATCSSHVAVVGLFYGAGIFTYMRPKSHRSTNHDKVVSAFYTMFTPLLNPLIYSVRNSEVKEALKRWLGTCVNLKHQQNEAHRSR

SEQ ID NO: 5188 - protein, 1265 aa, Homo sapiens
MKVRLLRQLSAAAKVKAPSGLQGPPQAHQFISLLLEEYGALCQAARSISTFLGTLENEHLKKFQVTWELHNKHLFENLVFSEPLLQSNLPALVSQIRLGTTTHDTCSEDTYSTLLQRYQRSEEELRRVAEEWLECQKRIDAYVDEQMTMKTKQRMLTEDWELFKQRRFIEEQLTNKKAVTGENNFTDTMRHMLSSRLSMPDCPNCNYRRRCACDDCSLSHILTCGIMDPPVTDDIHIHQLPLQVDPAPDYLAERSPPSVSSASSGSGSSSPITIQQHPRLILTDSGSAPTFCSDDEDVAPLSAKFADIYPLSNYDDTEVVANMNGIHSELNGGGENMALKDESPQISSTSSSSSEADDEEADGESSGEPPGAPKEDGVLGSRSPRTEESKADSPPPSYPTQQAEQAPNTCECHVCKQEASGLTPSAMTAGALPPGHQFLSPEKPTHPALHLYPHIHGHVPLHTVPHLPRPLIHPTLYATPPFTHSKALPPAPVQNHTNKHQVFNASLQDHIYPSCFGNTPEWNSSKFISLWGSEVMNDKNWNPGTFLPDTISGSEILGPTLSETRPEALPPPSSNETPAVSDSKEKKNAAKKKCLYNFQDAFMEANKVVMATSSATSSVSCTATTVQSSNSQFRVSSKRPPSVGDVFHGISKEDHRHSAPAAPRNSPTGLAPLPALSPAALSPAALSPASTPHLANLAAPSFPKTATTTPGFVDTRKSFCPAPLPPATDGSISAPPSVCSDPDCEGHRCENGVYDPQQDDGDESADEDSCSEHSSSTSTSTNQKEGKYCDCCYCEFFGHGGPPAAPTSRNYAEMREKLRLRLTKRKEEQPKKMDQISERESVVDHRRVEDLLQFINSSETKPVSSTRAAKRARHKQRKLEEKARLEAEARAREHLHLQEEQRRREEEEDEEEEEDRFKEEFQRLQELQKLRAVKKKKKERPSKDCPKLDMLTRNFQAATESVPNSGNIHNGSLEQTEEPETSSHSPSRHMNHSEPRPGLGADGDAADPVDTRDSKFLLPKEVNGKQHEPLSFFFDIMQHHKEGNGKQKLRQTSKASSEPARRPTEPPKATEGQSKPRAQTESKAKVVDLMSITEQKREERKVNSNNNNKKQLNHIKDEKSNPTPMEPTSPGEHQQNSKLVLAESPQPKGKNKKNKKKKGDRVNNSIDGVSLLLPSLGYNGAILAHCNLRLPGSSDCAASASQVVGITDDVFLPKDIDLDSVDMDETEREVEYFKRFCLDSARQTRQRLSINWSNFSLKKATFAAH

SEQ ID NO: 5189 - protein, 660 aa, Homo sapiens
MAHALVTFRDVAIDFSQKEWECLDTTQRKLYRDVMLENYNNLVSLGYSGSKPDVITLLEQGKEPCVVARDVTGRQCPGLLSRHKTKKLSSEKDIHEISLSKESIIEKSKTLRLKGSIFRNEWQNKSEFEGQQGLKERSISQKKIVSKKMSTDRKRPSFTLNQRIHNSEKSCDSHLVQHGKIDSDVKHDCKECGSTFNNVYQLTLHQKIHTGEKSCKCEKCGKVFSHSYQLTLHQRFHTGEKPYECQECGKTFTLYPQLNRHQKIHTGKKPYMCKKCDKGFFSRLELTQHKRIHTGKKSYECKECGKVFQLIFYFKEHERIHTGKKPYECKECGKAFSVCGQLTRHQKIHTGVKPYECKECGKTFRLSFYLTEHRRTHAGKKPYECKECGKSFNVRGQLNRHKTIHTGIKPFACKVCEKAFSYSGDLRVHSRIHTGEKPYECKECGKAFMLRSVLTEHQRLHTGVKPYECKECGKTFRVRSQISLHKKIHTDVKPYKCVRCGKTFRFGFYLTEHQRIHTGEKPYKCKECGKAFIRRGNLKEHLKIHSGLKPYDCKECGKSFSRRGQFTEHQKIHTGVKPYKCKECGKAFSRSVDLRIHQRIHTGEKPYECKQCGKAFRLNSHLTEHQRIHTGEKPYECKVCRKAFRQYSHLYQHQKTHNVI

SEQ ID NO: 5190 - protein, 331 aa, Homo sapiens
MRRKTRNFKHKTVKDNKVLTEGSDQESEKDNSQCCDPATNERVQAEKRQYVCTECGKAFSQSANLTVHERIHTGEKPYKCKECGKAFSHSSNLVVHRRIHTGLKPYTCSECGKSFSGKSHLIRHQGIHSGEKTYECKECGKAFSRSSGLISHHRVHTGEKPYSCIECGKAFSRSSNLTQHQRMHRGKKVYKCKECGKTCGSNTKIMDHQRIHTGEKPYECDECGKTFILRKTLNEHQRLHRREKPYKCNECGKAFTSNRNLVDHQRVHTGEKPYKCNECGKTFRQTSQVILHLRTHTKEKPYKCSECGKAYRYSSQLIQHQRKHNEEKETS

SEQ ID NO: 5191 - protein, 546 aa, Homo sapiens
MDPKAGGGGEEDDCVDSGAETGGSDYSHLSSTSSELSVEEAQDPFLVSIHIIADPGESQPLQEAIDNVLAWIHPDLPLFRVSERRASRRRRKPPKGAQPALAVVLFLQEEYGEEQILQLHRTLQQPPWRHHHTEQVHGRFLPYLPCSQDFFTLAPGTPLWAIRPVHYGKEIVRFTVYCRYDNYADSLRFYQLILRRSPSQKKADFCIFPIFSNLDVDIQFSLKRLPCDQCPVPTDSSVLEFRVRDIGELVPLLPNPCSPISEGRWQTEDHDGNKILLQAQRVHKKFPKPGRVHHASEKKRHSTPLPSTAVPSHTPGSSQQSPLNSPHPGPIRTGLPPGHQQEFAGRANSTPNPPWSFQRSKSLFCLPTGGPSLASSAEPQWFSNTGAPGHRASEWRHGHLLSIDDLEGAQETDVDTGLRLSSSDLSVVSAYSAPSRFCSTVETPLPSERCSSHWAAHKDSREGPLPTVSRVTTEASWASLPFFTKRSSSSSATARAAPPAPSTSTLTDSSPQLPCDTPKVKQTDGDMPPPPGSAGPGDNDMEEFYI

SEQ ID NO: 5192 - protein, 474 aa, Homo sapiens
MISFCPDCGKSIQAAFKFCPYCGNSLPVEEHVGSQTFVNPHVSSFQGSKRGLNSSFETSPKKVKWSSTVTSPRLSLFSDGDSSESEDTLSSSERSKGSGSRPPTPKSSPQKTRKSPQVTRGSPQKTSCSPQKTRQSPQTLKRSRVTTSLEALPTGTVLTDKSGRQWKLKSFQTRDNQGILYEAAPTSTLTCDSGPQKQKFSLKLDAKDGRLFNEQNFFQRAAKPLQVNKWKKLYSTPLLAIPTCMGFGVHQDKYRFLVLPSLGRSLQSALDVSPKHVLSERSVLQVACRLLDALEFLHENEYVHGNVTAENIFVDPEDQSQVTLAGYGFAFRYCPSGKHVAYVEGSRSPHEGDLEFISMDLHKGCGPSRRSDLQSLGYCMLKWLYGFLPWTNCLPNTEDIMKQKQKFVDKPGPFVGPCGHWIRPSETLQKYLKVVMALTYEEKPPYAMLRNNLEALLQDLRVSPYDPIGLPMVP

SEQ ID NO: 5193 - protein, 491 aa, Homo sapiens
MELSVLLFLALLTGLLLLLVQRHPNTHDRLPPGPRPLPLLGNLLQMDRRGLLKSFLRFREKYGDVFTVHLGPRPVVMLCGVEAIREALVDKAEAFSGRGKIAMVDPFFRGYGVIFANGNRWKVLRRFSVTTMRDFGMGKRSVEERIQEEAQCLIEELRKSKGALMDPTFLFQSITANIICSIVFGKRFHYQDQEFLKMLNLFYQTFSLISSVFGQLFELFSGFLKYFPGAHRQVYKNLQEINAYIGHSVEKHRETLDPSAPKDLIDTYLLHMEKEKSNAHSEFSHQNLNLNTLSLFFAGTETTSTTLRYGFLLMLKYPHVAERVYREIEQVIGPHRPPELHDRAKMPYTEAVIYEIQRFSDLLPMGVPHIVTQHTSFRGYIIPKDTEVFLILSTALHDPHYFEKPDAFNPDHFLDANGALKKTEAFIPFSLGKRICLGEGIARAELFLFFTTILQNFSMASPVAPEDIDLTPQECGVGKIPPTYQIRFLPR

SEQ ID NO: 5194 - protein, 575 aa, Homo sapiens
MKRSLQALYCQLLSFLLILALTEALAFAIQEPSPRESLQVLPSGTPPGTMVTAPHSSTRHTSVVMLTPNPDGPPSQAAAPMATPTPRAEGHPPTHTISTIAATVTAPHSESSLSTGPAPAAMATTSSKPEGRPRGQAAPTILLTKPPGATSRPTTAPPRTTTRRPPRPPGSSRKGAGNSSRPVPPAPGGHSRSKEGQRGRNPSSTPLGQKRPLGKIFQIYKGNFTGSVEPEPSTLTPRTPLWGYSSSPQPQTVAATTVPSNTSWAPTTTSLGPAKDKPGLRRAAQGGGSTFTSQGGTPDATAASGAPVSPQAAPVPSQRPHHGDPQDGPSHSDSWLTVTPGTSRPLSTSSGVFTAATGPTPAAFDTSVSAPSQGIPQGASTTPQAPTHPSRVSESTISGAKEETVATLTMTDRVPSPLSTVVSTATGNFLNRLVPAGTWKPGTAGNISHVAEGDKPQHRATICLSKMDIAWVILAISVPISSCSVLLTVCCMKRKKKTANPENNLSYWNNTITMDYFNRHAVELPREIQSLETSEDQLSEPRSPANGDYRDTGMVLVNPFCQETLFVGNDQVSEI

SEQ ID NO: 5195 - protein, 1167 aa, Homo sapiens
MAGAQPGVHALQLEPPTVVETLRRGSKFIKWDEEKLMTVVSGPDPVNTVFLNFMAVQDDTAKVWSEELFKLAMNILAQNASRNTFLRKAYTKLKLQVNQDGRIPVKNILKMFSADKKRVETALESCGLKFNRSESIRPDEFSLEIFERFLNKLCLRPDIDKILLEIGAKGKPYLTLEQLMDFINQKQRDPRLNEVLYPPLRPSQARLLIEKYEPNQQFLERDQMSMEGFSRYLGGEENGILPLEALDLSTDMTQPLSAYFINSSHNTYLTAGQLAGTSSVEMYRQALLWGCRCVELDVWKGRPPEEEPFITHGFTMTTEVPLRDVLEAIAETAFKTSPYPVILSFENHVDSAKQQAKMAEYCRSIFGDALLIEPLDKYPLAPGVPLPSPQDLMGRILVKNKKRHRPSAGGPDSAGRKRPLEQSNSALSESSAATEPSSPQLGSPSSDSCPGLSNGEEVGLEKPSLEPQKSLGDEGLNRGPYVLGPADREDEEEDEEEEEQTDPKKPTTDEGTASSEVNATEEMSTLVNYIEPVKFKSFEAARKRNKCFEMSSFVETKAMEQLTKSPMEFVEYNKQQLSRIYPKGTRVDSSNYMPQLFWNVGCQLVALNFQTLDVAMQLNAGVFEYNGRSGYLLKPEFMRRPDKSFDPFTEVIVDGIVANALRVKVISGQFLSDRKVGIYVEVDMFGLPVDTRRKYRTRTSQGNSFNPVWDEEPFDFPKVVLPTLASLRIAAFEEGGKFVGHRILPVSAIRSGYHYVCLRNEANQPLCLPALLIYTEASDYIPDDHQDYAEALINPIKHVSLMDQRARQLAALIGESEAQAGQETCQDTQSQQLGSQPSSNPTPSPLDASPRRPPGPTTSPASTSLSSPGQRDDLIASILSEVAPTPLDELRGHKALVKLRSRQERDLRELRKKHQRKAVTLTRRLLDGLAQAQAEGRCRLRPGALGGAADVEDTKEGEDEAKRYQEFQNRQVQSLLELREAQVDAEAQRRLEHLRQALQRLREVVLDANTTQFKRLKEMNEREKKELQKILDRKRHNSISEAKMRDKHKKEAELTEINRRHITESVNSIRRLEEAQKQRHDRLVAGQQQVLQQLAEEEPKLLAQLAQECQEQRARLPQEIRRSLLGEMPEGLGDGPLVACASNGHAPGSSGHLSGADSESQEENTQL

SEQ ID NO: 5196 - protein, 320 aa, Homo sapiens
MEMRNTTPDFILLGLFNHTRAHQVLFMMVLSIVLTSLFGNSLMILLIHWDHRLHTPMYFLLSQLSLMDMMLVSTTVPKMAADYLTGSKAISRAGCGVQIFFLPTLGGGECFLLAAMAYDRYAAVCHPLRYPTLMSWQLCLRMTMSCWLLGAADGLLQAVVTLSFPYCGAHEIDHFFCETPVLVRLACADTSVFENAMYICCVLMLLVPFSLILSSYGLILAAVLHMRSTEARKKAFATCSSHVAVVGLFYGAAIFTYMRPKSHRSTNHDKVVSAFYTMFTPLLNPLIYSVKNSEVKGALKRWLGTCVNIKHQQNEAHRSR

SEQ ID NO: 5197 - protein, 618 aa, Homo sapiens
MTQEYDNKRPVLVLQNEALYPQRRSYTSEDEAWKSFLENPLTAATKAMMSINGDEDSAAALGLLYDYYKVPRERRSSTAKPEVEHPEPDHSKRNSIPIVTEQPLISAGENRVQVLKNVPFNIVLPHGNQLGIDKRGHLTAPDTTVTVSIATMPTHSIKTETQPHGFAVGIPPAVYHPEPTERVVVFDRNLNTDQFSSGAQAPNAQRRTPDSTFSETFKEGVQEVFFPSDLSLRMPGMNSEDYVFDSVSGNNFEYTLEASKSLRQKPGDSTMTYLNKGQFYPITLKEVSSSEGIHHPISKVRSVIMVVFAEDKSREDQLRHWKYWHSRQHTAKQRCIDIADYKESFNTISNIEEIAYNAISFTWDINDEAKVFISVNCLSTDFSSQKGVKGLPLNIQVDTYSYNNRSNKPVHRAYCQIKVFCDKGAERKIRDEERKQSKRKVSDVKVPLLPSHKRMDITVFKPFIDLDTQPVLFIPDVHFANLQRGTHVLPIASEELEGEGSVLKRGPYGTEDDFAVPPSTKLARIEEPKRVLLYVRKESEEVFDALMLKTPSLKGLMEAISDKYDVPHDKIGKIFKKCKKGILVNMDDNIVKHYSNEDTFQLQIEEAGGSYKLTLTEI

SEQ ID NO: 5198 - protein, 359 aa, Homo sapiens
MIAAQAKLVYQLNKYYTERCQARKAAIAKTIREVCKVVSDVLKEVEVQEPRFISSLSEIDARYEGLEVISPTEFEVVLYLNQMGVFNFVDDGSLPGCAVLKLSDGRKRSMSLWVEFITASGYLSARKIRSRFQTLVAQAVDKCSYRDVVKMIADTSEVKLRIRERYVVQITPAFKCTGIWPRSAAQWPMPHIPWPGPNRVAEVKAEGFNLLSKECYSLTGKQSSAESDAWVLQFGEAENRLLMGGCRNKCLSVLKTLRDRHLELPGQPLNNYHMKTLLLYECEKHPRETDWDESCLGDRLNGILLQLISCLQCRRCPHYFLPNLDLFQGKPHSALESAAKQTWRLAREILTNPKSLDKL

SEQ ID NO: 5199 - protein, 543 aa, Homo sapiens
MGCIKSKENKSPAIKYRPENTPEPVSTSVSHYGAEPTTVSPCPSSSAKGTAVNFSSLSMTPFGGSSGVTPFGGASSSFSVVPSSYPAGLTGGVTIFVALYDYEARTTEDLSFKKGERFQIINNTEGDWWEARSIATGKNGYIPSNYVAPADSIQAEEWYFGKMGRKDAERLLLNPGNQRGIFLVRESETTKGAYSLSIRDWDEIRGDNVKHYKIRKLDNGGYYITTRAQFDTLQKLVKHYTEHADGLCHKLTTVCPTVKPQTQGLAKDAWEIPRESLRLEVKLGQGCFGEVWMGTWNGTTKVAIKTLKPGTMMPEAFLQEAQIMKKLRHDKLVPLYAVVSEEPIYIVTEFMSKGSLLDFLKEGDGKYLKLPQLVDMAAQIADGMAYIERMNYIHRDLRAANILVGENLVCKIADFGLARLIEDNEYTARQGAKFPIKWTAPEAALYGRFTIKSDVWSFGILQTELVTKGRVPYPGMVNREVLEQVERGYRMPCPQGCPESLHELMNLCWKKDPDERPTFEYIQSFLEDYFTATEPQYQPGENL

SEQ ID NO: 5200 - protein, 548 aa, Homo sapiens
MPALRPLLPLLLLLRLTSGAGLLPGLGSHPGVCPNQLSPNLWVDAQSTCERECSRDQDCAAAEKCCINVCGLHSCVAARFPGSPAAPTTAASCEGFVCPQQGSDCDIWDGQPVCRCRDRCEKEPSFTCASDGLTYYNRCYMDAEACLRGLHLHIVPCKHVLSWPPSSPGPPETTARPTPGAAPVPPALYSSPSPQAVQVGGTASLHCDVSGRPPPAVTWEKQSHQRENLIMRPDQMYGNVVVTSIGQLVLYNARPEDAGLYTCTARNAAGLLRADFPLSVVQREPARDAAPSIPAPAECLPDVQACTGPTSPHLVLWHYDPQRGGCMTFPARGCDGAARGFETYEACQQACARGPGDACVLPAVQGPCRGWEPRWAYSPLLQQCHPFVYGGCEGNGNNFHSRESCEDACPVPRTPPCRACRLRSKLALSLCRSDFAIVGRLTEVLEEPEAAGGIARVALEDVLKDDKMGLKFLGTKYLEVTLSGMDWACPCPNMTAGDGPLVIMGEVRDGVAVLDAGSYVRAASEKRVKKILELLEKQACELLNRFQD

SEQ ID NO: 5201 - protein, 502 aa, Homo sapiens
MAIHLDKQNIILKNDKDEYLKKTRDGVLPPYQDAKPPSPASIKKTYTTSKFNDAEPAKGNLFIGVEVLPENLHLDESETSEEDHGSLEKEKYEQFLSLEEGTKAHYFFEKVVNAAQTWFSLFGWPEGPHSFSIPETIRRDVYKMQFYSSTSPPQKFSRQNDFSKYNKTIYDVLLHLSGKMPPGINSSQSLPVDNHEKRVIQLHLQHSSLLDFLNAQGGCISHVLPEFLLEPEDYKRWIEIMSSTNTMPVSSCTPKKKCSIVIEMSKFEAWSKRAWTDVFLQIYKVLVLSRVVPYCSNNMPPICVQNTPKVNPCFASSNIYSDSERILLSWMNINYENTRHVIWKNCHKDVIPSERWIVNFDKDLSDGLVFATQLGAYCPFLIESHFINMYTRPKSPEEYLHNCLIIVNTLYEIDFDVEIQVCLRVFPKEMDAGVSGLRKEDMPSVWVVTIRLAVAVARTKRQKKGDIQFACFFVCLFFFIFVVISFSLWSRMHFFLLLPLDI

SEQ ID NO: 5202 - protein, 309 aa, Homo sapiens
MENQNNVTEFILLGLTENLELWKIFSAVFLVMYVATVLENLLIVVTIITSQSLRSPMYFFLTFLSLLDVMFSSVVAPKVIVDTLSKSTTISLKGCLTQLFVEHFFGGVGIILLTVMAYDRYVAICKPLHYTIIMSPRVCCLMVGGAWVGGFMHAMIQLLFMYQIPFCGPNIIDHFICDLFQLLTLACTDTHILGLLVTLNSGMMCVAIFLILIASYTVILCSLKSYSSKGRHKALSTCSSHLTVVVLFFVPCIFLYMRPVVTHPIDKAMAVSDSIITPMLNPLIYTLRNAEVKSAMKKLWMKWEALAGK

SEQ ID NO: 5203 - protein, 589 aa, Homo sapiens
MAAADGDDSLYPIAVLIDELRNEDVQLRLNSIKKLSTIALALGVERTRSELLPFLTDTIYDEDEVLLALAEQLGTFTTLVGGPEYVHCLLPPLESLATVEETVVRDKAVESLRAISHEHSPSDLEAHFVPLVKRLAGGDWFTSRTSACGLFSVCYPRVSSAVKAELRQYFRNLCSDDTPMVRRAAASKLGEFAKVLELDNVKSEIIPMFSNLASDEQDSVRLLAVEACVNIAQLLPQEDLEALVMPTLRQAAEDKSWRVRYMVADKFTELQKAVGPEITKTDLVPAFQNLMKDCEAEVRAAASHKVKEFCENLSADCRENVIMSQILPCIKELVSDANQHVKSALASVIMGLSPILGKDNTIEHLLPLFLAQLKDECPEVRLNIISNLDCVNEVIGIRQLSQSLLPAIVELAEDAKWRVRLAIIEYMPLLAGQLGVEFFDEKLNSLCMAWLVDHVYAIREAATSNLKKLVEKFGKEWAHATIIPKVLAMSGDPNYLHRMTTLFCINVLSEVCGQDITTKHMLPTVLRMAGDPVANVRFNVAKSLQKIGPILDNSTLQSEVKPILEKLTQDQDVDVKYFAQEALTVLSLA

SEQ ID NO: 5204 - protein, 433 aa, Homo sapiens
MSGRPRTTSFAESCKPVQQPSAFGSMKVSRDKDGSKVTTVVATPGQGPDRPQEVSYTDTKVIGNGSFGVVYQAKLCDSGELVAIKKVLQDKRFKNRELQIMRKLDHCNIVRLRYFFYSSGEKKDEVYLNLVLDYVPETVYRVARHYSRAKQTLPVIYVKLYMYQLFRSLAYIHSFGICHRDIKPQNLLLDPDTAVLKLCDFGSAKQLVRGEPNVSYICSRYYRAPELIFGATDYTSSIDVWSAGCVLAELLLGQPIFPGDSGVDQLVEIIKVLGTPTREQIREMNPNYTEFKFPQIKAHPWTKDSSGTGHFTSGVRVFRPRTPPEAIALCSRLLEYTPTARLTPLEACAHSFFDELRDPNVKLPNGRDTPALFNFTTQELSSNPPLATILIPPHARIQAAASTPTNATAASDANTGDRGQTNNAASASASNST

SEQ ID NO: 5205 - protein, 408 aa, Homo sapiens
MRRPRGEPGPRAPRPTEGATCAGPGESCFPSDGPLVCALEQERRLRLPPKPPPPLQPLLRGGQGLEAALSCPRFLRYPRQHLISSLAEARPEELTPHVMVLLAQHLARHRLREPQLLEAIAHFLVVQETQLSSKVVQKLVLPFGRLNYLPLEQQFMPCLERILAREAGVAPLATVNILMSLCQLRCLPFRALHFVFSPGFINYISGTPHALIVRRYLSLLDTAVELELPGYRGPRLPRRQQVPIFPQPLITDRARCKYSHKDIVAEGLRQLLGEEKYRQDLTVPPGYCTDFLLCASSSGAVLPVRTQDPFLPYPPRSCPQGQAASSATTRDPAQRVVLVLRERWHFCRDGRVLLGSRALRERHLGLMGYQLLPLPFEELESQRGLPQLKSYLRQKLQALGLRWGPEGG

SEQ ID NO: 5206 - protein, 695 aa, Homo sapiens
MAAATIVHDTSEAVELCPAYGLYLKPITKMTISVALPQLKQPGKSISNWEVMERLKGMVQNHQFSTLRISKSTMDFIRFEGEVENKSLVKSFLACLDGKTIKLSGFSDILKVRAAEFKIDFPTRHDWDSFFRDAKDMNETLPGERPDTIHLEGLPCKWFALKESGSEKPSEDVLVKVFEKFGEIRNVDIPMLDPYREEMTGRNFHTFSFGGHLNFEAYVQYREYMGFIQAMSALRGMKLMYKGEDGKAVACNIKVSFDSTKHLSDASIKKRQLERQKLQELEQQREEQKRREKEAEERQRAEERKQKELEELERERKREEKLRKREQKQRDRELRRNQKKLEKLQAEEQKQLQEKIKLEERKLLLAQRNLQSIRLIAELLSRAKAVKLREQEQKEEKLRLQQQEERRRLQEAELRRVEEEKERALGLQRKERELRERLLSILLSKKPDDSHTHDELGVAHADLLQPVLDILQTVSSGCVSATTLHPLGGQPPAGAPKESPAHPEADGAPKSVNGSVAEEAPCKEVQSSCRVVPEDGSPEKRCPGGVLSCIPDNNQQPKGIPACEQNVSRKDTRSEQDKCNREPSKGRGRATGDGLADRHKRERSRARRASSREDGRPRKERRPHKKHAYKDDSPRRRSTSPDHTRSRRSHSKDRHRRERSRERRGSASRKHSRHRRRSERSRSRSPSRHRSTWNR

SEQ ID NO: 5207 - protein, 312 aa, Homo sapiens
MEKSNNSTLFILLGFSQNKNIEVLCFVLFLFCYIAIWMGNLLIMISITCTQLIHQPMYFFLNYLSLSDLCYTSTVTPKLMVDLLAERKTISYNNCMIQLFTTHFFGGIEIFILTGMAYDRYVAICKPLHYTIIMSRQKCNTIIIVCCTGGFIHSASQFLLTIFVPFCGPNEIDHYFCDVYPLLKLACSNIHMIGLLVIANSGLIALVTFVVLLLSYVFILYTIRAYSAERRSKALATCSSHVIVVVLFFAPALFIYIRPVTTFSEDKVFALFYTIIAPMFNPLIYTLRNTEMKNAMRKVWCCQILLKRNQLF

SEQ ID NO: 5208 - protein, 672 aa, Homo sapiens
MSKEERPGREEILECQVMWEPDSKKNTQMDRFRAAVGAACGLALESYDDLYHWSVESYSDFWAEFWKFSGIVFSRVYDEVVDTSKGIADVPEWFKGSRLNYAENLLRHKENDRVALYIAREGKEEIVKVTFEELRQEVALFAAAMRKMGVKKGDRVVGYLPNSEHAVEAMLAAASIGAIWSSTSPDFGVNGVLDRFSQIQPKLIFSVEAVVYNGKEHNHMEKLQQVVKGLPDLKKVVVIPYVSSRENIDLSKIPNSVFLDDFLATGTSEQAPQLEFEQLPFSHPLFIMFSSGTTGAPKCMVHSAGGTLIQHLKEHLLHGNMTSSDILLCYTTVGWMMWNWMVSLLATGAAMVLYDGSPLVPTPNVLWDLVDRIGITVLVTGAKWLSVLEEKAMKPVETHSLQMLHTILSTGSPLKAQSYEYVYRCIKSSILLGSISGGTDIISCFMGHNFSLPVYKGEIQARNLGMAVEAWNEEGKAVWGESGELVCTKPIPCQPTHFWNDENGNKYRKAYFSKFPGIWAHGDYCRINPKTGGIVMLGRSDGTLNPNGVRFGSSEIYNIVESFEEVEDSLCVPQYNKYREERVILFLKMASGHAFQPDLVKRIRDAIRMGLSARHVPSLILETKGIPYTLNGKKVEVAVKQIIAGKAVEQGGAFSNPETLDLYRDIPELQGF

SEQ ID NO: 5209 - protein, 433 aa, Homo sapiens
MEVVDPQQLGMFTEGELMSVGMDTFIHRIDSTEVIYQPRRKRAKLIGKYLMGDLLGEGSYGKVKEVLDSETLCRRAVKILKKKKLRRIPNGEANVKKEIQLLRRLRHKNVIQLVDVLYNEEKQKMYMVMEYCVCGMQEMLDSVPEKRFPVCQAHGYFCQLIDGLEYLHSQGIVHKDIKPGNLLLTTGGTLKISDLGVAEALHPFAADDTCRTSQGSPAFQPPEIANGLDTFSGFKVDIWSAGVTLYNITTGLYPFEGDNIYKLFENIGKGSYAIPGDCGPPLSDLLKGMLEYEPAKRFSIRQIRQHSWFRKKHPPAEAPVPIPPSPDTKDRWRSMTVVPYLEDLHGADEDEDLFDIEDDIIYTQDFTVPGQVPEEEASHNGQRRGLPKAVCMNGTEAAQLSTKSRAEGRAPNPARKACSASSKIRRLSACKQQ

SEQ ID NO: 5210 - protein, 1073 aa, Homo sapiens
MRVFLLCAYILLLMVSQLRAVSFPEDDEPLNTVDYHYSRQYPVFRGRPSGNESQHRLDFQLMLKIRDTLYIAGRDQVYTVNLNEMPKTEVIPNKKLTWRSRQQDRENCAMKGKHKDECHNFIKVFVPRNDEMVFVCGTNAFNPMCRYYRLSTLEYDGEEISGLARCPFDARQTNVALFADGKLYSATVADFLASDAVIYRSMGDGSALRTIKYDSKWIKEPHFLHAIEYGNYVYFFFREIAVEHNNLGKAVYSRVARICKNDMGGSQRVLEKHWTSFLKARLNCSVPGDSFFYFDVLQSITDIIQINGIPTVVGVFTTQLNSIPGSAVCAFSMDDIEKVFKGRFKEQKTPDSVWTAVPEDKVPKPRPGCCAKHGLAEAYKTSIDFPDETLSFIKSHPLMDSAVPPIADEPWFTKTRVRYRLTAISVDHSAGPYQNYTVIFVGSEAGMVLKVLAKTSPFSLNDSVLLEEIEAYNHAKCSAENEEDKKVISLQLDKDHHALYVAFSSCIIRIPLSRCERYGSCKKSCIASRDPYCGWLSQGSCGRVTPGMLAEGYEQDTEFGNTAHLGDCHEILPTSTTPDYKIFGGPTSDMEVSSSSVTTMASIPEITPKVIDTWRPKLTSSRKFVVQDDPNTSDFTDPLSGIPKGVRWEVQSGESNQMVHMNVLITCVFAAFVLGAFIAGVAVYCYRDMFVRKNRKIHKDAESAQSCTDSSGSFAKLNGLFDSPVKEYQQNIDSPKLYSNLLTSRKELPPNGDTKSMVMDHRGQPPELAALPTPESTPVLHQKTLQAMKSHSEKAHGHGASRKETPQFFPSSPPPHSPLSHGHIPSAIVLPNATHDYNTSFSNSNAHKAEKKLQNIDHPLTKSSSKRDHRRSVDSRNTLNDLLKHLNDPNSNPKAIMGDIQMAHQNLMLDPMGSMSEVPPKVPNREASLYSPPSTLPRNSPTKRVDVPTTPGVPMTSLERQRGYHKNSSQRHSISAMPKNLNSPNGVLLSRQPSMNRGGYMPTPTGAKVDYIQGTPVSVHLQPSLSRQSSYTSNGTLPRTGLKRTPSLKPDVPPKPSFVPQTPSVRPLNKYTY

SEQ ID NO: 5211 - protein, 791 aa, Homo sapiens
MSNQQEKYEAQNIVNSTEESDDAFDTVTIPVPSEEPQESDQTEEHESGIEQFSESHAIHVEEQSDQSFSSLEPDNEQLMEEVISPRQVSYTPQHHEKQYAMQRPNDDSLAFLDKIKSVKESLQESVEDSLATVKVVLIPVGQEIVIPFKVDTILKYLKDHFSHLLGIPHSVLQIRYSGKILKNNETLVQHGVKPQEIVQVEIFSTNPDLYPVRRIDGLTDVSQIITVTVQTGLDQYQQVPVEIVKSDFHKPFLGGFRHKVTGVEYHNAGTQTVPKRIPERLSIFCRDTQTVFQKKNLQQTTNTTSTQMTNIGVYVSNMTDKLVTPGKYFSAAEYHAQRLKAVIVIQTYYRQWHAKIFVENLRRQKSLRLEWETQQELRKIREKEEWIKLDYHRRHNPKTNEDFEFLYNALEFWRQEELTRINQSFTGAERKAALCELLEKETQIIASIGRHRYIAYMANQEAAIQAFLDKCSAPKIWRTPNGKTIEMDTQFTIRARELQNIYKCIMLKNISQDERLDVLLTLKHTVKEHECKLTQEILELIDREVDLMMRGVKHHNLEGLRKRIATLFFHYIKTPLFNPEVAKYLKVPQDPLKFYKKIYFCHSCQLYLPSTEFSVSSTSRRIYRCRNCINLQNEAQKRESFLKYKCLLQQLYYTEADYEDDSKIAFLMQLQDIQYLTENIWASQSVLSACDNLSDLVMVRWNKSLEWSPWNCILLTKDEAAAHLKLTSIEEGYERSFIHKIKHKHILAKNYFSQVPVLASFILDDGEIDEIRWKYHSDTTPKIIESQRPPH

SEQ ID NO: 5212 - protein, 443 aa, Homo sapiens
MQKATYYDSSAIYGGYPYQAANGFAYNANQQPYPASAALGADGEYHRPACSLQSPSSAGGHPKAHELSEACLRTLSAPPSQPPSLGEPPLHPPPPQAAPPAPQPPQPAPQPPAPTPAAPPPPSSASPPQNASNNPTPANAAKSPLLNSPTVAKQIFPWMKESRQNTKQKTSSSSSGESCAGDKSPPGQASSKRARTAYTSAQLVELEKEFHFNRYLCRPRRVEMANLLNLTERQIKIWFQNRRMKYKKDQKGKGMLTSSGGQSPSRSPVPPGAGGYLNSMHSLVNSVPYEPQSPPPFSKPPQGTYGLPPASYPASLPSCAPPPPPQKRYTAAGAGAGGTPDYDPHAHGLQGNGSYGTPHIQGSPVFVGGSYVEPMSNSGPALFGLTHLPHAASGAMDYGGAGPLGSGHHHGPGPGEPHPTYTDLTGHHPSQGRIQEAPKLTHL

SEQ ID NO: 5213 - protein, 287 aa, Homo sapiens
MAAPRQIPSHIVRLKPSCSTDSSFTRTPVPTVSLASRELPVSSWQVTEPSSKNLWEQICKEYEAEQPPFPEGYKVKQEPVITVAPVEEMLFHGFSAEHYFPVSHFTMISRTPCPQDKSETINPKTCSPKEYLETFIFPVLLPGMASLLHQAKKEKCFERKRTKFIACDFLTEWLYNQNPKRAGEPFTEFFSIPFVEERLKQHPRPPIPLSLLLTEEEAALYIQSFWRACVVRCDPEIQELRQWQKKLREAKHIHQQVKIFWAKQEQKVKCKMEDDAVPAAKMKIPSS

SEQ ID NO: 5214 - protein, 175 aa, Homo sapiens
MAEASSANLGSGCEEKRHEGSSSESVPPGTTISRVKLLDTMVDTFLQKLVAAGSYQRFTDCYKCFYQLQPAMTQQIYDKFIAQLQTSIREEISDIKEEGNLEAVLNALDKIVEEGKVRKEPAWCEAQRCRVQQRCSLCVQAGGQRGSEETQALPVSMAGSPSPLPGSPGAQEGGV

SEQ ID NO: 5215 - protein, 587 aa, Homo sapiens
MNDSLFVSLDRLLLEFVFQYEQDISTKEEMIQRINKCCEDIKENKVTICRIHETINATDEEIDHYCKHSEEIKDNCRNWKPTCDVFRKHEDYMQDQFTVYQGTVEKDKEMYHDYICQYKEVLKQYQLKYSETPFSREYYEKKREHEEIQSRVLACTEQLKMNETIFMKFRVPAPFPSLTKWTLNIVNLRCETQDILKHASNLTKSSSELKKEVDEMEIEINYLNQQISRHNETKALSETLEEKNKNTENRKELKERIFGKDEHVLTLNKTQSSQLFLPYESQKLVRPIKMHSSEPRVADIKEESSAKQSKLANIDFRQKENDTQIFNDSAVDNHSKCSHITTITSSQKFMQVRLLTPQKQSNSNQWSEKGDKDAEYGDKGTVRQVRESKCTSQAIYTEHFGKSVENDSDEVEERAENFPRTSEIPIFLGTPKAVKAPESLEKIKFPKTPPFEINRNRNAVPEVQTEKESPGLSFLMSYTSRSPGLNLFDSSVFDTEISSDQFNEHYSARNLNPLSSEQEIGNLLEKPEGEDGFTFSFPSDTSTHTFGAGKDDFSFPFSFGQGQNSIPSSSLKGFSSSSQNTTQFTFF

SEQ ID NO: 5216 - protein, 495 aa, Homo sapiens
MAAEPQPSSLSYRTTGSTYLHPLSELLGIPLDQVNFVVCQLVALFAAFWFRIYLRPGTTSSDVRHAVATIFGIYFVIFCFGWYSVHLFVLVLMCYAIMVTASVSNIHRYSFFVAMGYLTICHISRIYIFHYGILTTDFSGPLMIVTQKITTLAFQVHDGLGRRAEDLSAEQHRLAIKVKPSFLEYLSYLLNFMSVIAGPCNNFKDYIAFIEGKHIHMKLLEVNWKRKGFHSLPEPSPTGAVIHKLGITLVSLLLFLTLTKTFPVTCLVDDWFVHKASFPARLCYLYVVMQASKPKYYFAWTLADAVNNAAGFGFSGVDKNGNFCWDLLSNLNIWKIETATSFKMYLENWNIQTATWLKCVCYQRVPWYPTVLTFILSALWHGVYPGYYFTFLTGILVTLAARAVRNNYRHYFLSSRALKAVYDAGTWAVTQLAVSYTVAPFVMLAVEPTISLYKSMYFYLHIISLLIILFLPMKPQAHTQRRPQTLNSINKRKTD

SEQ ID NO: 5217 - protein, 808 aa, Homo sapiens
MSSKQATSPFACAADGEDAMTQDLTSREKEEGSDQHVASHLPLHPIMHNKPHSEELPTLVSTIQQDADWDSVLSSQQRMESENNKLCSLYSFRNTSTSPHKPDEGSRDREIMTSVTFGTPERRKGSLADVVDTLKQKKLEEMTRTEQEDSSCMEKLLSKDWKEKMERLNTSELLGEIKGTPESLAEKERQLSTMITQLISLREQLLAAHDEQKKLAASQIEKQRQQMDLARQQQEQIARQQQQLLQQQHKINLLQQQIQVQGHMPPLMIPIFPHDQRTLAAAAAAQQGFLFPPGITYKPGDNYPVQFIPSTMAAAAASGLSPLQLQKGHVSHPQINQRLKGLSDRFGRNLDTFEHGGGHSYNHKQIEQLYAAQLASMQVSPGAKMPSTPQPPNTAGTVSPTGIKNEKRGTSPVTQVKDEAAAQPLNLSSRPKTAEPVKSPTSPTQNLFPASKTSPVNLPNKSSIPSPIGGSLGRGSSLDILSSLNSPALFGDQDTVMKAIQEARKMREQIQREQQQQQPHGVDGKLSSINNMGLNSCRNEKERTRFENLGPQLTGKSNEDGKLGPGVIDLTRPEDAEGGATVAEARVYRDARGRASSEPHIKRPMNAFMVWAKDERRKILQAFPDMHNSNISKILGSRWKSMSNQEKQPYYEEQARLSKIHLEKYPNYKYKPRPKRTCIVDGKKLRIGEYKQLMRSRRQEMRQFFTVGQQPQIPITTGTGVVYPGAITMATTTPSPQMTSDCSSTSASPEPSLPVIQSTYGMKTDGGSLAGNEMINGEDEMEMYDDYEDDPKSDYSSENEAPEAVSAN

SEQ ID NO: 5218 - protein, 370 aa, Homo sapiens
MFSMTTEALNNFALGCTNLLMTMIPQIDLKQIFLCPNCRLYMIPVGAFIFSLGNMQNQSFVTEFVLLGLSQNPNVQEIVFVVFLFVYIATVGGNMLIVVTILSSPALLVSPMYFFLGFLSFLDACFSSVITPKMIVDSLYVTKTISFEGCMMQLFAEHFFAGVEVIVLTAMAYDRYVAICKPLHYSSIMNRRLCGILMGVAWTGGLLHSMIQILFTFQLPFCGPNVINHFMCDLYPLLELACTDTHIFGLMVVINSGFICIINFSLLLVSYAVILLSLRTHSSEGRWKALSTCGSHIAVVILFFVPCIFVYTRPPSAFSLDKMAAIFYIILNPLLNPLIYTFRNKEVKQAMRRIWNRLMVVSDEKENIKL

SEQ ID NO: 5219 - protein, 275 aa, Homo sapiens
MTTEQARGQQGPNLAIGRQKPPAGVVTPKSDAEEPPLTRKRSKKERGLRGSRKRTGSSGEQTGPEAPGSSNNPPSTGEGPAGAPPASPGPASSRQSHRHRPDSLHDAAQRTYGPLLNRVFGKDRELGPEELDELQAAFEEFDTDRDGYISHRELGDCMRTLGYMPTEMELLEVSQHIKMRMGGRVDFEEFVELIGPKLREETAHMLGVRELRIAFREFDRDRDGRITVAELREAVPALLGEPLAGPELDEMLREVDLNGDGTVDFDEFVMMLSRH

SEQ ID NO: 5220 - protein, 874 aa, Homo sapiens
MLKKFDKKDEESGGGSNPFQHLEKSAVLQEARVFNETPINPRKCAHILTKILYLINQGEHLGTTEATEAFFAMTKLFQSNDPTLRRMCYLTIKEMSCIAEDVIIVTSSLTKDMTGKEDNYRGPAVRALCQITDSTMLQAIERYMKQAIVDKVPSVSSSALVSSLHLLKCSFDVVKRWVNEAQEAASSDNIMVQYHALGLLYHVRKNDRLAVNKMISKVTRHGLKSPFAYCMMIRVASKQLEEEDGSRDSPLFDFIESCLRNKHEMVVYEAASAIVNLPGCSAKELAPAVSVLQLFCSSPKAALRYAAVRTLNKVAMKHPSAVTACNLDLENLVTDSNRSIATLAITTLLKTGSESSIDRLMKQISSFMSEISDEFKVVVVQAISALCQKYPRKHAVLMNFLFTMLREEGGFEYKRAIVDCIISIIEENSESKETGLSHLCEFIEDCEFTVLATRILHLLGQEGPKTTNPSKYIRFIYNRVVLEHEEVRAGAVSALAKFGAQNEEMLPSILVLLKRCVMDDDNEVRDRATFYLNVLEQKQKALNAGYILNGLTVSIPGLERALQQYTLEPSEKPFDLKSVPLATAPMAEQRTESTPITAVKQPEKVAATRQEIFQEQLAAVPEFRGLGPLFKSSPEPVALTESETEYVIRCTKHTFTNHMVFQFDCTNTLNDQTLENVTVQMEPTEAYEVLCYVPARSLPYNQPGTCYTLVALPKEDPTAVACTFSCMMKFTVKDCDPTTGETDDEGYEDEYVLEDLEVTVADHIQKVMKLNFEAAWDEVGDEFEKEETFTLSTIKTLEEAVGNIVKFLGMHPCERSDKVPDNKNTHTLLLAGVFRGGHDILVRSRLLLLDTVTMQVTARSLEELPVDIILASVG

SEQ ID NO: 5221 - protein, 1401 aa, Homo sapiens
MAPQMYEFHLPLSPEELLKSGGVNQYVVQEVLSIKHLPPQLRAFQAAFRAQGPLAMLQHFDTIYSILHHFRSIDPGLKEDTLQFLIKVVSRHSQELPAILDDTTLSGSDRNAHLNALKMNCYALIRLLESFETMASQTNLVDLDLGGKGKKARTKAAHGFDWEEERQPILQLLTQLLQLDIRHLWNHSIIEEEFVSLVTGCCYRLLENPTINHQKNRPTREAITHLLGVALTRYNHMLSATVKIIQMLQHFEHLAPVLVAAVSLWATDYGMKSIVGEIVREIGQKCPQELSRDPSGTKGFAAFLTELAERVPAILMSSMCILLDHLDGENYMMRNAVLAAMAEMVLQVLSGDQLEAAARDTRDQFLDTLQAHGHDVNSFVRSRVLQLFTRIVQQKALPLTRFQAVVALAVGRLADKSVLVCKNAIQLLASFLANNPFSCKLSDADLAGPLQKETQKLQEMRAQRRTAAASAVLDPEEEWEAMLPELKSTLQQLLQLPQGEEEIPEQIANTETTEDVKGRIYQLLAKASYKKAIILTREATGHFQESEPFSHIDPEESEETRLLNILGLIFKGPAASTQEKNPRESTGNMVTGQTVCKNKPNMSDPEESRGNDELVKQEMLVQYLQDAYSFSRKITEAIGIISKMMYENTTTVVQEVIEFFVMVFQFGVPQALFGVRRMLPLIWSKEPGVREAVLNAYRQLYLNPKGDSARAKAQALIQNLSLLLVDASVGTIQCLEEILCEFVQKDELKPAVTQLLWERATEKVACCPLERCSSVMLLGMMARGKPEIVGSNLDTLVSIGLDEKFPQDYRLAQQVCHAIANISDRRKPSLGKRHPPFRLPQEHRLFERLRETVTKGFVHPDPLWIPFKEVAVTLIYQLAEGPEVICAQILQGCAKQALEKLEEKRTSQEDPKESPAMLPTFLLMNLLSLAGDVALQQLVHLEQAVSGELCRRRVLREEQEHKTKDPKEKNTSSETTMEEELGLVGATADDTEAELIRGICEMELLDGKQTLAAFVPLLLKVCNNPGLYSNPDLSAAASLALGKFCMISATFCDSQLRLLFTMLEKSPLPIVRSNLMVATGDLAIRFPNLVDPWTPHLYARLRDPAQQVRKTAGLVMTHLILKDMVKVKGQVSEMAVLLIDPEPQIAALAKNFFNELSHKGNAIYNLLPDIISRLSDPELGVEEEPFHTIMKQLLSYITKDKQTESLVEKLCQRFRTSRTERQQRDLAYCVSQLPLTERGLRKMLDNFDCFGDKLSDESIFSAFLSVVGKLRRGAKPEGKAIIDEFEQKLRACHTRGLDGIKELEIGQAGSQRAPSAKKPSTGSRYQPLASTASDNDFVTPEPRRTTRRHPNTQQRASKKKPKVVFSSDESSEEDLSAEMTEDETPKKTTPILRASARRHRS

SEQ ID NO: 5222 - protein, 686 aa, Homo sapiens
MTESQGTVTFKDVAIDFTQEEWKRLDPAQRKLYRNVMLENYNNLITVGYPFTKPDVIFKLEQEEEPWVMEEEVLRRHWQGEIWGVDEHQKNQDRLLRQVEVKFQKTLTEEKGNECQKKFANVFPLNSDFFPSRHNLYEYDLFGKCLEHNFDCHNNVKCLMRKEHCEYNEPVKSYGNSSSHFVITPFKCNHCGKGFNQTLDLIRHLRIHTGEKPYECSNCRKAFSHKEKLIKHYKIHSREQSYKCNECGKAFIKMSNLIRHQRIHTGEKPYACKECEKSFSQKSNLIDHEKIHTGEKPYECNECGKAFSQKQSLIAHQKVHTGEKPYACNECGKAFPRIASLALHMRSHTGEKPYKCDKCGKAFSQFSMLIIHVRIHTGEKPYECNECGKAFSQSSALTVHMRSHTGEKPYECKECRKAFSHKKNFITHQKIHTREKPYECNECGKAFIQMSNLVRHQRIHTGEKPYICKECGKAFSQKSNLIAHEKIHSGEKPYECNECGKAFSQKQNFITHQKVHTGEKPYDCNECGKAFSQIASLTLHLRSHTGEKPYECDKCGKAFSQCSLLNLHMRSHTGEKPYVCNECGKAFSQRTSLIVHMRGHTGEKPYECNKCGKAFSQSSSLTIHIRGHTGEKPFDCSKCGKAFSQISSLTLHMRKHTGEKPYHCIECGKAFSQKSHLVRHQRIHTH

SEQ ID NO: 5223 - protein, 936 aa, Homo sapiens
LCIVQGPLTFRDVAIEFSQEEWKSLDPVQKALYWDVMLENYRNLVFLGILPKCMTKELPPIGNSNTGEKCQTVTLERHECYDVENFYLREIQKNLQDLEFQWKDGEINYKEVPMTYKNNLNGKRGQHSQEDVENKCIENQLTLSFQSRLTELQKFQTEGKIYECNQSEKTVNNSSLVSPLQRILPSVQTNISKKYENEFLQLSLPTQLEKTHIREKPYMCKGCGKAFRVSSSLINHQMVHTTEKPYKCNECGKAFHRGSLLTIHQIVHTRGKPYQCGVCGKIFRQNSDLVNHRRSHTGEKPYKCNECGKSFSQSYNLAIHQRIHTGEKPYKCNECGKTFKQGSCLTTHQIIHTGEKPYQCDICGKVFRQNSNLVNHQRIHTGEKPYKCNICGKSFSQSSNLATHQTVHSGNKPYKCDECGKTFKRSSSLTTHQIIHTGEKPYTCDVCDKVFSQRSQLARHQRSHTGEKPYKCNECGKVFSQTSHLVGHRRIHTGEKPYKCDKCGKAFKQGSLLTRHKIIHTREKRYQCGECGKVFSENSCLVRHLRIHTGEQPYKCNVCGKVFNYSGNLSIHKRIHTGEKPFQCNECGTVFRNYSCLARHLRIHTGQKPYKCNVCGKVFNDSGNLSNHKRIHTGEKPFQCNECGKVFSYYSCLARHRKIHTGEKPYKCNDCGKAYTQRSSLTKHLIIHTGEKPYNCNEFGGAFIQSSKLARYHRNPTGEKPHKCSHCGRTFSHITGLTYHQRRHTGEMPYKCIECGQVFNSTSNLARHRRIHTGEKPYKCNECGKVFRHQSTLARHRSIHTGEKPYVCNECGKAFRVRSILVNHQKMHTGDKPYKCNECGKAFIERSKLVYHQRNHTGEKPYKCIECGKAFGRFSCLNKHQMIHSGEKPYKCNECGKSFISRSGLTKHQTKHTAESLKTKFNVEKPLDVLLTSGFK

SEQ ID NO: 5224 - protein, 344 aa, Homo sapiens
MELLTNNLKFITDPFVCRLRHLSPTPSEEHMKNKNNVTEFILLGLTQNPEGQKVLFVTFLLIYMVTIMGNLLIIVTIMASQSLGSPMYFFLASLSFIDTVYSTAFAPKMIVDLLSEKKTISFQGCMAQLFMDHLFAGAEVILLVVMAYDRYMAICKPLHELITMNRRVCVLMLLAAWIGGFLHSLVQFLFIYQLPFCGPNVIDNFLCDLYPLLKLACTNTYVTGLSMIANGGAICAVTFFTILLSYGVILHSLKTQSLEGKRKAFYTCASHVTVVILFFVPCIFLYARPNSTFPIDKSMTVVLTFITPMLNPLIYTLKNAEMKSAMRKLWSKKVSLAGKWLYHS

SEQ ID NO: 5225 - protein, 457 aa, Homo sapiens
MFPKFSLRSMFHGAGGGNDIQWCFSQVKGAVDDDVAEADIISTVEFNHSGELLATGDKGGRVVIFQQEQENKIQSHSRGEYNVYSTFQSHEPEFDYLKSLEIEEKINKIRWLPQKNAAQFLLSTNDKTIKLWKISERDKRPEGYNLKEEDGRYRDPTTVTTLRVPVFRPMDLMVEASPRRIFANAHTYHINSISINSDYETYLSADDLRINLWHLEITDRSFNIVDIKPANMEELTEVITAAEFHPNSCNTFVYSSSKGTIRLCDMRASALCDRHSKLFEEPEDPSNRSFFSEIISSISDVKFSHSGRYMMTRDYLSVKIWDLNMENRPVETYQVHEYLRSKLCSLYENDCIFDKFECCWNGSDSVVMTGSYNNFFRMFDRNTKRDITLEASRENNKPRTVLKPRKVCASGKRKKDEISVDSLDFNKKILHTAWHPKENIIAVATTNNLYIFQDKVN

SEQ ID NO: 5226 - protein, 328 aa, Homo sapiens
MGHQNHTFSSDFILLGLFSSSPTSVVFFLVLFVIFIMSVTENTLMILLIRSDSRLHTPMYFLLSHLSLMDILHVSNIVPKMVTNFLSGSRTISFAGCGFQVFLSLTLLGGECLLLAAMSCDRYVAICHPLRYPILMKEYASALMAGGSWLIGVFNSTVHTAYALQFPFCGSRAIDHFFCEVPAMLKLSCADTTRYERGVCVSAVIFLLIPFSLISASYGQIILTVLQMKSSEARKKSFSTCSFHMIVVTMYYGPFIFTYMRPKSYHTPGQDKFLAIFYTILTPTLNPFIYSFRNKDVLAVMKNMLKSNFLHKKMNRKIPECVFCLFLC

SEQ ID NO: 5227 - protein, 765 aa, Homo sapiens
MAASQGGGGNSGGGGCGGGGSSGGCGTAGGGGGGAGGGGGGGGGTLVVPIPVPTLFGQPFPNGPPWNPGSLQPQHTVRSLDRALEEAGSSGILSLSGRKLRDFPGSGYDLTDTTQADLSRNRFTEIPSDVWLFAPLETLNLYHNCIKTIPEAIKNLQMLTYLNISRNLLSTLPKYLFDLPLKVLVVSNNKLVSIPEEIGKLKDLMELDISCNEIQVLPQQMGKLHSLRELNIRRNNLHVLPDELGDLPLVKLDFSCNKVTEIPVCYRKLHHLQVIILDNNPLQVPPAQICLKGKVHIFKYLNIQACCRMDKKPDSLDLPSLSKRMPSQPLTDSMEDFYPNKNHGPDSGIGSDNGEKRLSTTEPSDDDTVSLHSQVSESNREQTSRNDSHIIGSKTDSQKDQEVYDFVDPNTEDVAVPEQGNAHIGSFVSFFKGKEKCSEKSRKNEELGDEKRLEKEQLLAEEEDDDLKEVTDLRKIAAQLLQQEQKNRILNHSTSVMRNKPKQTVECEKSVSADEVNSPLSPLTWQPLENQKDQIDEQPWPESHPIIWQSEERRRSKQIRKEYFKYKSMRKSSSGNENDEQDSDNANMSTQSPVSSEEYDRTDGFSHSPFGLKPRSAFSRSSRQEYGAADPGFTMRRKMEHLREEREQIRQLRNNLESRLKVILPDDIGAALMDGVVLCHLANHIRPRSVASIHVPSPAVPKLSMAKCRRNVENFLDACKKLGVSQERLCLPHHILEERGLVKVGVTVQALLELPTTKASQLSVA

SEQ ID NO: 5228 - protein, 933 aa, Homo sapiens
MTELKAKGPRAPHVAGGPPSPEVGSPLLCRPAAGPFPGSQTSDTLPEVSAIPISLDGLLFPRPCQGQDPSDEKTQDQQSLSDVEGAYSRAEATRGAGGSSSSPPEKDSGLLDSVLDTLLAPSGPGQSQPSPPACEVTSSWCLFGPELPEDPPAAPATQRVLSPLMSRSGCKVGDSSGTAAAHKVLPRGLSPARQLLLPASESPHWSGAPVKPSPQAAAVEVEEEDGSESEESAGPLLKGKPRALGGAAAGGGAAAVPPGAAAGGVALVPKEDSRFSAPRVALVEQDAPMAPGRSPLATTVMDFIHVPILPLNHALLAARTRQLLEDESYDGGAGAASAFAPPRSSPCASSTPVAVGDFPDCAYPPDAEPKDDAYPLYSDFQPPALKIKEEEEGAEASARSPRSYLVAGANPAAFPDFPLGPPPPLPPRATPSRPGEAAVTAAPASASVSSASSSGSTLECILYKAEGAPPQQGPFAPPPCKAPGASGCLLPRDGLPSTSASAAAAGAAPALYPALGLNGLPQLGYQAAVLKEGLPQVYPPYLNYLRPDSEASQSPQYSFESLPQKICLICGDEASGCHYGVLTCGSCKVFFKRAMEGQHNYLCAGRNDCIVDKIRRKNCPACRLRKCCQAGMVLGGRKFKKFNKVRVVRALDAVALPQPVGVPNESQALSQRFTFSPGQDIQLIPPLINLLMSIEPDVIYAGHDNTKPDTSSSLLTSLNQLGERQLLSVVKWSKSLPGFRNLHIDDQITLIQYSWMSLMVFGLGWRSYKHVSGQMLYFAPDLILNEQRMKESSFYSLCLTMWQIPQEFVKLQVSQEEFLCMKVLLLLNTIPLEGLRSQTQFEEMRSSYIRELIKAIGLRQKGVVSSSQRFYQLTKLLDNLHDLVKQLHLYCLNTFIQSRALSVEFPEMMSEVIAAQLPKILAGMVKPLLFHKK

SEQ ID NO: 5229 - protein, 613 aa, Homo sapiens
MMAADIPRVTTPLSSLVQVPQEEDRQEEEVTTMILEDDSWVQEAVLQEDGPESEPFPQSAGKGGPQEEVTRGPQGALGRLRELCRRWLRPEVHTKEQMLTMLPKEIQAWLQEHRPESSEEAAALVEDLTQTLQDNFEIQSENGENCNQDMFENESRKIFSEMPEGESAQHSDGESDFERDAGIQRLQGHSPGEDHGEVVSQDREVGQLIGLQGTYLGEKPYECPQCGKTFSRKSHLITHERTHTGEKYYKCDECGKSFSDGSNFSRHQTTHTGEKPYKCRDCGKSFSRSANLITHQRIHTGEKPFQCAECGKSFSRSPNLIAHQRTHTGEKPYSCPECGKSFGNRSSLNTHQGIHTGEKPYECKECGESFSYNSNLIRHQRIHTGEKPYKCTDCGQRFSQSSALITHRRTHTGEKPYQCSECGKSFSRSSNLATHRRTHMVEKPYKCGVCGKSFSQSSSLIAHQGMHTGEKPYECLTCGESFSWSSNLLKHQRIHTGEKPYKCSECGKCFSQRSQLVVHQRTHTGEKPYKCLMCGKSFSRGSILVMHQRAHLGDKPYRCPECGKGFSWNSVLIIHQRIHTGEKPYKCPECGKGFSNSSNFITHQRTHMKEKLY

SEQ ID NO: 5230 - protein, 328 aa, Homo sapiens
MRPSSNVTEFVLLGLTQDPDVKKTLFVMFLLIYIVTMVGNLLIWVTTIGSPSLGSLMYFFLAYLSLMDAIYSTAMSPKLMIDLLCDKIAISLSACMGQLFIEHLLGGAEVFLLVVMAYDRYVAISKPLHYLNIMNRLVCILLLVVAMIGGFVHSVVQIVFLYSLPICGPNVIDHSVCDMYPLLELLCLDTYFIGLTVVANGGIICMVIFTFLLISCGVILNFLKTYSQEERHKALPTCISHIIVVALVFVPCIFMYVRPVSNFPFDKLMTVFYSIITLMLNPLIYSLRQSEMKNAMKNLWCEKLSIVRKRVSPTLNIFIPSSKATNRR

SEQ ID NO: 5231 - protein, 1059 aa, Homo sapiens
MCVRSCFQSPRLQWVWRTAFLKHTQRRHQGSHRWTHLGGSTYRAVIFDMGGVLIPSPGRVAAEWEVQNRIPSGTILKALMEGGENGPWMRFMRAEITAEGFLREFGRLCSEMLKTSVPVDSFFSLLTSERVAKQFPVMTEAITQIRAKGLQTAVLSNNFYLPNQKSFLPLDRKQFDVIVESCMEGICKPDPRIYKLCLEQLGLQPSESIFLDDLGTNLKEAARLGIHTIKVNDPETAVKELEALLGFTLRVGVPNTRPVKKTMEIPKDSLQKYLKDLLGIQTTGPLELLQFDHGQSNPTYYIRLANRDLVLRKKPPGTLLPSAHAIEREFRIMKALANAGVPVPNVLDLCEDSSVIGTPFYVMEYCPGLIYKDPSLPGLEPSHRRAIYTAMNTVLCKIHSVDLQAVGLEDYGKQGDYIPRQVRTWVKQYRASETSTIPAMERLIEWLPLHLPRQQRTTVVHGDFRLDNLVFHPEEPEVLAVLDWELSTLGDPLADVAYSCLAHYLPSSFPVLRGINDCDLTQLGIPAAEEYFRMYCLQMGLPPTENWNFYMAFSFFRVAAILQGVYKRSLTGQASSTYAEQTGKLTEFVSNLAWDFAVKEGFRVFKEMPFTNPLTRSYHTWARPQSQWCPTGSRSYSSVPEASPAHTSRGGLVISPESLSPPVRELYHRLKHFMEQRVYPAEPELQSHQASAARWSPSPLIEDLKEKAKAEGLWNLFLPLEADPEKKYGAGLTNVEYAHLCELMGTSLYAPEVCNCSAPDTGNMELLVRYGTEAQKARWLIPLLEGKARSCFAMTEPQVASSDATNIEASIREEDSFYVINGHKWWITGILDPRCQLCVFMGKTDPHAPRHRQQSVLLVPMDTPGIKIIRPLTVYGLEDAPGGHGEVRFEHVRVPKENMVLGPGRGFEIAQGRLGPGRIHHCMRLIGFSERALALMKARVKSRLAFGKPLVEQGTVLADIAQSRVEIEQARLLVLRAAHLMDLAGNKAAALDIAMIKMVAPSMASRVIDRAIQAFGAAGLSSDYPLAQFFTWARALRFADGPDEVHRATVAKLELKHRI

SEQ ID NO: 5232 - protein, 3063 aa, Homo sapiens
MRSRLPPALAALGAALLLSSIEAEVDPPSDLNFKIIDENTVHMSWAKPVDPIVGYRITVDPTTDGPTKEFTLSASTTETLLSELVPETEYVVTITSYDEVEESVPVIGQLTIQTGSSTKPVEKKPGKTEIQKCSVSAWTDLVFLVDGSWSVGRNNFKYILDFIAALVSAFDIGEEKTRVGVVQYSSDTRTEFNLNQYYQRDELLAAIKKIPYKGGNTMTGDAIDYLVKNTFTESAGARVGFPKVAIIITDGKSQDEVEIPARELRNVGVEVFSLGIKAADAKELKQIASTPSLNHVFNVANFDAIVDIQNEIISQVCSGVDEQLGELVSGEEVVEPPSNLIAMEVSSKYVKLNWNPSPSPVTGYKVILTPMTAGSRQHALSVGPQTTTLSVRDLSADTEYQISVSAMKGMTSSEPISIMEKTQPMKVQVECSRGVDIKADIVFLVDGSYSIGIANFVKVRAFLEVLVKSFEISPNRVQISLVQYSRDPHTEFTLKKFTKVEDIIEAINTFPYRGGSTNTGKAMTYVREKIFVPSKGSRSNVPKVMILITDGKSSDAFRDPAIKLRNSDVEIFAVGVKDAVRSELEAIASPPAETHVFTVEDFDAFQRISFELTQSICLRIEQELAAIKKKAYVPPKDLSFSEVTSYGFKTNWSPAGENVFSYHITYKEAAGDDEVTVVEPASSTSVVLSSLKPETLYLVNVTAEYEDGFSIPLAGEETTEEVKGAPRNLKVTDETTDSFKITWTQAPGRVLRYRIIYRPVAGGESREVTTPPNQRRRTLENLIPDTKYEVSVIPEYFSGPGTPLTGNAATEEVRGNPRDLRVSDPTTSTMKLSWSGAPGKVKQYLVTYTPVAGGETQEVTVRGDTTNTVLQGLKEGTQYALSVTALYASGAGDALFGEGTTLEERGSPQDLVTKDITDTSIGAYWTSAPGMVRGYRVSWKSLYDDVDTGEKNLPEDAIHTMIENLQPETKYRISVFATYSSGEGEPLTGDATTELSQDSKTLKVDEETENTMRVTWKPAPGKVVNYRVVYRPHGRGKQMVAKVPPTVTSTVLKRLQPQTTYDITVLPIYKMGEGKLRQGSGTTASRFKSPRNLKTSDPTMSSFRVTWEPAPGEVKGYKVTFHPTGDDRRLGELVVGPYDNTVVLEELRAGTTYKVNVFGMFDGGESSPLVGQEMTTLSDTTVMPILSSGMECLTRAEADIVLLVDGSWSIGRANFRTVRSFISRIVEVFDIGPKRVQIALAQYSGDPRTEWQLNAHRDKKSLLQAVANLPYKGGNTLTGMALNFIRQQNFRTQAGMRPRARKIGVLITDGKSQDDVEAPSKKLKDEGVELFAIGIKNADEVELKMIATDPDDTHAYNVADFESLSRIVDDLTINLCNSVKGPGDLEAPSNLVISERTHRSFRVSWTPPSDSVDRYKVEYYPVSGGKRQEFYVSRMETSTVLKDLKPETEYVVNVYSVVEDEYSEPLKGTEKTLPVPVVSLNIYDVGPTTMHVQWQPVGGATGYILSYKPVKDTEPTRPKEVRLGPTVNDMQLTDLVPNTEYAVTVQAVLHDLTSEPVTVREVTLPLPRPQDLKLRDVTHSTMNVFWEPVPGKVRKYIVRYKTPEEDVKEVEVDRSETSTSLKDLFSQTLYTVSVSAVHDEGESPPVTAQETTRPVPAPTNLKITEVTSEGFRGTWDHGASDVSLYRITWAPFGSSDKMETILNGDENTLVFENLNPNTIYEVSITAIYPDESESDDLIGSERTLPILTTQAPKSGPRNLQVYNATSNSLTVKWDPASGRVQKYRITYQPSTGEGNEQTTTIGGRQNSVVLQKLKPDTPYTITVSSLYPDGEGGRMTGRGKTKPLNTVRNLRVYDPSTSTLNVRWDHAEGNPRQYKLFYAPAAGGPEELVPIPGNTNYAILRNLQPDTSYTVTVVPVYTEGDGGRTSDTGRTLMRGLARNVQVYNPTPNSLDVRWDPAPGPVLQYRVVYSPVDGTRPSESIVVPGNTRMVHLERLIPDTLYSVNLVALYSDGEGNPSPAQGRTLPRSGPRNLRVFGETTNSLSVAWDHADGPVQQYRIIYSPTVGDPIDEYTTVPGRRNNVILQPLQPDTPYKITVIAVYEDGDGGHLTGNGRTVGLLPPQNIHISDEWYTRFRVSWDPSPSPVLGYKIVYKPVGSNEPMEAFVGEMTSYTLHNLNPSTTYDVNVYAQYDSGLSVPLTDQGTTLYLNVTDLKTYQIGWDTFCVKWSPHRAATSYRLKLSPADGTRGQEITVRGSETSHCFTGLSPDTDYGVTVFVQTPNLEGPGVSVKEHTTVKPTEAPTEPPTPPPPPTIPPARDVCKGAKADIVFLTDASWSIGDDNFNKVVKFIFNTVGGFDEISPAGIQVSFVQYSDEVKSEFKLNTYNDKALALGALQNIRYRGGNTRTGKALTFIKEKVLTWESGMRKNVPKVLVVVTDGRSQDEVKKAALVIQQSGFSVFVVGVADVDYNELANIASKPSERHVFIVDDFESFEKIEDNLITFVCETATSSCPLIYLDGYTSPGFKMLEAYNLTEKNFASVQGVSLESGSFPSYSAYRIQKNAFVNQPTADLHPNGLPPSYTIILLFRLLPETPSDPFAIWQITDRDYKPQVGVIADPSSKTLSFFNKDTRGEVQTVTFDTEEVKTLFYGSFHKVHIVVTSKSVKIYIDCYEIIEKDIKEAGNITTDGYEILGKLLKGERKSAAFQIQSFDIVCSPVWTSRDRCCDIPSRRDEGKCPAFPNSCTCTQDSVGPPGPPGPAGGPGAKGPRGERGISGAIGPPGPRGDIGPPGPQGPPGPQGPNGLSIPGEQGRQGMKGDAGEPGLPGRTGTPGLPGPPGPMGPPGDRGFTGKDGAMGPRGPPGPPGSPGSPGVTGPSGKPGKPGDHGRPGPSGLKGEKGDRGDIASQNMMRAVARQVCEQLISGQMNRFNQMLNQIPNDYQSSRNQPGPPGPPGPPGSAGARGEPGPGGRPGFPGTPGMQGPPGERGLPGEKGERGTGSSGPRGLPGPPGPQGESRTGPPGSTGSRGPPGPPGRPGNSGIRGPPGPPGYCDSSQCASIPYNGQGYPGSG

SEQ ID NO: 5233 - protein, 1411 aa, Homo sapiens
MAEARKRRELLPLIYHHLLRAGYVRAAREVKEQSGQKCFLAQPVTLLDIYTHWQQTSELGRKRKAEEDAALQAKKTRVSDPISTSESSEEEEEAEAETAKATPRLASTNSSVLGADLPSSMKEKAKAETEKAGKTGNSMPHPATGKTVANLLSGKSPRKSAEPSANTTLVSETEEEGSVPAFGAAAKPGMVSAGQADSSSEDTSSSSDETDVEVKASEKILQVRAASAPAKGTPGKGATPAPPGKAGAVASQTKAGKPEEDSESSSEESSDSEEETPAAKALLQAKASGKTSQVGAASAPAKESPRKGAAPAPPGKTGPAVAKAQAGKREEDSQSSSEESDSEEEAPAQAKPSGKAPQVRAASAPAKESPRKGAAPAPPRKTGPAAAQVQVGKQEEDSRSSSEESDSDREALAAMNAAQVKPLGKSPQVKPASTMGMGPLGKGAGPVPPGKVGPATPSAQVGKWEEDSESSSEESSDSSDGEVPTAVAPAQEKSLGNILQAKPTSSPAKGPPQKAGPVAVQVKAEKPMDNSESSEESSDSADSEEAPAAMTAAQAKPALKIPQTKACPKKTNTTASAKVAPVRVGTQAPRKAGTATSPAGSSPAVAGGTQRPAEDSSSSEESDSEEEKTGLAVTVGQAKSVGKGLQVKAASVPVKGSLGQGTAPVLPGKTGPTVTQVKAEKQEDSESSEEESDSEEAAASPAQVKTSVKKTQAKANPAAARAPSAKGTISAPGKVVTAAAQAKQRSPSKVKPPVRNPQNSTVLARGPASVPSVGKAVATAAQAQTGPEEDSGSSEEESDSEEEAETLAQVKPSGKTHQIRAALAPAKESPRKGAAPTPPGKTGPSAAQAGKQDDSGSSSEESDSDGEAPAAVTSAQVIKPPLIFVDPNRSPAGPAATPAQAQAASTPRKARASESTARSSSSESEDEDVIPATQCLTPGIRTNVVTMPTAHPRIAPKASMAGASSSKESSRISDGKKQEGPATQVSKKNPASLPLTQAALKVLAQKASEAQPPVARTQPSSGVDSAVGTLPATSPQSTSVQAKGTNKLRKPKLPEVQQATKAPESSDDSEDSSDSSSGSEEDGEGPQGAKSAHTLGPTPSRTETLVEETAAESSEDDVVAPSQSLLSGYMTPGLTPANSQASKATPKLDSSPSVSSTLAAKDDPDGKQEAKPQQAAGMLSPKTGGKEAASGTTPQKSRKPKKGAGNPQASTLALQSNITQCLLGQPWPLNEAQVQASVVKVLTELLEQERKKVVDTTKESSRKGWESRKRKLSGDQPAARTPRSKKKKKLGAGEGGEASVSPEKTSTTSKGKAKRDKASGDVKEKKGKGSLGSQGAKDEPEEELQKGMGTVEGGDQSNPKSKKEKKKSDKRKKDKEKKEKKKKAKKASTKDSESPSQKKKKKKKKTAEQTV

SEQ ID NO: 5234 - protein, 1183 aa, Homo sapiens
MQLKIMPKKKRLSAGRVPLILFLCQMISALEVPLDLVQPPTITQQSPKDYIIDPRENIVIQCEAKGKPPPSFSWTRNGTHFDIDKDPLVTMKPGTGTLIINIMSEGKAETYEGVYQCTARNERGAAVSNNIVVRPSRSPLWTKEKLEPITLQSGQSLVLPCRPPIGLPPPIIFWMDNSFQRLPQSERVSQGLNGDLYFSNVLPEDTREDYICYARFNHTQTIQQKQPISVKVISVDELNDTIAANLSDTEFYGAKSSRERPPTFLTPEGNASNKEELRGNVLSLECIAEGLPTPIIYWAKEDGMLPKNRTVYKNFEKTLQIIHVSEADSGNYQCIAKNALGAIHHTISVRVKAAPYWITAPQNLVLSPGEDGTLICRANGNPKPRISWLTNGVPIEIAPDDPSRKIDGDTIIFSNVQERSSAVYQCNASNEYGYLLANAFVNVLAEPPRILTPANTLYQVIANRPALLDCAFFGSPLPTIEWFKGAKGSALHEDIYVLHENGTLEIPVAQKDSTGTYTCVARNKLGMAKNEVHLEIKDPTWIVKQPEYAVVQRGSMVSFECKVKHDHTLSLTVLWLKDNRELPSDERFTVDKDHLVVADVSDDDSGTYTCVANTTLDSVSASAVLSVVDVPNPPFDLELTDQLDKSVQLSWTPGDDNNSPITKFIIEYEDAMHKPGLWHHQTEVSGTQTTAQLKLSPYVNYSFRVMAVNSIGKSLPSEASEQYLTKASEPDKNPTAVEGLGSEPDNLVITWKPLNGFESNGPGLQYKVSWRQKDGDDEWTSVVVANVSKYIVSGTPTFVPYLIKVQALNDMGFAPEPAVVMGHSGEDLPMVAPGNVRVNVVNSTLAEVHWDPVPLKSIRGHLQGYRIYYWKTQSSSKRNRRHIEKKILTFQGSKTHGMLPGLEPFSHYTLNVRVVNGKGEGPASPDRVFNTPEGVPSAPSSLKIVNPTLDSLTLEWDPPSHPNGILTEYTLKYQPINSTHELGPLVDLKIPANKTRWTLKNLNFSTRYKFYFYAQTSAGSGSQITEEAVTTVDEAMASRQVDIATQGWFIGLMCAVALLILILLIVCFIRRNKGGKYPVKEKEDAHADPEIQPMKEDDGTFGEYSDAEDHKPLKKGSRTPSDRTVKKEDSDDSLVDYGEGVNGQFNEDGSFIGQYSGKKEKEPAEGNESSEAPSPVNAMNSFV

SEQ ID NO: 5235 - protein, 1195 aa, Homo sapiens
MGEEGPPSLEYIQAKDLFPPKELVKEEENLQVPFTVLQGEGVEFLGRAADALIAISNYRLHIKFKDSVINVPLRMIDSVESRDMFQLHISCKDSKVVRCHFSTFKQCQEWLSRLSRATARPAKPEDLFAFAYHAWCLGLTEEDQHTHLCQPGEHIRCRQEAELARMGFDLQNVWRVSHINSNYKLCPSYPQKLLVPVWITDKELENVASFRSWKRIPVVVYRHLRNGAAIARCSQPEISWWGWRNADDEYLVTSIAKACALDPGTRATGGSLSTGNNDTSEACDADFDSSLTACSGVESTAAPQKLLILDARSYTAAVANRAKGGGCECEEYYPNCEVVFMGMANIHAIRNSFQYLRAVCSQMPDPSNWLSALESTKWLQHLSVMLKAAVLVANTVDREGRPVLVHCSDGWDRTPQIVALAKILLDPYYRTLEGFQVLVESDWLDFGHKFGDRCGHQENVEDQNEQCPVFLQWLDSVHQLLKQFPCLFEFNEAFLVKLVQHTYSCLYGTFLANNPCEREKRNIYKRTCSVWALLRAGNKNFHNFLYTPSSDMVLHPVCHVRALHLWTAVYLPASSPCTLGEENMDLYLSPVAQSQEFSGRSLDRLPKTRSMDDLLSACDTSSPLTRTSSDPNLNNHCQEVRVGLEPWHSNPEGSETSFVDSGVGGPQQTVGEVGLPPPLPSSQKDYLSNKPFKSHKSCSPSYKLLNTAVPREMKSNTSDPEIKVLEETKGPAPDPSAQDELGRTLDGIGEPPEHCPETEAVSALSKVISNKCDGVCNFPESSQNSPTGTPQQAQPDSMLGVPSKCVLDHSLSTVCNPPSAACQTPLDPSTDFLNQDPSGSVASISHQEQLSSVPDLTHGEEDIGKRGNNRNGQLLENPRFGKMPLELVRKPISQSQISEFSFLGSNWDSFQGMVTSFPSGEATPRRLLSYGCCSKRPNSKQMRATGPCFGGQWAQREGVKSPVCSSHSNGHCTGPGGKNQMWLSSHPKQVSSTKPVPLNCPSPVPPLYLDDDGLPFPTDVIQHRLRQIEAGYKQEVEQLRRQVRELQMRLDIRHCCAPPAEPPMDYEDDFTCLKESDGSDTEDFGSDHSEDCLSEASWEPVDKKETEVTRWVPDHMASHCYNCDCEFWLAKRRHHCRNCGNVFCAGCCHLKLPIPDQQLYDPVLVCNSCYEHIQVSRARELMSQQLKKPIATASS

SEQ ID NO: 5236 - protein, 798 aa, Homo sapiens
MAASLPGPGSRLFRTYGAADGRRQRRPGREAAQWFPPQDRRRFFNSSGSSDASIGDPSQSDDPDDPDDPDFPGSPVRRRRRRPGGRVPKDRPSLTVTPKRWKLRARPSLTVTPRRLGLRARPPQKCSTPCGPLRLPPFPSRDSGRLSPDLSVCGQPRDGDELGISASLFSSLASPCPGSPTPRDSVISIGTSACLVAASAVPSGLHLPEVSLDRASLPCSQEEATGGAKDTRMVHQTRASLRSVLFGLMNSGTPEDSEFRADGKNMRESCCKRKLVVGNGPEGPGLSSTGKRRATGQDSCQERGLQEAVRREHQEASVPKGRIVPRGIDRLERTRSSRKSKHQEATETSLLHSHRFKKGQKLGKDSFPTQDLTPLQNVCFWTKTRASFSFHKKKIVTDVSEVCSIYTTATSLSGSLLSECSNRPVMNRTSGAPSSWHSSSMYLLSPLNTLSISNKKASDAEKVYGECSQKGPVPFSHCLPTEKLQRCEKIGEGVFGEVFQTIADHTPVAIKIIAIEGPDLVNGSHQKTFEEILPEIIISKELSLLSGEVCNRTEGFIGLNSVHCVQGSYPPLLLKAWDHYNSTKGSANDRPDFFKDDQLFIVLEFEFGGIDLEQMRTKLSSLATAKSILHQLTASLAVAEASLRFEHRDLHWGNVLLKKTSLKKLHYTLNGKSSTIPSCGLQVSIIDYTLSRLERDGIVVFCDVSMDEDLFTGDGDYQFDIYRLMKKENNNRWGEYHPYSNVLWLHYLTDKMLKQMTFKTKCNTPAMKQIKRKIQEFHRTMLNFSSATDLLCQHSLFK

SEQ ID NO: 5237 - protein, 805 aa, Homo sapiens
MNAVGSPEGQELQKLGSGAWDNPAYSGPPSPHGTLRVCTISSTGPLQPQPKKPEDEPQETAYRTQVSSCCLHICQGIRGLWGTTLTENTAENRELYIKTTLRELLVYIVFLVDICLLTYGMTSSSAYYYTKVMSELFLHTPSDTGVSFQAISSMADFWDFAQGPLLDSLYWTKWYNNQSLGHGSHSFIYYENMLLGVPRLRQLKVRNDSCVVHEDFREDILSCYDVYSPDKEEQLPFGPFNGTAWTYHSQDELGGFSHWGRLTSYSGGGYYLDLPGSRQGSAEALRALQEGLWLDRGTRVVFIDFSVYNANINLFCVLRLVVEFPATGGAIPSWQIRTVKLIRYVSNWDFFIVGCEVIFCVFIFYYVVEEILELHIHRLRYLSSIWNILDLVVILLSIVAVGFHIFRTLEVNRLMGKLLQQPNTYADFEFLAFWQTQYNNMNAVNLFFAWIKIFKYISFNKTMTQLSSTLARCAKDILGFAVMFFIVFFAYAQLGYLLFGTQVENFSTFIKCIFTQFRIILGDFDYNAIDNANRILGPAYFVTYVFFVFFVLLNMFLAIINDTYSEVKEELAGQKDELQLSDLLKQGYNKTLLRLRLRKERVSDVQKVLQGGEQEIQFEDFTNTLRELGHAEHEITELTATFTKFDRDGNRILDEKEQEKMRQDLEEERVALNTEIEKLGRSIVSSPQGKSGPEAARAGGWVSGEEFYMLTRRVLQLETVLEGVVSQIDAVGSKLKMLERKGWLAPSPGVKEQAIWKHPQPAPAVTPDPWGVQGGQESEVPYKREEEALEERRLSRGEIPTLQRS

SEQ ID NO: 5238 - protein, 452 aa, Homo sapiens
MQRQAPYNIRRSSTSGDTEEEEEEEVVPFSSDEQKRRSEAASGVLRRTAPREHSYVLSAAKKSTGSPTQETQAPFIAKRVEVVEEDGPSEKSQDPPALARSTPGSNSSRGEEIVRLQILTPRAGLRLVAPDVEGMSSSATSVSAVPADRKSNSTAAQEDAKADPKGALADYEGKDVATRVGEAWQERPGAPRGGQGDPAVPAQQPADPSTPERQSSPSGSEQLVRRESCGSSVLTDFEGKDVATKVGEAWQDRPGAPRGGQGDPAVPTQQPADPSTPEQQNSPSGSEQFVRRESCTSRVRSPSSCMVTVTVTATSEQPHIYIPAPASELDSSSTTKGILFVKEYVNASEVSSGKPVSARYSNVSSIEDSFAMEKKPPCGSTPYSERTTGGICTYCNREIRDCPKITLEHLGICCHEYCFKCGICSKPMGDLLDQIFIHRDTIHCGKCYEKLF

SEQ ID NO: 5239 - protein, 1059 aa, Homo sapiens
MAAVAGSGAAAAPSSLLLVVGSEFGSPGLLTYVLEELERGIRSWDVDPGVCNLDEQLKVFVSRHSATFSSIVKGQRSLHHRGDNLETLVLLNPSDKSLYDELRNLLLDPASHKLLVLAGPCLEETGELLLQTGGFSPHHFLQVLKDREIRDILATTPPPVQPPILTITCPTFGDWAQLAPAVPGLQGALRLQLRLNPPAQLPNSEGLCEFLEYVAESLEPPSPFELLEPPTSGGFLRLGRPCCYIFPGGLGDAAFFAVNGFTVLVNGGSNPKSSFWKLVRHLDRVDAVLVTHPGADSLPGLNSLLRRKLAERSEVAAGGGSWDDRLRRLISPNLGVVFFNACEAASRLARGEDEAELALSLLAQLGITPLPLSRGPVPAKPTVLFEKMGVGRLDMYVLHPPSAGAERTLASVCALLVWHPAGPGEKVVRVLFPGCTPPACLLDGLVRLQHLRFLREPVVTPQDLEGPGRAESKESVGSRDSSKREGLLATHPRPGQERPGVARKEPARAEAPRKTEKEAKTPRELKKDPKPSVSRTQPREVRRAASSVPNLKKTNAQAAPKPRKAPSTSHSGFPPVANGPRSPPSLRCGEASPPSAACGSPASQLVATPSLELGPIPAGEEKALELPLAASSIPRPRTPSPESHRSPAEGSERLSLSPLRGGEAGPDASPTVTTPTVTTPSLPAEVGSPHSTEVDESLSVSFEQVLPPSAPTSEAGLSLPLRGPRARRSASPHDVDLCLVSPCEFEHRKAVPMAPAPASPGSSNDSSARSQERAGGLGAEETPPTSVSESLPTLSDSDPVPLAPGAADSDEDTEGFGVPRHDPLPDPLKVPPPLPDPSSICMVDPEMLPPKTARQTENVSRTRKPLARPNSRAAAPKATPVAAAKTKGLAGGDRASRPLSARSEPSEKGGRAPLSRKSSTPKTATRGPSGSASSRPGVSATPPKSPVYLDLAYLPSGSSAHLVDEEFFQRVRALCYVISGQDQRKEEGMRAVLDALLASKQHWDRDLQVTLIPTFDSVAMHTWYAETHARHQALGITVLGSNSMVSMQDDAFPACKVEF

SEQ ID NO: 5240 - protein, 1342 aa, Homo sapiens
MEENEVESSSDAAPGPGRPEEPSESGLGVGTSEAVSADSSDAAAAPGQAEADDSGVGQSSDRGSRSQEEVSESSSSADPLPNSYLPDSSSVSHGPVAGVTGGPPALVHSSALPDPNMLVSDCTASSSDLGSAIDKIIESTIGPDLIQNCITVTSAEDGGAETTRYLILQGPDDGAPMTSPMSSSTLAHSLAAIEALADGPTSTSTCLEAQGGPSSPVQLPPASGAEEPDLQSLEAMMEVVVVQQFKCKMCQYRSSTKATLLRHMRERHFRPVAAAAAAAGKKGRLRKWSTSTKSQEEEGPEEEDDDDIVDAGAIDDLEEDSDYNPAEDEPRGRQLRLQRPTPSTPRPRRRPGRPRKLPRLEISDLPDGVEGEPLVSSQSGQSPPEPQDPEAPSSSGPGHLVAMGKVSRTPVEAGVSQSDAENAAPSCPDEHDTLPRRRGRPSRRFLGKKYRKYYYKSPKPLLRPFLCRICGSRFLSHEDLRFHVNSHEAGDPQLFKCLQCSYRSRRWSSLKEHMFNHVGSKPYKCDECSYTSVYRKDVIRHAAVHSRDRKKRPDPTPKLSSFPCPVCGRVYPMQKRLTQHMKTHSTEKPHMCDKCGKSFKKRYTFKMHLLTHIQAVANRRFKCEFCEFVCEDKKALLNHQLSHVSDKPFKCSFCPYRTFREDFLLSHVAVKHTGAKPFACEYCHFSTRHKKNLRLHVRCRHASSFEEWGRRHPEEPPSRRRPFFSLQQIEELKQQHSAAPGPPPSSPGPPEIPPEATTFQSSEAPSLLCSDTLGGATIIYQQGAEESTAMATQTALDLLLNMSAQRELGGTALQVAVVKSEDVEAGLASPGGQPSPEGATPQVVTLHVAEPGGGAAAESQLGPPDLPQITLAPGPFGGTGYSVITAPPMEEGTSAPGTPYSEEPAGEAAQAVVVSDTLKEAGTHYIMATDGTQLHHIELTADGSISFPSPDALASGAKWPLLQCGGLPRDGPEPPSPAKTHCVGDSQSSASSPPATSKALGLAVPPSPPSAATAASKKFSCKICAEAFPGRAEMESHKRAHAGPGAFKCPDCPFSARQWPEVRAHMAQHSSLRPHQCSQCSFASKNKKDLRRHMLTHTKEKPFACHLCGQRFNRNGHLKFHIQRLHSPDGRKSGTPTARAPTQTPTQTIILNSDDETLATLHTALQSSHGVLGPERLQQALSQEHIIVAQEQTVTNQEEAAYIQEITTADGQTVQHLVTSDNQVQYIISQDGVQHLLPQEYVVVPEGHHIQVQEGQITHIQYEQGAPFLQESQIQYVPVSPGQQLVTQAQLEAAAHSAVTAVADAAMAQAQGLFGTDETVPEHIQQLQHQGIEYDVITLADD

SEQ ID NO: 5241 - protein, 1202 aa, Homo sapiens
MGREQDLILAVKNGDVTGVQKLVAKVKATKTKLLGSTKRLNVNYQDADGFSALHHAALGGSLELIALLLEAQATVDIKDSNGMRPLHYAAWQGRLEPVRLLLRASAAVNAASLDGQIPLHLAAQYGHYEVSEMLLQHQSNPCLVNKAKKTPLDLACEFGRLKVAQLLLNSHLCVALLEGEAKDPCDPNYTTPLHLAAKNGHREVIRQLLRAGIEINRQTKTGTALHEAALYGKTEVVRLLLEGGVDVNIRNTYNQTALDIVNQFTTSQASREIKQLLREASGILKVRALKDFWNLHDPTALNVRAGDVITVLEQHPDGRWKGHIHESQRGTDRIGYFPPGIVEVVSKRVGIPAARLPSAPTPLRPGFSRTPQPPAEEPPHPLTYSQLPRVGLSPDSPAGDRNSVGSEGSVGSIRSAGSGQSSEGTNGHGPGLLIENAQPLPSAGEDQVLPGLHPPSLADNLSHRPLANCRSGEQIFTQDVRPEQLLEGKDAQAIHNWLSEFQLEGYTAHFLQAGYDVPTISRMTPEDLTAIGVTKPGHRKKIASEIAQLSIAEWLPSYIPTDLLEWLCALGLPQYHKQLVSSGYDSMGLVADLTWEELQEIGVNKLGHQKKLMLGVKRLAELRRGLLQGEALSEGGRRLAKGPELMAIEGLENGEGPATAGPRLLTFQGSELSPELQAAMAGGGPEPLPLPPARSPSQESIGARSRGSGHSQEQPAPQPSGGDPSPPQERNLPEGTERPPKLCSSLPGQGPPPYVFMYPQGSPSSPAPGPPPGAPWAFSYLAGPPATPPDPPRPKRRSHSLSRPGPTEGDAEGEAEGPVGSTLGSYATLTRRPGRSALVRTSPSVTPTPARGTPRSQSFALRARRKGPPPPPPKRLSSVSGPSPEPPPLDESPGPKEGATGPRRRTLSEPAGPSEPPGPPAPAGPASDTEEEEPGPEGTPPSRGSSGEGLPFAEEGNLTIKQRPKPAGPPPRETPVPPGLDFNLTESDTVKRRPKCREREPLQTALLAFGVASATPGPAAPLPSPTPGESPPASSLPQPEPSSLPAQGVPTPLAPSPAMQPPVPPCPGPGLESSAASRWNGETEPPAAPAALLKVPGAGTAPKPVSVACTQLAFSGPKLAPRLGPRPVPPPRPESTGTVGPGQAQQRLEQTSSSLAAALRAAEKSIGTKEQEGTPSASTKHILDDISTMFDALADQLDAMLD

SEQ ID NO: 5242 - protein, 730 aa, Homo sapiens
MAAGVEAAAEVAATEIKMEEESGAPGVPSGNGAPGPKGEGERPAQNEKRKEKNIKRGGNRFEPYANPTKRYRAFITNIPFDVKWQSLKDLVKEKVGEVTYVELLMDAEGKSRGCAVVEFKMEESMKKAAEVLNKHSLSGRPLKVKEDPDGEHARRAMQKVMATTGGMGMGPGGPGMITIPPSILNNPNIPNEIIHALQAGRLGSTVFVANLDYKVGWKKLKEVFSMAGVVVRADILEDKDGKSRGIGTVTFEQSIEAVQAISMFNGQLLFDRPMHVKMDERALPKGDFFPPERPQQLPHGLGGIGMGLGPGGQPIDANHLNKGIGMGNIGPAGMGMEGIGFGINKMGGMEGPFGGGMENMGRFGSGMNMGRINEILSNALKRGEIIAKQGGGGGGGSVPGIERMGPGIDRLGGAGMERMGAGLGHGMDRVGSEIERMGLVMDRMGSVERMGSGIERMGPLGLDHMASSIERMGQTMERIGSGVERMGAGMGFGLERMAAPIDRVGQTIERMGSGVERMGPAIERMGLSMERMVPAGMGAGLERMGPVMDRMATGLERMGANNLERMGLERMGANSLERMGLERMGANSLERMGPAMGPALGAGIERMGLAMGGGGGASFDRAIEMERGNFGGSFAGSFGGAGGHAPGVARKACQIFVRNLPFDFTWKMLKDKFNECGHVLYADIKMENGKSKGCGVVKFESPEVAERACRMMNGMKLSGREIDVRIDRNA

SEQ ID NO: 5243 - protein, 1336 aa, Homo sapiens
MATEIGSPPRFFHMPRFQHQAPRQLFYKRPDFAQQQAMQQLTFDGKRMRKAVNRKTIDYNPSVIKYLENRIWQRDQRDMRAIQPDAGYYNDLVPPIGMLNNPMNAVTTKFVRTSTNKVKCPVFVVRWTPEGRRLVTGASSGEFTLWNGLTFNFETILQAHDSPVRAMTWSHNDMWMLTADHGGYVKYWQSNMNNVKMFQAHKEAIREASFSPTDNKFATCSDDGTVRIWDFLRCHEERILRGHGADVKCVDWHPTKGLVVSGSKDSQQPIKFWDPKTGQSLATLHAHKNTVMEVKLNLNGNWLLTASRDHLCKLFDIRNLKEELQVFRGHKKEATAVAWHPVHEGLFASGGSDGSLLFWHVGVEKEVGGMEMAHEGMIWSLAWHPLGHILCSGSNDHTSKFWTRNRPGDKMRDRYNLNLLPGMSEDGVEYDDLEPNSLAVIPGMGIPEQLKLAMEQEQMGKDESNEIEMTIPGLDWGMEEVMQKDQKKVPQKKVPYAKPIPAQFQQAWMQNKVPIPAPNEVLNDRKEDIKLEEKKKTQAEIEQEMATLQYTNPQLLEQLKIERLAQKQVEQIQPPPSSGTPLLGPQPFPGQGPMSQIPQGFQQPHPSQQMPMNMAQMGPPGPQGQFRPPGPQGQMGPQGPPLHQGGGGPQGFMGPQGPQGPPQGLPRPQDMHGPQGMQRHPGPHGPLGPQGPPGPQGSSGPQGHMGPQGPPGPQGHIGPQGPPGPQGHLGPQGPPGTQGMQGPPGPRGMQGPPHPHGIQGGPGSQGIQGPVSQGPLMGLNPRGMQGPPGPRENQGPAPQGMIMGHPPQEMRGPHPPGGLLGHGPQEMRGPQEIRGMQGPPPQGSMLGPPQELRGPPGSQSQQGPPQGSLGPPPQGGMQGPPGPQGQQNPARGPHPSQGPIPFQQQKTPLLGDGPRAPFNQEGQSTGPPPLIPGLGQQGAQGRIPPLNPGQGPGPNKGDSRGPPNHHMGPMSERRHEQSGGPEHGPERGPFRGGQDCRGPPDRRGPHPDFPDDFSRPDDFHPDKRFGHRLREFEGRGGPLPQEEKWRRGGPGPPFPPDHREFSEGDGRGAARGPPGAWEGRRPGDERFPRDPEDPRFRGRREESFRRGAPPRHEGRAPPRGRDGFPGPEDFGPEENFDASEEAARGRDLRGRGRGTPRGGRKGLLPTPDEFPRFEGGRKPDSWDGNREPGPGHEHFRDTPRPDHPPHDGHSPASRERSSSLQGMDMASLPPRKRPWHDGPGTSEHREMEAPGGPSEDRGGKGRGGPGPAQRVPKSGRSSSLDGEHHDGYHRDEPFGGPPGSGTPSRGGRSGSNWGRGSNMNSGPPRRGASRGGGRGR

SEQ ID NO: 5244 - protein, 308 aa, Homo sapiens
MCLLLSSAVFGVKYNLLAHTTLTLESAEDSFKTHNLSINGNEESSFWLPLYGNMCCRLVAQPACMAEDAFAGFLNQQQMVEGLISWRRLYCVLRGGKLYCFYSPEEIEAKVEPALVVPINKSLVLFEDSLEGIQLAISQSFKETRIRAMDKDAKKRIHNFSVINPVPGQAITQIFAVDNREDLQKWMEAFWQHFFDLSQWKHCCEELMKIEIMSPRKPPLFLTKEATSVYHDMSIDSPMKLESLTDIIQKKIEETNGQFLIGQHEESLPPPWATLFDGNHQMVIQKKNNSNQLHNLQKLPATSKFLFT

SEQ ID NO: 5245 - protein, 314 aa, Homo sapiens
MGVKNHSTVTEFLLSGLTEQAELQLPLFCLFLGIYTVTVVGNLSMISIIRLNRQLHTPMYYFLSSLSFLDFCYSSVITPKMLSGFLCRDRSISYSGCMIQLFFFCVCVISECYMLAAMACDRYVAICSPLLYRVIMSPRVCSLLVAAVFSVGFTDAVIHGGCILRLSFCGSNIIKHYFCDIVPLIKLSCSSTYIDELLIFVIGGFNMVATSLTIIISYAFILTSILRIHSKKGRCKAFSTCSSHLTAVLMFYGSLMSMYLKPASSSSLTQEKVSSVFYTTVILMLNPLIYSLRNNEVRNALMKLLRRKISLSPG

SEQ ID NO: 5246 - protein, 84 aa, Homo sapiens
MVAGWLTNYSQDSVTFEDVAVDFTQEEWTLLDQTQRNLYRDVMLENYKNLVAVDWESHINTKWSAPQQNFLQGKTSSVVEMNSE

SEQ ID NO: 5247 - protein, 334 aa, Homo sapiens
MVGREKELSIHFVPGSCRLVEEEVNIPNRRVLVTGATGLLGRAVHKEFQQNNWHAVGCGFRRARPKFEQVNLLDSNAVHHIIHDFQPHVIVHCAAERRPDVVENQPDAASQLNVDASGNLAKEAAAVGAFLIYISSDYVFDGTNPPYREEDIPAPLNLYGKTKLDGEKAVLENNLGAAVLRIPILYGEVEKLEESAVTVMFDKVQFSNKSANMDHWQQRFPTHVKDVATVCRQLAEKRMLDPSIKGTFHWSGNEQMTKYEMACAIADAFNLPSSHLRPITDSPVLGAQRPRNAQLDCSKLETLGIGQRTPFRIGIKESLWPFLIDKRWRQTVFH

SEQ ID NO: 5248 - protein, 1743 aa, Homo sapiens
MHLLQAPASHEDLDAPHGGPSLAPPSTTTSSRDTPGPAGPAGRQPGRAGPDRTKGLAWSPGPSVQVSVAPAGLGGALSTVTIQAQQCLEGMWSVSRVNSFLPPACLAEAAVAAVAVADTVRECPPVAGPDGLSKAWGRGGVCTSALVTPTPGSVGGSTGPSAAASFFIRAMQKLSLASKRKKPHPPPPPATRGTSTYPTDFSGVLQLWPPPAPPCLLRAASKTKDNPGSIGKVKVMLRIWPAQGAQRSAEAMSFLKVDPRKKQVILYDPAAGPPGSAGPRRAATAAVPKMFAFDAVFPQDSEQAEVCSGTVADVLQSVVSGADGCIFSFGHMSLGKSYTMIGKDSSPQSLGIVPCAISWLFRLIEERRERTGTRFSVRVSAVEVCGRDQSLRDLLAEVAPGSLQDTQSPGVYLREDPVCGAQLQNQSELRAPTAEKAAFYLDAALAARSTSRAGCGEDARRSSHMLFTLHVYQYRMEKCGRGGMSGGRSRLHLIDLGSCEAAAGRAGEAAGGPLCLSLSALGSVILALVNGAKHVPYRDHRLTMLLRESLATAGCRTTMIAHVSDAPAQHAETLSTVQLAARIHRLRRKKAKYASSSSGGESSCEEGRARRPPHLRPFHPRTVALDPDRTPPCLPGDPDYSSSSEQSCDTVIYVGPGGAALSDRELTDNEGPPDFVPIIPALSRHRPSKGPRDADHFRCSTFAELQERLECMDGNEGPSGGPGGTDGAQASPARGGRKPSPPEAASPRKAVGTPMAASTPRGSSGPDTHQGTPEPCKAIVWGDQREDSSAWPELLVPEKAAVSGGRRPLPSPAPPPPQLLEACRAPEEPGGGGTDGVARTPPVGMSGQVAGSPMLPGATCPRLAAGSRCPERGLLTTTVTLQRPVELNGEDELVFTVVEELSLGALAGAGRPTSLASFDSDCSLRALASGSRPVSIISSINDEFDAYTSQAPEGGPLEGAAWAGSSHGSSISSWLSEVSVCTADSRDPTPQPRFSPDSLAGLDPGGPPALDGSLGDGSSGFLGPDRPDSPGPTWGPCPGEVAAVAPSRPGREPQAGPSRWASAAQTIHSSLPRKPRTASATTRVGCARLGQSPPGRGGLFEDPWLLRVGECDTQAASAGRAPSPTLGSPRLPEAQVMLACAQRVVDGCEVAARAARRPEAVARIPPLRRGATTLGVTTPAVSWGDAPTEVVACSGSLKASPTSKKGLAPKAGFLPRPSGAAPPAPPTRKSSLEQRSSPASAPPHAVNPARVGAAAVLRGEEEPRPSSRADHSVPRATSSLKARASKVEAAHRLAGHASLERYEGLAHSSSKGREAPGRPPRAVPKLGVPPSSPTHGPAPACRSGAAKAVGAPKPPVGGGKGRGLVAGGSRALGPSVKLSTASVTGRSPGGPVAGPRAAPRAGPSVGAKAGRGTVMGTKQALRAAHSRVHELSASGAPGRGGSSWGSADSDSGHDSGVNVGEERPPTGPALPSPYSKVTAPRRPQRYSSGHGSDNSSVLSGELPPAMGRTALFHHSGGSSGYESLRRDSEATGSASSAPDSMSESGAASPGARTRSLKSPKKRATGLQRRRLIPAPLPDTTALGRKPSLPGQWVDLPPPLAGSLKEPFEIKVYEIDDVERLQRPRPTPREAPTQGLACVSTRLRLAERRQQRLREVQAKHKHLCEELAETQGRLMLEPGRWLEQFEVDPELEPESAEYLAALERATAALEQCVNLCKAHVMMVTCFDISVAASAAIPGPQEVDV

SEQ ID NO: 5249 - protein, 940 aa, Homo sapiens
MGAARGSPARPRRLPLLSVLLLPLLGGTQTAIVFIKQPSSQDALQGRRALLRCEVEAPGPVHVYWLLDGAPVQDTERRFAQGSSLSFAAVDRLQDSGTFQCVARDDVTGEEARSANASFNIKWIEAGPVVLKHPASEAEIQPQTQVTLRCHIDGHPRPTYQWFRDGTPLSDGQSNHTVSSKERNLTLRPAGPEHSGLYSCCAHSAFGQACSSQNFTLSIADESFARVVLAPQDVVVARYEEAMFHCQFSAQPPPSLQWLFEDETPITNRSRPPHLRRATVFANGSLLLTQVRPRNAGIYRCIGQGQRGPPIILEATLHLAEIEDMPLFEPRVFTAGSEERVTCLPPKGLPEPSVWWEHAGVRLPTHGRVYQKGHELVLANIAESDAGVYTCHAANLAGQRRQDVNITVANGSSLPEWVTDNAGTLHFARVTRDDAGNYTCIASNGPQGQIRAHVQLTVAVFITFKVEPERTTVYQGHTALLQCEAQGDPKPLIQWKGKDRILDPTKLGPRMHIFQNGSLVIHDVAPEDSGRYTCIAGNSCNIKHTEAPLYVVDKPVPEESEGPGSPPPYKMIQTIGLSVGAAVAYIIAVLGLMFYCKKRCKAKRLQKQPEGEEPEMECLNGGPLQNGQPSAEIQEEVALTSLGSGPAATNKRHSTSDKMHFPRSSLQPITTLGKSEFGEVFLAKAQGLEEGVAETLVLVKSLQSKDEQQQLDFRRELEMFGKLNHANVVRLLGLCREAEPHYMVLEYVDLGDLKQFLRISKSKDEKLKSQPLSTKQKVALCTQVALGMEHLSNNRFVHKDLAARNCLVSAQRQVKVSALGLSKDVYNSEYYHFRQAWVPLRWMSPEAILEGDFSTKSDVWAFGVLMWEVFTHGEMPHGGQADDEVLADLQAGKARLPQPEGCPSKLYRLMQRCWALSPKDRPSFSEIASALGDSTVDSKP

SEQ ID NO: 5250 - protein, 392 aa, Homo sapiens
MATAAQGPLSLLWGWLWSERFWLPENVSWADLEGPADGYGYPRGRHILSVFPLAAGIFFVRLLFERFIAKPCALCIGIEDSGPYQAQPNAILEKVFISITKYPDKKRLEGLSKQLDWNVRKIQCWFRHRRNQDKPPTLTKFCESMWRFTFYLCIFCYGIRFLWSSPWFWDIRQCWHNYPFQPLSSGLYHYYIMELAFYWSLMFSQFTDIKRKDFLIMFVHHLVTIGLISFSYINNMVRVGTLIMCLHDVSDFLLEAAKLANYAKYQRLCDTLFVIFSAVFMVTRLGIYPFWILNTTLFESWEIIGPYASWWLLNGLLLTLQLLHVIWSYLIARIALKALIRGKVSKDDRSDVESSSEEEDVTTCTKSPCDSSSSNGANRVNGHMGGSYWAEE

SEQ ID NO: 5251 - protein, 775 aa, Homo sapiens
MMVQRLGLISPPASQVSTACNQISPSLQRAMNAANLNIPPSDTRSLISRESLASTTLSLTESQSASSMKQEWSQGYRALPSLSNHGSQNGLDLGDLLSLPPGTSMSSNSVSNSLPSYLFGTESSHSPYPSPRHSSTRSHSARSKKRALSLSPLSDGIGIDFNTIIRTSPTSLVAYINGSRASPANLSPQPEVYGHFLGVRGSCIPQPRPVPGSQKGVLVAPGGLALPAYGEDGALEHERMQQLEHGGLQPGLVNHMVVQHGLPGPDSQSAGLFKTERLEEFPGSTVDLPPAPPLPPLPPPPGPPPPYHAHAHLHHPELGPHAQQLALPQATLDDDGEMDGIGGKHCCRWIDCSALYDQQEELVRHIEKVHIDQRKGEDFTCFWAGCPRRYKPFNARYKLLIHMRVHSGEKPNKCTFEGCEKAFSRLENLKIHLRSHTGEKPYLCQHPGCQKAFSNSSDRAKHQRTHLDTKPYACQIPGCTKRYTDPSSLRKHVKAHSSKEQQARKKLRSSTELHPDLLTDCLTVQSLQPATSPRDAAAEGTVGRSPGPGPDLYSAPIFSSNYSSRSGTAAGAVPPPHPVSHPSPGHNVQGSPHNPSSQLPPLTAVDAGAERFAPSAPSPHHISPRRVPAPSSILQRTQPPYTQQPSGSHLKSYQPETNSSFQPNGIHVHGFYGQLQKFCPPHYPDSQRIVPPVSSCSVVPSFEDCLVPTSMGQASFDVFHRAFSTHSGITVYDLPSSSSSLFGESLRSGAEDATFLQISTVDRCPSQLSSVYTEG

SEQ ID NO: 5252 - protein, 354 aa, Homo sapiens
MGPVSLLPKYQKLNTWNGDLAKMTHLQAGLSPETIEKARLELNENPDVLHQDIQQVRDMIITRPDIGFLRTDDAFILRFLRARKFHQADAFRLLAQYFQYRQLNLDMFKNFKADDPGIKRALIDGFPGVLENRDHYGRKILLLFAANWDQSRNSFTDILRAILLSLEVLIEDPELQINGFILIIDWSNFSFKQASKLTPSILKLAIEGLQDSFPARFGGVHFVNQPWYIHALYTLIKPFLKDKTRKRIFLHGNNLNSLHQLIHPEFLPSEFGGTLPPYDMGTWARTLLGPDYSDENDYTHTSYNAMHVKHTSSNLERECSPKLMKRSQSVVEAGTLKHEEKGENENTQPLLALD

SEQ ID NO: 5253 - protein, 2871 aa, Homo sapiens
MRRGRLLEIALGFTVLLASYTSHGADANLEAGNVKETRASRAKRRGGGGHDALKGPNVCGSRYNAYCCPGWKTLPGGNQCIVPICRHSCGDGFCSRPNMCTCPSGQIAPSCGSRSIQHCNIRCMNGGSCSDDHCLCQKGYIGTHCGQPVCESGCLNGGRCVAPNRCACTYGFTGPQCERDYRTGPCFTVISNQMCQGQLSGIVCTKTLCCATVGRAWGHPCEMCPAQPHPCRRGFIPNIRTGACQDVDECQAIPGLCQGGNCINTVGSFECKCPAGHKLNEVSQKCEDIDECSTIPGICEGGECTNTVSSYFCKCPPGFYTSPDGTRCIDVRPGYCYTALTNGRCSNQLPQSITKMQCCCDAGRCWSPGVTVAPEMCPIRATEDFNKLCSVPMVIPGRPEYPPPPLGPIPPVLPVPPGFPPGPQIPVPRPPVEYLYPSREPPRVLPVNVTDYCQLVRYLCQNGRCIPTPGSYRCECNKGFQLDLRGECIDVDECEKNPCAGGECINNQGSYTCQCRAGYQSTLTRTECRDIDECLQNGRICNNGRCINTDGSFHCVCNAGFHVTRDGKNCEDMDECSIRNMCLNGMCINEDGSFKCICKPGFQLASDGRYCKDINECETPGICMNGRCVNTDGSYRCECFPGLAVGLDGRVCVDTHMRSTCYGGYKRGQCIKPLFGAVTKSECCCASTEYAFGEPCQPCPAQNSAEYQALCSSGPGMTSAGSDINECALDPDICPNGICENLRGTYKCICNSGYEVDSTGKNCVDINECVLNSLLCDNGQCRNTPGSFVCTCPKGFIYKPDLKTCEDIDECESSPCINGVCKNSPGSFICECSSESTLDPTKTICIETIKGTCWQTVIDGRCEININGATLKSQCCSSLGAAWGSPCTLCQVDPICGKGYSRIKGTQCEDIDECEVFPGVCKNGLCVNTRGSFKCQCPSGMTLDATGRICLDIRLETCFLRYEDEECTLPIAGRHRMDACCCSVGAAWGTEECEECPMRNTPEYEELCPRGPGFATKEITNGKPFFKDINECKMIPSLCTHGKCRNTIGSFKCRCDSGFALDSEERNCTDIDECRISPDLCGRGQCVNTPGDFECKCDEGYESGFMMMKNCMDIDECQRDPLLCRGGVCHNTEGSYRCECPPGHQLSPNISACIDINECELSAHLCPNGRCVNLIGKYQCACNPGYHSTPDRLFCVDIDECSIMNGGCETFCTNSEGSYECSCQPGFALMPDQRSCTDIDECEDNPNICDGGQCTNIPGEYRCLCYDGFMASEDMKTCVDVNECDLNPNICLSGTCENTKGSFICHCDMGYSGKKGKTGCTDINECEIGAHNCGKHAVCTNTAGSFKCSCSPGWIGDGIKCTDLDECSNGTHMCSQHADCKNTMGSYRCLCKEGYTGDGFTCTDLDECSENLNLCGNGQCLNAPGGYRCECDMGFVPSADGKACEDIDECSLPNICVFGTCHNLPGLFRCECEIGYELDRSGGNCTDVNECLDPTTCISGNCVNTPGSYICDCPPDFELNPTRVGCVDTRSGNCYLDIRPRGDNGDTACSNEIGVGVSKASCCCSLGKAWGTPCEMCPAVNTSEYKILCPGGEGFRPNPITVILEDIDECQELPGLCQGGKCINTFGSFQCRCPTGYYLNEDTRVCDDVNECETPGICGPGTCYNTVGNYTCICPPDYMQVNGGNNCMDMRRSLCYRNYYADNQTCDGELLFNMTKKMCCCSYNIGRAWNKPCEQCPIPSTDEFATLCGSQRPGFVIDIYTGLPVDIDECREIPGVCENGVCINMVGSFRCECPVGFFYNDKLLVCEDIDECQNGPVCQRNAECINTAGSYRCDCKPGYRFTSTGQCNDRNECQEIPNICSHGQCIDTVGSFYCLCHTGFKTNDDQTMCLDINECERDACGNGTCRNTIGSFNCRCNHGFILSHNNDCIDVDECASGNGNLCRNGQCINTVGSFQCQCNEGYEVAPDGRTCVDINECLLEPRKCAPGTCQNLDGSYRCICPPGYSLQNEKCEDIDECVEEPEICALGTCSNTEGSFKCLCPEGFSLSSSGRRCQDLRMSYCYAKFEGGKCSSPKSRNHSKQECCCALKGEGWGDPCELCPTEPDEAFRQICPYGSGIIVGPDDSAVDMDECKEPDVCKHGQCINTDGSYRCECPFGYILAGNECVDTDECSVGNPCGNGTCKNVIGGFECTCEEGFEPGPMMTCEDINECAQNPLLCAFRCVNTYGSYECKCPVGYVLREDRRMCKDEDECEEGKHDCTEKQMECKNLIGTYMCICGPGYQRRPDGEGCVDENECQTKPGICENGRCLNTRGSYTCECNDGFTASPNQDECLDNREGYCFTEVLQNMCQIGSSNRNPVTKSECCCDGGRGWGPHCEICPFQGTVAFKKLCPHGRGFMTNGADIDECKVIHDVCRNGECVNDRGSYHCICKTGYTPDITGTSCVDLNECNQAPKPCNFICKNTEGSYQCSCPKGYILQEDGRSCKDLDECATKQHNCQFLCVNTIGGFTCKCPPGFTQHHTSCIDNNECTSDINLCGSKGICQNTPGSFTCECQRGFSLDQTGSSCEDVDECEGNHRCQHGCQNIIGGYRCSCPQGYLQHYQWNQCVDENECLSAHICGGASCHNTLGSYKCMCPAGFQYEQFSGGCQDINECGSAQAPCSYGCSNTEGGYLCGCPPGYFRIGQGHCVSGMGMGRGNPEPPVSGEMDDNSLSPEACYECKINGYPKRGRKRRSTNETDASNIEDQSETEANVSLASWDVEKTAIFAFNISHVSNKVRILELLPALTTLTNHNRYLIESGNEDGFFKINQKEGISYLHFTKKKPVAGTYSLQISSTPLYKKKELNQLEDKYDKDYLSGELGDNLKMKIQVLLH

SEQ ID NO: 5254 - protein, 500 aa, Homo sapiens
MATVIPGDLSEVRDTQKVPSGKRKRGETKPRKNFPCQLCDKAFNSVEKLKVHSYSHTGERPYKCIQQDCTKAFVSKYKLQRHMATHSPEKTHKCNYCEKMFHRKDHLKNHLHTHDPNKETFKCEECGKNYNTKLGFKRHLALHAATSGDLTCKVCLQTFESTGVLLEHLKSHAGKSSGGVKEKKHQCEHCDRRFYTRKDVRRHMVVHTGRKDFLCQYCAQRFGRKDHLTRHMKKSHNQELLKVKTEPVDFLDPFTCNVSVPIKDELLPVMSLPSSELLSKPFTNTLQLNLYNTPFQSMQSSGSAHQMITTLPLGMTCPIDMDTVHPSHHLSFKYPFSSTSYAISIPEKEQPLKGEIESYLMELQGGVPSSSQDSQASSSSKLGLDPQIGSLDDGAGDLSLSKSSISISDPLNTPALDFSQLFNFIPLNGPPYNPLSVGSLGMSYSQEEAHSSVSQLPPQTQDLQDPANTIGLGSLHSLSAAFTSSLSTSTTLPRFHQAFQ

SEQ ID NO: 5255 - protein, 1194 aa, Homo sapiens
MARRQQKLNKQQLQLLKERFQAFLNGETQIVADEAFCNAVRSYYEVFLKSDRVARMVQSGGCSANDFREVFKKNIEKRVRSLPEIDGLSKETVLSSWIAKYDAIYRGEEDLCKQPNRMALSAVSELILSKEQLYEMFQQILGIKKLEHQLLYNACQLDNADEQAAQIRRELDGRLQLADKMAKERKFPKFIAKDMENMYIEELRSSVNLLMANLESLPVSKGGPEFKLQKLKRSQNSAFLDIGDENEIQLSKSDVVLSFTLEIVIMEVQGLKSVAPNRIVYCTMEVEGEKLQTDQAEASRPQWGTQGDFTTTHPRPVVKVKLFTESTGVLALEDKELGRVILYPTSNSSKSAELHRMVVPKNSQDSDLKIKLAVRMDKPAHMKHSGYLYALGQKVWKRWKKRYFVLVQVSQYTFAMCSYREKKSEPQELMQLEGYTVDYTDPHPGLQGGCMFFNAVKEGDTVIFASDDEQDRILWVQAMYRATGQSYKPVPAIQTQKLNPKGGTLHADAQLSGKDADRFQKHGMDEFISANPCKLDHAFLFRILQRQTLDHRLNDSYSCLGWFSPGQVFVLDEYCARYGVRGCHRHLCYLAELMEHSENGAVIDPTLLHYSFAFCASHVHGNRPDGIGTVSVEEKERFEEIKERLSSLLENQISHFRYCFPFGRPEGALKATLSLLERVLMKDIATPIPAEEVKKVVRKCLEKAALINYTRLTEYAKIEGPAEKETETMNQASPARKLEEILHLAELCIEVLQQNEEHHAEAFAWWPDLLAEHAEKFWALFTVDMDTALEAQPQDSWDSFPLFQLLNNFLRNDTLLCNGKFHKHLQEIFVPLVVRYVDLMESSIAQSIHRGFEQETWQPVKNIANSLPNVALPKVPSLPLNLPQIPNISTASWMPSLYESTNGSATSEDLFWKLDALQMFVFDLHWPEQEFAHHLEQRLKLMASDMLEACVKRTRTAFELKLQKASKTTDLRIPASVCTMFNVLVDAKKQSTKLCALDGGQEQQYHSKIDDLIDNSVKEIISLLVSKFVSVLEGVLSKLSRYDEGTFFSSILSFTVKAAAKYVDVPKPGMDLADTYIMFVRQNQDILREKVNEEMYIEKLFDQWYSSSMKVICVWLTDRLDLQLHIYQLKTLIKIVKKTYRDFRLQGVLEGTLNSKTYDTVHRRLTVEEATASVSEGGGLQGITMKDSDEEEEG

SEQ ID NO: 5256 - protein, 596 aa, Homo sapiens
MIVDKLLDDSRGGEGLRDAAGGCGLMTSPLNLSYFYGASPPAAAPGACDASCSVLGPSAPGSPGSDSSDFSSASSVSSCGAVESRSRGGARAERQPVEPHMGVGRQQRGPFQGVRVKNSVKELLLHIRSHKQKASGQAVDDFKTQGVNIEQFRELKNTVSYSGKRKGPDSLSDGPACKRPALLHSQFLTPPQTPTPGESMEDVHLNEPKQESSADLLQNIINIKNECSPVSLNTVQTSSSVQQQNDAHLHSFSMMPSSACEAMVGHEMASDSSNTSLPFSNMGNPMNTTQLGKSLFQWQVEQEESKLANISQDQFLSKDADGDTFLHIAVAQGRRALSYVLARKMNALHMLDIKEHNGQSAFQVAVAANQHLIVQDLVNIGAQVNTTDCWGRTPLHVCAEKGHSQVLQAIQKGAVGSNQFVDLEATNYDGLTPLHCAVIAHNAVVHELQRNQQPHSPEVQELLLKNKSLVDTIKCLIQMGAAVEAKDRKSGRTALHLAAEEANLELIRLFLELPSCLSFVNAKAYNGNTALHVAASLQYRLTQLDAVRLLMRKGADPSTRNLENEQPVHLVPDGPVGEQIRRILKGKSIQQRAPPY

SEQ ID NO: 5257 - protein, 708 aa, Homo sapiens
MADREGGCAAGRGRELEPELEPGPGPGSALEPGEEFEIVDRSQLPGPGDLRSATRPRAAEGWSAPILTLARRATGNLSASCGSALRAAAGLGGGDSGDGTARAASKCQMMEERANLMHMMKLSIKVLLQSALSLGRSLDADHAPLQQFFVVMEHCLKHGLKVKKSFIGQNKSFFGPLELVEKLCPEASDIATSVRNLPELKTAVGRGRAWLYLALMQKKLADYLKVLIDNKHLLSEFYEPEALMMEEEGMVIVGLLVGLNVLDANLCLKGEDLDSQVGVIDFSLYLKDVQDLDGGKEHERITDVLDQKNYVEELNRHLSCTVGDLQTKIDGLEKTNSKLQEELSAATDRICSLQEEQQQLREQNELIRERSEKSVEITKQDTKVELETYKQTRQGLDEMYSDVWKQLKEEKKVRLELEKELELQIGMKTEMEIAMKLLEKDTHEKQDTLVALRQQLEEVKAINLQMFHKAQNAESSLQQKNEAITSFEGKTNQVMSSMKQMEERLQHSERARQGAEERSHKLQQELGGRIGALQLQLSQLHEQCSSLEKELKSEKEQRQALQRELQHEKDTSSLLRMELQQVEGLKKELRELQDEKAELQKICEEQEQALQEMGLHLSQSKLKMEDIKEVNQALKGHAWLKDDEATHCRQCEKEFSISRRKHHCRNCGHIFCNTCSSNELALPSYPKPVRVCDSCHTLLLQRCSSTAS

SEQ ID NO: 5258 - protein, 877 aa, Homo sapiens
MCDLRRPAAGGMMDLAYVCEWEKWSKSTHCPSVPLACAWSCRNLIAFTMDLRSDDQDLTRMIHILDTEHPWDLHSIPSEHHEAITCLEWDQSGSRLLSADADGQIKCWSMADHLANSWESSVGSLVEGDPIVALSWLHNGVKLALHVEKSGASSFGEKFSRVKFSPSLTLFGGKPMEGWIAVTVSGLVTVSLLKPSGQVLTSTESLCRLRGRVALADIAFTGGGNIVVATADGSSASPVQFYKVCVSVVSEKCRIDTEILPSLFMRCTTDLNRKDKFPAITHLKFLARDMSEQVLLCASSQTSSIVECWSLRKEGLPVNNIFQQISPVVGDKQPTILKWRILSATNDLDRVSAVALPKLPISLTNTDLKVASDTQFYPGLGLALAFHDGSVHIVHRLSLQTMAVFYSSAAPRPVDEPAMKRPRTAGPAVHLKAMQLSWTSLALVGIDSHGKLSVLRLSPSMGHPLEVGLALRHLLFLLEYCMVTGYDWWDILLHVQPSMVQSLVEKLHEEYTRQTAALQQVLSTRILAMKASLCKLSPCTVTRVCDYHTKLFLIAISSTLKSLLRPHFLNTPDKSPGDRLTEICTKITDVDIDKVMINLKTEEFVLDMNTLQALQQLLQWVGDFVLYLLASLPNQGSLLRPGHSFLRDGTSLGMLRELMVVIRIWGLLKPSCLPVYTATSDTQDSMSLLFRLLTKLWICCRDEGPASEPDEALVDECCLLPSQLLIPSLDWLPASDGLVSRLQPKQPLRLQFGRAPTLPGSAATLQLDGLARAPGQPKIDHLRRLHLGACPTEECKACTRCGCVTMLKSPNRTTAVKQWEQRWIKNCLAVEGRGPDACVTSRASEEAPAFVQLGPQSTHHSPRTPRSLDHLHPEDRP

SEQ ID NO: 5259 - protein, 1025 aa, Homo sapiens
MVAMAEAEAGVAVEVRGLPPAVPDELLTLYFENRRRSGGGPVLSWQRLGCGGVLTFREPADAERVLAQADHELHGAQLSLRPAPPRAPARLLLQGLPPGTTPQRLEQHVQALLRASGLPVQPCCALASPRPDRALVQLPKPLSEADVRVLEEQAQNLGLEGTLVSLARVPQARAVRVVGDGASVDLLLLELYLENERRSGGGPLEDLQRLPGPLGTVASFQQWQVAERVLQQEHRLQGSELSLVPHYDILEPEELAENTSGGDHPSTQGPRATKHALLRTGGLVTALQGAGTVTMGSGEEPGQSGASLRTGPMVQGRGIMTTGSGQEPGQSGTSLRTGPMGSLGQAEQVSSMPMGSLEHEGLVSLRPVGLQEQEGPMSLGPVGSAGPVETSKGLLGQEGLVEIAMDSPEQEGLVGPMEITMGSLEKAGPVSPGCVKLAGQEGLVEMVLLMEPGAMRFLQLYHEDLLAGLGDVALLPLEGPDMTGFRLCGAQASCQAAEEFLRSLLGSISCHVLCLEHPGSARFLLGPEGQHLLQGLEAQFQCVFGTERLATATLDTGLEEVDPTEALPVLPGNAHTLWTPDSTGGDQEDVSLEEVRELLATLEGLDLDGEDWLPRELEEEGPQEQPEEEVTPGHEEEEPVAPSTVAPRWLEEEAALQLALHRSLEPQGQVAEQEEAAALRQALTLSLLEQPPLEAEEPPDGGTDGKAQLVVHSAFEQDVEELDRALRAALEVHVQEETVGPWRRTLPAELRARLERCHGVSVALRGDCTILRGFGAHPARAARHLVALLAGPWDQSLAFPLAASGPTLAGQTLKGPWNNLERLAENTGEFQEVVRAFYDTLDAARSSIRVVRVERVSHPLLQQQYELYRERLLQRCERRPVEQVLYHGTTAPAVPDICAHGFNRSFCGRNATVYGKGVYFARRASLSVQDRYSPPNADGHKAVFVARVLTGDYGQGRRGLRAPPLRGPGHVLLRYDSAVDCICQPSIFVIFHDTQALPTHLITCEHVPRASPDDPSGLPGRSPDT

SEQ ID NO: 5260 - protein, 738 aa, Homo sapiens [sequence omitted]

SEQ ID NO: 5261 - protein, 1018 aa, Homo sapiens
MKMWLLVSHLVIISITTCLAEFTWYRRYGHGVSEEDKGFGPIFEEQPINTIYPEESLEGKVSLNCRARASPFPVYKWRMNNGDVDLTSDRYSMVGGNLVINNPDKQKDAGIYYCLASNNYGMVRSTEATLSFGYLDPFPPEERPEVRVKEGKGMVLLCDPPYHFPDDLSYRWLLNEFPVFITMDKRRFVSQTNGNLYIANVEASDKGNYSCFVSSPSITKSVFSKFIPLIPIPERTTKPYPADIVVQFKDVYALMGQNVTLECFALGNPVPDIRWRKVLEPMPSTAEISTSGAVLKIFNIQLEDEGIYECEAENIRGKDKHQARIYVQAFPEWVEHINDTEVDIGSDLYWPCVATGKPIPTIRWLKNGYAYHKGELRLYDVTFENAGMYQCIAENTYGAIYANAELKILALAPTFEMNPMKKKILAAKGGRVIIECKPKAAPKPKFSWSKGTEWLVNSSRILIWEDGSLEINNITRNDGGIYTCFAENNRGKANSTGTLVITDPTRIILAPINADITVGENATMQCAASFDPALDLTFVWSFNGYVIDFNKENIHYQRNFMLDSNGELLIRNAQLKHAGRYTCTAQTIVDNSSASADLVVRGPPGPPGGLRIEDIRATSVALTWSRGSDNHSPISKYTIQTKTILSDDWKDAKTDPPIIEGNMEAARAVDLIPWMEYEFRVVATNTLGRGEPSIPSNRIKTDGAAPNVAPSDVGGGGGRNRELTITWAPLSREYHYGNNFGYIVAFKPFDGEEWKKVTVTNPDTGRYVHKDETMSPSTAFQVKVKAFNNKGDGPYSLVAVINSAQDAPSEAPTEVGVKVLSSSEISVHWEHVLEKIVESYQIRYWAAHDKEEAANRVQVTSQEYSARLENLLPDTQYFIEVGACNSAGCGPPSDMIEAFTKKAPPSQPPRIISSVRSGSRYIITWDHVVALSNESTVTGYKVLYRPDGQHDGKLYSTHKHSIEVPIPRDGEYVVEVRAHSDGGDGVVSQVKISGAPTLSPSLLGLLLPAFGILVYLEF

SEQ ID NO: 5262 - protein, 718 aa, Homo sapiens
MIVDKLLDDSRGGEGLRDAAGGCGLMTSPLNLSYFYGASPPAAAPGACDASCSVLGPSAPGSPGSDSSDFSSASSVSSCGAVESRSRGGARAERQPVEPHMGVGRQQRGPFQGVRVKNSVKELLLHIRSHKQKASGQAVDDFKTQGVNIEQFRELKNTVSYSGKRKGPDSLSDGPACKRPALLHSQFLTPPQTPTPGESMEDVHLNEPKQESSADLLQNIINIKNECSPVSLNTVQVSWLNPVVVPQSSPAEQCQDFHGGQVFSPPQKCQPFQVRGSQQMIDQASLYQYSPQNQHVEQQPHYTHKPTLEYSPFPIPPQSPAYEPNLFDGPESQFCPNQSLVSLLGDQRESENIANPMQTSSSVQQQNDAHLHSFSMMPSSACEAMVGHEMASDSSNTSLPFSNMGNPMNTTQLGKSLFQWQVEQEESKLANISQDQFLSKDADGDTFLHIAVAQGRRALSYVLARKMNALHMLDIKEHNGQSAFQVAVAANQHLIVQDLVNIGAQVNTTDCWGRTPLHVCAEKGHSQVLQAIQKGAVGSNQFVDLEATNYDGLTPLHCAVIAHNAVVHELQRNQQPHSPEVQELLLKNKSLVDTIKCLIQMGAAVEAKDRKSGRTALHLAAEEANLELIRLFLELPSCLSFVNAKAYNGNTALHVAASLQYRLTQLDAVRLLMRKGADPSTRNLENEQPVHLVPDGPVGEQIRRILKGKSIQQRAPPY

SEQ ID NO: 5263 - protein, 1001 aa, Homo sapiens
MSGPGNKRAAGDGGSGPPEKKLSREEKTTTTLIEPIRLGGISSTEEMDLKVLQFKNKKLAERLEQRQACEDELRERIEKLEKRQATDDATLLIVNRYWAQLDETVEALLRCHESQGELSSAPEAPGTQEGPTCDGTPLPEPGTSELRDPLLMQLRPPLSEPALAFVVALGASSSEEVELELQGRMEFSKAAVSRVVEASDRLQRRVEELCQRVYSRGDSEPLSEAAQAHTRELGRENRRLQDLATQLQEKHHRISLEYSELQDKVTSAETKVLEMETTVEDLQWDIEKLRKREQKLNKHLAEALEQLNSGYYVSGSSSGFQGGQITLSMQKFEMLNAELEENQELANSRMAELEKLQAELQGAVRTNERLKVALRSLPEEVVRETGEYRMLQAQFSLLYNESLQVKTQLDEARGLLLATKNSHLRHIEHMESDELGLQKKLRTEVIQLEDTLAQVRKEYEMLRIEFEQNLAANEQAGPINREMRHLISSLQNHNHQLKGDAQRYKRKLREVQAEIGKLRAQASGSAHSTPNLGHPEDSGVSAPAPGKEEGGPGPVSTPDNRKEMAPVPGTTTTTTSVKKEELVPSEEDFQGITPGAQGPSSRGREPEARPKRELREREGPSLGPPPVASALSRADREKAKVEETKRKESELLKGLRAELKKAQESQKEMKLLLDMYKSAPKEQRDKVQLMAAERKAKAEVDELRSRIRELEERDRRESKKIADEDALRRIRQAEEQIEHLQRKLGATKQEEEALLSEMDVTGQAFEDMQEQNGRLLQQLREKDDANFKLMSERIKANQIHKLLREEKDELGEQVLGLKSQVDAQLLTVQKLEEKERALQGSLGGVEKELTLRSQALELNKRKAVEAAQLAEDLKVQLEHVQTRLREIQPCLAESRAAREKESFNLKRAQEDISRLRRKLEKQRKVEVYADADEILQEEIKEYKARLTCPCCNTRKKDAVLTKCFHVFCFECVRGRYEARQRKCPKCNAAFGAHDFHRIYIS

SEQ ID NO: 5264 - protein, 1634 aa, Homo sapiens
MTSAQCPALACVMSPLRFWGPWPLLMWQLLWLLVKEAQPLEWVKDPLQLTSNPLGPPEPWSSHSSHFPRESPHAPTLPADPWDFDHLGPSASSEMPAPPQESTENLVPFLDTWDSAGELPLEPEQFLASQQDLKDKLSPQERLPVSPKKLKKDPAQRWSLAEIIGIIHQLSTPQSQKQTLQNEYSSTDTPYPGSLPPELRVKSDEPPGPSEQVGPSQFHLEPETQNPETLEDIQSSSLQQEAPAQLPQLLEEEPSSMQQEAPALPPESSMESLTLPNHEVSVQPPGEDQAYYHLPNITVKPADVEVTITSEPTNETESSQAQQETPIQFPEEVEPSATQQEAPIEPPVPPMEHELSISEQQQPVQPSESSREVESSPTQQETPGQPPEHHEVTVSPPGHHQTHHLASPSVSVKPPDVQLTIAAEPSAEVGTSLVHQEATTRLSGSGNDVEPPAIQHGGPPLLPESSEEAGPLAVQQETSFQSPEPINNENPSPTQQEAAAEHPQTAEEGESSLTHQEAPAQTPEFPNVVVAQPPEHSHLTQATVQPLDLGFTITPESMTEVELSPTMKETPTQPPKKVVPQLRVYQGVTNPTPGQDQAQHPVSPSVTVQLLDLGLTITPEPTTEVGHSTPPKRTIVSPKHPEVTLPHPDQVQTQHSHLTRATVQPLDLGFTITPKSMTEVEPSTALMTTAPPPGHPEVTLPPSDKGQAQHSHLTQATVQPLDLELTITTKPTTEVKPSPTTEETSTQLPDLGLAIIPEPTTETGHSTALEKTTAPRPDRVQTLHRSLTEVTGPPTELEPAQDSLVQSESYTQNKALTAPEEHKASTSTNICELCTCGDEMLSCIDLNPEQRLRQVPVPEPNTHNGTFTILNFQGNYISYIDGNVWKAYSWTEKLILRENNLTELHKDSFEGLLSLQYLDLSCNKIQSIERHTFEPLPFLKFINLSCNVITELSFGTFQAWHGMQFLHKLILNHNPLTTVEDPYLFKLPALKYLDMGTTLVPLTTLKNILMMTVELEKLIVPSHMACCLCQFKNSIEAVCKTVKLHCNSACLTNTTHCPEEASVGNPEGAFMKVLQARKNYTSTELIIEPEEPSDSSGINLSGFGSEQLDTNDESDVTSTLSYILPYFSAVNLDVKSLLLPFIKLPTTGNSLAKIQTVGKNRQRLNRVLMGPRSIQKRHFKEVGRQSIRREQGAQASVENTAEEKRLGSPAPRELKQPHTQQGPEKLAGNAVYTKPSFTQEHKAAVSVLKPFSKGAPSTSSPAKALPQVRDRWKDLTHAISILESAKARVTNMKTSKPIVHSRKKYRFHKTRSRMTHRTPKVKKSPKVRKKSYLSRLMLSNRLPFSAAKSLINSPSQGAFSSLRDLSPQENPFLEVSAPSEHFIENNNTKDTTARNAFEENVFMENTNMPEGTISENTNYNHPPEADSAGTAFNLGPTVKQTETKWEYNNVGTDLSPEPKSFNYPLLSSPGDQFEIQLTQQLQSVIPNNNVRRLIAHVIRTLKMDCSGAHVQVTCAKLVSRTGHLMKLLSGQQEVKASKIEWDTDQWKTENYINESTEAQSEQKEKSLEFTKELPGYGYTKKLILALIVTGILTILIILLCLIEICCHRRSLQEDEEGFSRDSEAPTEEESEALP

SEQ ID NO: 5265 - protein, 489 aa, Homo sapiens
MGKKGKKEKKGRGAEKTAAKMEKKVSKRSRKEEEDLEALIAHFQTLDAKRTQTVELPCPPPSPRLNASLSVHPEKDELILFGGEYFNGQKTFLYNELYVYNTRKDTWTKVDIPSPPPRRCAHQAVVVPQGGGQLWVFGGEFASPNGEQFYHYKDLWVLHLATKTWEQVKDYIYYNDVYAFNLDTFTWSKLSPSGTGPTPRSGCQMSVTPQGGIVVYGGYSKQRVKKDVDKGTRHSDMFLLKPEDGREDKWVWTRMNPSGVKPTPRSGFSVAMAPNHQTLFFGGVCDEEEEESLSGEFFNDLYFYDATRNRWFEGQLKGPKSEKKKRRRGRKEEPEGGSRPACGGAGTQGPVQLVKEVVAEDGTVVTIKQVLTAPGSAGQPRSEDEDSLEEAGSPAPGPCPRSNAMLAVKHGVLYVYGGMFEAGDRQVTLSDLHCLDLHRMEAWKALVEMDPETQEWLEETDSEEDSEEVEGAEGGVDDEDSGEESGAED

SEQ ID NO: 5266 - protein, 464 aa, Homo sapiens
MDFSRNLYDIGEQLDSEDLASLKFLSLDYIPQRKQEPIKDALMLFQRLQEKRMLEESNLSFLKELLFRINRLDLLITYLNTRKEEMERELQTPGRAQISAYRVMLYQISEEVSRSELRSFKFLLQEEISKCKLDDDMNLLDIFIEMEKRVILGEGKLDILKRVCAQINKSLLKIINDYEEFSKGEELCGVMTISDSPREQDSESQTLDKVYQMKSKPRGYCLIINNHNFAKAREKVPKLHSIRDRNGTHLDAGALTTTFEELHFEIKPHDDCTVEQIYEILKIYQLMDHSNMDCFICCILSHGDKGIIYGTDGQEAPIYELTSQFTGLKCPSLAGKPKVFFIQACQGDNYQKGIPVETDSEEQPYLEMDLSSPQTRYIPDEADFLLGMATVNNCVSYRNPAEGTWYIQSLCQSLRERCPRGDDILTILTEVNYEVSNKDDKKNMGKQMPQPTFTLRKKLVFPSD

SEQ ID NO: 5267 - protein, 691 aa, Homo sapiens
MAAGVEAAAEVAATEIKMEEESGAPGVPSGNGAPGPKGEGERPAQNEKRKEKNIKRGGNRFEPYANPTKRYRAFITNIPFDVKWQSLKDLVKEKVGEVTYVELLMDAEGKSRGCAVVEFKMEESMKKAAEVLNKHSLSGRPLKVKEDPDGEHARRAMQKAGRLGSTVFVANLDYKVGWKKLKEVFSMAGVVVRADILEDKDGKSRGIGTVTFEQSIEAVQAISMFNGQLLFDRPMHVKMDERALPKGDFFPPERPQQLPHGLGGIGMGLGPGGQPIDANHLNKGIGMGNIGPAGMGMEGIGFGINKMGGMEGPFGGGMENMGRFGSGMNMGRINEILSNALKRGEIIAKQGGGGGGGSVPGIERMGPGIDRLGGAGMERMGAGLGHGMDRVGSEIERMGLVMDRMGSVERMGSGIERMGPLGLDHMASSIERMGQTMERIGSGVERMGAGMGFGLERMAAPIDRVGQTIERMGSGVERMGPAIERMGLSMERMVPAGMGAGLERMGPVMDRMATGLERMGANNLERMGLERMGANSLERMGLERMGANSLERMGPAMGPALGAGIERMGLAMGGGGGASFDRAIEMERGNFGGSFAGSFGGAGGHAPGVARKACQIFVRNLPFDFTWKMLKDKFNECGHVLYADIKMENGKSKGCGVVKFESPEVAERACRMMNGMKLSGREIDVRIDRNA

SEQ ID NO: 5268 - protein, 1117 aa, Homo sapiens
MKKASRSVGSVPKVSAISKTQTAEKIKPENSSSASTGGKLVKPGTAASLSKTKSSDDLLAGMAGGVTVTNGVKGKKSTCPSAAPSASAPAMTTVENKSKISTGTASSTKRSTSTGNKESSSTRERLRERTRLNQSKKLPSAGQGANDMALAKRSRSRTATECDVRMSKSKSDNQISDRAALEAKVKDLLTLAKTKDVEILHLRNELRDMRAQLGINEDHSEGDEKSEKETIMAHQPTDVESTLLQLQEQNTAIREELNQLKNENRMLKDRLNALGFSLEQRLDNSEKLFGYQSLSPEITPGNQSDGGGTLTSSVEGSAPGSVEDLLSQDENTLMDHQHSNSMDNLDSECSEVYQPLTSSDDALDAPSSSESEGIPSIERSRKGSSGNASEVSVACLTERIHQMEENQHSTSEELQATLQELADLQQITQELNSENERLGEEKVILMESLCQQSDKLEHFSRQIEYFRSLLDEHHISYVIDEDVKSGRYMELEQRYMDLAENARFEREQLLGVQQHLSNTLKMAEQDNKEAQEMIGALKERSHHMERIIESEQKGKAALAATLEEYKATVASDQIEMNRLKAQLENEKQKVAELYSIHNSGDKSDIQDLLESVRLDKEKAETLASSLQEDLAHTRNDANRLQDAIAKVEDEYRAFQEEAKKQIEDLNMTLEKLRSDLDEKETERSDMKETIFELEDEVEQHRAVKLHDNLIISDLENTVKKLQDQKHDMEREIKTLHRRLREESAEWRQFQADLQTAVVIANDIKSEAQEEIGDLKRRLHEAQEKNEKLTKELEEIKSRKQEEERGRVYNYMNAVERDLAALRQGMGLSRRSSTSSEPTPTVKTLIKSFDSASQVPNPAAAAIPRTPLSPSPMKTPPAAAVSPMQRHSISGPISTSKPLTALSDKRPNYGEIPVQEHLLRTSSASRPASLPRVPAMESAKTLSVSRRSSEEVKRDISAQEGASPASLMAMGTTSPQLSLSSSPTASVTPTTRSRIREERKDPLSALAREYGGSKRNALLKWCQKKTEGYQNIDITNFSSSWNDGLAFCALLHTYLPAHIPYQELNSQDKRRNFMLAFQAAESVGIKSTLDINEMVRTERPDWQNVMLYVTAIYKYFET

SEQ ID NO: 5269 - protein, 423 aa, Homo sapiens
MAMVVSSWRDPQDDVAGGNPGGPNPAAQAARGGGGGAGEQQQQAGSGAPHTPQTPGQPGAPATPGTAGDKGQGPPGSGQSQQHIECVVCGDKSSGKHYGQFTCEGCKSFFKRSVRRNLTYTCRANRNCPIDQHHRNQCQYCRLKKCLKVGMRREAVQRGRMPPTQPNPGQYALTNGDPLNGHCYLSGYISLLLRAEPYPTSRYGSQCMQPNNIMGIENICELAARLLFSAVEWARNIPFFPDLQITDQVSLLRLTWSELFVLNAAQCSMPLHVAPLLAAAGLHASPMSADRVVAFMDHIRIFQEQVEKLKALHVDSAEYSCLKAIVLFTSDACGLSDAAHIESLQEKSQCALEEYVRSQYPNQPSRFGKLLLRLPSLRTVSSSVIEQLFFVRLVGKTPIETLIRDMLLSGSSFNWPYMSIQCS

SEQ ID NO: 5270 - protein, 503 aa, Homo sapiens
MALRAKAEVCVAAPWLSLQRARALGTRAARAPRTVLPFEAMPQHPGNRWLRLLQIWREQGYEHLHLEMHQTFQELGPIFRYNLGGPRMVCVMLPEDVEKLQQVDSLHPCRMILEPWVAYRQHRGHKCGVFLLNGPEWRFNRLRLNPDVLSPKAVQRFLPMVDAVARDFSQALKKKVLQNARGSLTLDVQPSIFHYTIEASNLALFGERLGLVGHSPSSASLNFLHALEVMFKSTVQLMFMPRSLSRWISPKVWKEHFEAWDCIFQYGDNCIQKIYQELAFNRPQHYTGIVAELLLKAELSLEAIKANSMELTAGSVDTTAFPLLMTLFELARNPDVQQILRQESLAAAASISEHPQKATTELPLLRAALKETLRLYPVGLFLERVVSSDLVLQNYHIPAGTLVQVFLYSLGRNAALFPRPERYNPQRWLDIRGSGRNFHHVPFGFGMRQCLGRRLAEAEMLLLLHHVLKHFLVETLTQEDIKMVYSFILRPGTSPLLTFRAIN

SEQ ID NO: 5271 - protein, 2357 aa, Homo sapiens
MQPPPQTVPSGMAGPPPAGNPRSVFWASSPYRRRANNNAAVAPTTCPLQPVTDPFAFSRQALQSTPLGSSSKSSPPVLQGPAPAGFSQHPGLLVPHTHARDSSQGPCEPLPGPLTQPRAHASPFSGALTPSAPPGPEMNRSAEVGPSSEPEVQTLPYLPHYIPGVDPETSHGGHPHGNMPGLDRPLSRQNPHDGVVTPAASPSLPQPGLQMPGQWGPVQGGPQPSGQHRSPCPEGPVPSGVPCATSVPHFPTPSILHQGPGHEQHSPLVAPPAALPSDGRDEVSHLQSGSHLANNSDPESTFRQNPRIVNHWASPELRQNPGVKNEHRPASALVNPLARGDSPENRTHHPLGAGAGSGCAPLEADSGASGALAMFFQGGETENEENLSSEKAGLSGQADFDDFCSSPGLGRPPAPTHVGAGSLCQALLPGPSNEAAGDVWGDTASTGVPDASGSQYENVENLEFVQNQEVLPSEPLNLDPSSPSDQFRYGPLPGPAVPRHGAVCHTGAPDATLHTVHPDSVSSSYSSRSHGRLSGSARPQELVGTFIQQEVGKPEDEASGSFFKQIDSSPVGGETDETTVSQNYRGSVSQPSTPSPPKPTGIFQTSANSSFEPVKSHLVGVKPFEADRANVVGEVRETCVRQKQCRPAAALPDASPGNLEQPPDNMETLCAPQVCPLPLNSTTEAVHMLPHAGAPPLDTVYPAPEKRPSARTQGPVKCESPATTLWAQSELPDFGGNVLLAPAAPALYVCAKPQPPVVQPPEEAMSGQQSRNPSSAAPVQSRGGIGASENLENPPKMGEEEALQSQASSGYASLLSSPPTESLQNPPVLIAQPDHSYNLAQPINFSVSLSNSHEKNQSWREALVGDRPAVSSWALGGDSGENTSLSGIPTSSVLSLSLPSSVAQSNFPQGSGASEMVSNQPANLLVQPPSQPVPENLVPESQKDRKAGSALPGFANSPAGSTSVVLVPPAHGTLVPDGNKANHSSHQEDTYGALDFTLSRTLENPVNVYNPSHSDSLASQQSVASHPRQSGPGAPNLDRFYQQVTKDAQGQPGLERAQQELVPPQQQASPPQLPKAMFSELSNPESLPAQGQAQNSAQSPASLVLVDAGQQLPPRPPQSSSVSLVSSGSGQAAVPSEQPWPQPVPALAPGPPPQDLAAYYYYRPLYDAYQPQYSLPYPPEPGAASLYYQDVYSLYEPRYRPYDGAASAYAQNYRYPEPERPSSRASHSSERPPPRQGYPEGYYSSKSGWSSQSDYYASYYSSQYDYGDPGHWDRYHYSARVRDPRTYDRRYWCDAEYDAYRREHSAFGDRPEKRDNNWRYDPRFTGSFDDDPDPHRDPYGEEVDRRSVHSEHSARSLHSAHSLASRRSSLSSHSHQSQIYRSHNVAAGSYEAPLPPGSFHGDFAYGTYRSNFSSGPGFPEYGYPADTVWPAMEQVSSRPTSPEKFSVPHVCARFGPGGQLIKVIPNLPSEGQPALVEVHSMEALLQHTSEQEEMRAFPGPLAKDDTHKVDVINFAQNKAMKCLQNENLIDKESASLLWNFIVLLCRQNGTVVGTDIAELLLRDHRTVWLPGKSPNEANLIDFTNEAVEQVEEEESGEAQLSFLTGGPAAAASSLERETERFRELLLYGRKKDALESAMKNGLWGHALLLASKMDSRTHARVMTRFANSLPINDPLQTVYQLMSGRMPAASTCCGDEKWGDWRPHLAMVLSNLNNNMDVESRTMATMGDTLASRGLLDAAHFCYLMAQAGFGVYTKKTTKLVLIGSNHSLPFLKFATNEAIQRTEAYEYAQSLGAETCPLPSFQVFKFIYSCRLAEMGLATQAFHYCEAIAKSILTQPHLYSPVLISQLVQMASQLRLFDPQLKEKPEEESLAAPTWLVHLQQVERQIKEGAGVWHQDGALPQQCPGTPSSEMEQLDRPGLSQPGALGIANPLLAVPAPSPEHSSPSVRLLPSAPQTLPDGPLASPARVPMFPVPLPPGPLEPGPGCVTPGPALGFLEPSGPGLPPGVPPLQERRHLLQEARSPDPGIVPQEAPVGNSLSELSEENFDGKFANLTPSRTVPDSEAPPGWDRADSGPTQPPLSLSPAPETKRPGQAAKKETKEPKKGESWFFRWLPGKKKTEAYLPDDKNKSIVWDEKKNQWVNLNEPEEEKKAPPPPPTSMPKTVQAAPPALPGPPGAPVNMYSRRAAGTRARYVDVLNPSGTQRSEPALAPADFVAPLAPLPIPSNLFVPTPDAEEPQLPDGTGREGPAAARGLANPEPAPEPKVLSSAASLPGSELPSSRPEGSQGGELSRCSSMSSLSREVSQHFNQAPGDLPAAGGPPSGAMPFYNPAQLAQACATSGSSRLGRIGQRKHLVLN

SEQ ID NO: 5272 - protein, 708 aa, Homo sapiens
MSTADALDDENTFKILVATDIHLGFMEKDAVRGNDTFVTLDEILRLAQENEVDFILLGGDLFHENKPSRKTLHTCLELLRKYCMGDRPVQFEILSDQSVNFGFSKFPWVNYQDGNLNISIPVFSIHGNHDDPTGADALCALDILSCAGFVNHFGRSMSVEKIDISPVLLQKGSTKIALYGLGSIPDERLYRMFVNKKVTMLRPKEDENSWFNLFVIHQNRSKHGSTNFIPEQFLDDFIDLVIWGHEHECKIAPTKNEQQLFYISQPGSSVVTSLSPGEAVKKHVGLLRIKGRKMNMHKIPLHTVRQFFMEDIVLANHPDIFNPDNPKVTQAIQSFCLEKIEEMLENAERERLGNSHQPEKPLVRLRVDYSGGFEPFSVLRFSQKFVDRVANPKDIIHFFRHREQKEKTGEEINFGKLITKPSEGTTLRVEDLVKQYFQTAEKNVQLSLLTERGMGEAVQEFVDKEEKDAIEELVKYQLEKTQRFLKERHIDALEDKIDEEVRRFRETRQKNTNEEDDEVREAMTRARALRSQSEESASAFSADDLMSIDLAEQMANDSDDSISAATNKGRGRGRGRRGGRGQNSASRGGSQRGRADTGLETSTRSRNSKTAVSASRNMSIIDAFKSTRQQPSRNVTTKNYSEVIEVDESDVEEDIFPTTSKTDQRWSSTSSSKIMSQSQVSKGVDFESSEDDDDDPFMNTSSLRRNRR

SEQ ID NO: 5273 - protein, 254 aa, Homo sapiens
MTEEVWMGTWRPHRPRGPIMALYSSPGPKYLIPPTTGFMKHTPTKLRAPAYSFRGAPMLLAENCSPGPRYNVNPKILRTGKDLGPAYSILGRYQTKTMLTPGPGDYFPEKSTKYVFDSAPSHSISARTKAFRVDSTPGPAAYMLPMVMGPNTVGKASQPSFSIKGRSKLGGFSDDLHKTPGPAAYRQTDVRVTKFKAPQYTMAARVEPPGDKTLKPGPGAHSPEKVTLTKPCAPVVTFGIKHSDYMTPLLVDVE

SEQ ID NO: 5274 - protein, 724 aa, Homo sapiens
MPEEVHHGEEEVETFAFQAEIAQLMSLIINTFYSNKEIFLRELISNASDALDKIRYESLTDPSKLDSGKELKIDIIPNPQERTLTLVDTGIGMTKADLINNLGTIAKSGTKAFMEALQAGADISMIGQFGVGFYSAYLVAEKVVVITKHNDDEQYAWESSAGGSFTVRADHGEPIGRGTKVILHLKEDQTEYLEERRVKEVVKKHSQFIGYPITLYLEKEREKEISDDEAEEEKGEKEEEDKDDEEKPKIEDVGSDEEDDSGKDKKKKTKKIKEKYIDQEELNKTKPIWTRNPDDITQEEYGEFYKSLTNDWEDHLAVKHFSVEGQLEFRALLFIPRRAPFDLFENKKKKNNIKLYVRRVFIMDSCDELIPEYLNFIRGVVDSEDLPLNISREMLQQSKILKVIRKNIVKKCLELFSELAEDKENYKKFYEAFSKNLKLGIHEDSTNRRRLSELLRYHTSQSGDEMTSLSEYVSRMKETQKSIYYITGESKEQVANSAFVERVRKRGFEVVYMTEPIDEYCVQQLKEFDGKSLVSVTKEGLELPEDEEEKKKMEESKAKFENLCKLMKEILDKKVEKVTISNRLVSSPCCIVTSTYGWTANMERIMKAQALRDNSTMGYMMAKKHLEINPDHPIVETLRQKAEADKNDKAVKDLVVLLFETALLSSGFSLEDPQTHSNRIYRMIKLGLGIDEDEVAAEEPNAAVPDEIPPLEGDEDASRMEEVD

SEQ ID NO: 5275 - protein, 522 aa, Homo sapiens
MQEELAWETDGLLPLERQLHEAARQNNVGRMQELIGRRVNTRARNHVGRVALHWAAGAGHEQAVRLLLEHEAAVDEEDAVGALTEARLCFGMNALLLSAWFGHLRILQILVNSGAKIHCESKDGLTLLHCAAQKGHVPVLAFIMEDLEDVALDHVDKLGRTAFHRAAEHGQLDALDFLVGSGCDHNVKDKEGNTALHLAAGRGHMAVLQRLVDIGLDLEEQNAEGLTALHSAAGGSHPDCVQLLLRAGSTVNALTQKNLSCLHYAALSGSEDVSRVLIHAGGCANVVDHQGASPLHLAVRHNFPALVRLLINSDSDVNAVDNRQQTPLHLAAEHAWQDIADMLLIAGVDLNLRDKQGKTALAVAVRSNHVSLVDMIIKADRFYRWEKDHPSDPSGKSLSFKQDHRQETQQLRSVLWRLASRYLQPREWKKLAYSWEFTEAHVDAIEQQWTGTRSYQEHGHRMLLIWLHGVATAGENPSKALFEGLVAIGRRDLAGWSTMARSQLTATSASRVQMILVPQPPE

SEQ ID NO: 5276 - protein, 238 aa, Homo sapiens
MSRYGRYGGETKVYVGNLGTGAGKGELERAFSYYGPLRTVWIARNPPGFAFVEFEDPRDAEDAVRGLDGKVICGSRVRVELSTGMPRRSRFDRPPARRPFDPNDRCYECGEKGHYAYDCHRYSRRRRSRSRSRSHSRSRGRRYSRSRSRSRGRRSRSASPRRSRSISLRRSRSASLRRSRSGSIKGSRYFQSPSRSRSRSRSISRPRSSRSKSRSPSPKRSRSPSGSPRRSASPERMD

SEQ ID NO: 5277 - protein, 785 aa, Homo sapiens
MPKGRQKVPHLDAPLGLPTCLWLELAGLFLLVPWVMGLAGTGGPDGQGTGGPSWAVHLESLEGDGEEETLEQQADALAQAAGLVNAGRIGELQGHYLFVQPAGHRPALEVEAIRQQVEAVLAGHEAVRWHSEQRLLRRAKRSVHFNDPKYPQQWHLNNRRSPGRDINVTGVWERNVTGRGVTVVVVDDGVEHTIQDIAPNYSPEGSYDLNSNDPDPMPHPDVENGNHHGTRCAGEIAAVPNNSFCAVGVAYGSRIAGIRVLDGPLTDSMEAVAFNKHYQINDIYSCSWGPDDDGKTVDGPHQLGKAALQHGVIAGRQGFGSIFVVASGNGGQHNDNCNYDGYANSIYTVTIGAVDEEGRMPFYAEECASMLAVTFSGGDKMLRSIVTTDWDLQKGTGCTEGHTGTSAAAPLAAGMIALMLQVRPCLTWRDVQHIIVFTATRYEDRRAEWVTNEAGFSHSHQHGFGLLNAWRLVNAAKIWTSVPYLASYVSPVLKENKAIPQSPRSLEVLWNVSRMDLEMSGLKTLEHVAVTVSITHPRRGSLELKLFCPSGMMSLIGAPRSMDSDPNGFNDWTFSTVRCWGERARGTYRLVIRDVGDESFQVGILRQWQLTLYGSVWSAVDIRDRQRLLESAMSGKYLHDDFALPCPPGLKIPEEDGYTITPNTLKTLVLVGCFTVFWTVYYMLEVYLSQRNVASNQVCRSGPCHWPHRSRKAKEEGTELESVPLCSSKDPDEVETESRGPPTTSDLLAPDLLEQGDWSLSQNKSALDCPHQHLDVPHGKEEQIC

SEQ ID NO: 5278 - protein, 690 aa, Homo sapiens [sequence omitted]

SEQ ID NO: 5279 - protein, 885 aa, Homo sapiens
MQEAIILLALLGAMSGGEALHLILLPATGNVAENSPPGTSVHKFSVKLSASLSPVIPGFPQIVNSNPLTEAFRVNWLSGTYFEVVTTGMEQLDFETGPNIFDLQIYVKDEVGVTDLQVLTVQVTDVNEPPQFQGNLAEGLHLYIVERANPGFIYQVEAFDPEDTSRNIPLSYFLISPPKSFRMSANGTLFSTTELDFEAGHRSFHLIVEVRDSGGLKASTELQVNIVNLNDEVPRFTSPTRVYTVLEELSPGTIVANITAEDPDDEGFPSHLLYSITTVSKYFMINQLTGTIQVAQRIDRDAGELRQNPTISLEVLVKDRPYGGQENRIQITFIVEDVNDNPATCQKFTFSIMVPERTAKGTLLLDLNKFCFDDDSEAPNNRFNFTMPSGVGSGSRFLQDPAGSGKIVLIGDLDYENPSNLAAGNKYTVIIQVQDVAPPYYKNNVYVYILTSPENEFPLIFDRPSYVFDVSERRPARTRVGQVRATDKDLPQSSLLYSISTGGASLQYPNVFWINPKTGELQLVTKVDCETTPIYILRIQATNNEDTSSVTVTVNILEENDEKPICTPNSYFLALPVDLKVGTNIQNFKLTCTDLDSSPRSFRYSIGPGNVNNHFTFSPNAGSNVTRLLLTSRFDYAGGFDKIWDYKLLVYVTDDNLMSDRKKAEALVETGTVTLSIKVIPHPTTIITTTPRPRVTYQVLRKNVYSPSAWYVPFVITLGSILLLGLLVYLVVLLAKAIHRHCPCKTGKNKEPLTKKGETKTAERDVVVETIQMNTIFDGEAIDPVTGETYEFNSKTGARKWKDPLTQMPKWKESSHQGAAPRRVTAGEGMGSLRSANWEEDELSGKAWAEDAGLGSRNEGGKLGNPKNRNPAFMNRAYPKPHPGK

SEQ ID NO: 5280 - protein, 1030 aa, Homo sapiens
MGAARGSPARPRRLPLLSVLLLPLLGGTQTAIVFIKQPSSQDALQGRRALLRCEVEAPGPVHVYWLLDGAPVQDTERRFAQGSSLSFAAVDRLQDSGTFQCVARDDVTGEEARSANASFNIKWIEAGPVVLKHPASEAEIQPQTQVTLRCHIDGHPRPTYQWFRDGTPLSDGQSNHTVSSKERNLTLRPAGPEHSGLYSCCAHSAFGQACSSQNFTLSIADESFARVVLAPQDVVVARYEEAMFHCQFSAQPPPSLQWLFEDETPITNRSRPPHLRRATVFANGSLLLTQVRPRNAGIYRCIGQGQRGPPIILEATLHLAEIEDMPLFEPRVFTAGSEERVTCLPPKGLPEPSVWWEHAGVRLPTHGRVYQKGHELVLANIAESDAGVYTCHAANLAGQRRQDVNITVATVPSWLKKPQDSQLEEGKPGYLDCLTQATPKPTVVWYRNQMLISEDSRFEVFKNGTLRINSVEVYDGTWYRCMSSTPAGSIEAQARVQVLDGSSLPEWVTDNAGTLHFARVTRDDAGNYTCIASNGPQGQIRAHVQLTVAVFITFKVEPERTTVYQGHTALLQCEAQGDPKPLIQWKGKDRILDPTKLGPRMHIFQNGSLVIHDVAPEDSGRYTCIAGNSCNIKHTEAPLYVVDKPVPEESEGPGSPPPYKMIQTIGLSVGAAVAYIIAVLGLMFYCKKRCKAKRLQKQPEGEEPEMECLNGGPLQNGQPSAEIQEEVALTSLGSGPAATNKRHSTSDKMHFPRSSLQPITTLGKSEFGEVFLAKAQGLEEGVAETLVLVKSLQSKDEQQQLDFRRELEMFGKLNHANVVRLLGLCREAEPHYMVLEYVDLGDLKQFLRISKSKDEKLKSQPLSTKQKVALCTQVALGMEHLSNNRFVHKDLAARNCLVSAQRQVKVSALGLSKDVYNSEYYHFRQAWVPLRWMSPEAILEGDFSTKSDVWAFGVLMWEVFTHGEMPHGGQADDEVLADLQAGKARLPQPEGCPSKLYRLMQRCWALSPKDRPSFSEIASALGDSTVDSKP

SEQ ID NO: 5281 - protein, 782 aa, Homo sapiens
MNSAEQTVTWLITLGVLESPKKTISDPEGFLQASLKDGVVLCRLLERLLPGTIEKVYPEPRSESECLSNIREFLRGCGASLRLETFDANDLYQGQNFNKVLSSLVTLNKVTADIGLGSDSVCARPSSHRIKSFDSLGSQSLHTRTSKLFQGQYRSLDMTDNSNNQLVVRAKFNFQQTNEDELSFSKGDVIHVTRVEEGGWWEGTLNGRTGWFPSNYVREVKASEKPVSPKSGTLKSPPKGFDTTAINKSYYNVVLQNILETENEYSKELQTVLSTYLRPLQTSEKLSSANISYLMGNLEEICSFQQMLVQSLEECTKLPEAQQRVGGCFLNLMPQMKTLYLTYCANHPSAVNVLTEHSEELGEFMETKGASSPGILVLTTGLSKPFMRLDKYPTLLKELERHMEDYHTDRQDIQKSMAAFKNLSAQCQEVRKRKELELQILTEAIRNWEGDDIKTLGNVTYMSQVLIQCAGSEEKNERYLLLFPNVLLMLSASPRMSGFIYQGKLPTTGMTITKLEDSENHRNAFEISGSMIERILVSCNNQQDLQEWVEHLQKQTKVTSVGNPTIKPHSVPSHTLPSHPVTPSSKHADSKPAPLTPAYHTLPHPSHHGTPHTTINWGPLEPPKTPKPWSLSCLRPAPPLRPSAALCYKEDLSKSPKTMKKLLPKRKPERKPSDEEFASRKSTAALEEDAQILKVIEAYCTSAKTRQTLNSTWQGTDLMHNHVLADDDQPSLDSLGRRSSLSRLEPSDLSEDSDYDSIWTAHSYRMGSTSRKSCCSYISHQN

SEQ ID NO: 5282 - protein, 1399 aa, Homo sapiens
MDLSALRVEEVQNVINAMQKILECPICLELIKEPVSTKCDHIFCKFCMLKLLNQKKGPSQCPLCKNDITKRSLQESTRFSQLVEELLKIICAFQLDTGLEYANSYNFAKKENNSPEHLKDEVSIIQSMGYRNRAKRLLQSEPENPSLQETSLSVQLSNLGTVRTLRTKQRIQPQKTSVYIELGSDSSEDTVNKATYCSVGDQELLQITPQGTRDEISLDSAKKAACEFSETDVTNTEHHQPSNNDLNTTEKRAAERHPEKYQGSSVSNLHVEPCGTNTHASSLQHENSSLLLTKDRMNVEKAEFCNKSKQPGLARSQHNRWAGSKETCNDRRTPSTEKKVDLNADPLCERKEWNKQKLPCSENPRDTEDVPWITLNSSIQKVNEWFSRSDELLGSDDSHDGESESNAKVADVLDVLNEVDEYSGSSEKIDLLASDPHEALICKSERVHSKSVESNIEDKIFGKTYRKKASLPNLSHVTENLIIGAFVTEPQIIQERPLTNKLKRKRRPTSGLHPEDFIKKADLAVQKTPEMINQGTNQTEQNGQVMNITNSGHENKTKGDSIQNEKNPNPIESLEKESAFKTKAEPISSSISNMELELNIHNSKAPKKNRLRRKSSTRHIHALELVVSRNLSPPNCTELQIDSCSSSEEIKKKKYNQMPVRHSRNLQLMEGKEPATGAKKSNKPNEQTSKRHDSDTFPELKLTNAPGSFTKCSNTSELKEFVNPSLPREEKEEKLETVKVSNNAEDPKDLMLSGERVLQTERSVESSSISLVPGTDYGTQESISLLEVSTLGKAKTEPNKCVSQCAAFENPKGLIHGCSKDNRNDTEGFKYPLGHEVNHSRETSIEMEESELDAQYLQNTFKVSKRQSFAPFSNPGNAEEECATFSAHSGSLKKQSPKVTFECEQKEENQGKNESNIKPVQTVNITAGFPVVGQKDKPVDNAKCSIKGGSRFCLSSQFRGNETGLITPNKHGLLQNPYRIPPLFPIKSFVKTKCKKNLLEENFEEHSMSPEREMGNENIPSTVSTISRNNIRENVFKEASSSNINEVGSSTNEVGSSINEIGSSDENIQAELGRNRGPKLNAMLRLGVLQPEVYKQSLPGSNCKHPEIKKQEYEEVVQTVNTDFSPYLISDNLEQPMGSSHASQVCSETPDDLLDDGEIKEDTSFAENDIKESSAVFSKSVQKGELSRSPSPFTHTHLAQGYRRGAKKLESSEENLSSEDEELPCFQHLLFGKVNNIPSQSTRHSTVATECLSKNTEENLLSLKNSLNDCSNQVILAKASQEHHLSEETKCSASLFSSQCSELEDLTANTNTQDPFLIGSSKQMRHQSESQGVGLSDKELVSDDEERGTGLEENNQEEQSMDSNLGIGTRFLCLPQSIYRSELNVYAFGEHILQISKYS

SEQ ID NO: 5283 - protein, 529 aa, Homo sapiens
MFPLTEENKHVAQLLLNTGTCPRCIFRFCGVDFHAPYKLPYKELLNELQKFLETEKDELILEVMNPPPKKIRLQELEDSIDNLSQNGEGRISVSHVGSTASKNSNLNVCNVCLGILQEFCEKDFIKKVCQKVEASGFEFTSLVFSVSFPPQLSVREHAAWLLVKQEMGKQSLSLGRDDIVQLKEAYKWITHPLFSEELGVPIDGKSLFEVSVVFAHPETVEDCHFLAAICPDCFKPAKNKQSVFTRMAVMKALNKIKEEDFLKQFPCPPNSPKAVCAVLEIECAHGAVFVAGRYNKYSRNLPQTPWIIDGERKLESSVEELISDHLLAVFKAESFNFSSSGREDVDVRTLGNGRPFAIELVNPHRVHFTSQEIKELQQKINNSSNKIQVRDLQLVTREAIGHMKEGEEEKTKTYSALIWTNKAIQKKDIEFLNDIKDLKIDQKTPLRVLHRRPLAVRARVIHFMETQYVDEHHFRLHLKTQAGTYIKEFVHGDFGRTKPNIGSLMNVTADILELDVESVDVDWPPALDD

SEQ ID NO: 5284 - protein, 1461 aa, Homo sapiens
MEARSRSAEELRRAELVEIIVETEAQTGVSGINVAGGGKEGIFVRELREDSPAARSLSLQEGDQLLSARVFFENFKYEDALRLLQCAEPYKVSFCLKRTVPTGDLALRPGTVSGYEIKGPRAKVAKLNIQSLSPVKKKKMVPGALGVPADLAPVDVEFSFPKFSRLRRGLKAEAVKGPVPAAPARRRLQLPRLRVREVAEEAQAARLAAAAPPPRKAKVEAEVAAGARFTAPQVELVGPRLPGAEVGVPQVSAPKAAPSAEAAGGFALHLPTLGLGAPAPPAVEAPAVGIQVPQVELPALPSLPTLPTLPCLETREGAVSVVVPTLDVAAPTVGVDLALPGAEVEARGEAPEVALKMPRLSFPRFGARAKEVAEAKVAKVSPEARVKGPRLRMPTFGLSLLEPRPAAPEVVESKLKLPTIKMPSLGIGVSGPEVKVPKGPEVKLPKAPEVKLPKVPEAALPEVRLPEVELPKVSEMKLPKVPEMAVPEVRLPEVELPKVSEMKLPKVPEMAVPEVRLPEVQLLKVSEMKLPKVPEMAVPEVRLPEVQLPKVSEMKLPEVSEVAVPEVRLPEVQLPKVPEMKVPEMKLPKVPEMKLPEMKLPEVQLPKVPEMAVPDVHLPEVQLPKVPEMKLPEMKLPEVKLPKVPEMAVPDVHLPEVQLPKVPEMKLPKMPEMAVPEVRLPEVQLPKVSEMKLPKVPEMAVPDVHLPEVQLPKVCEMKVPDMKLPEIKLPKVPEMAVPDVHLPEVQLPKVSEIRLPEMQVPKVPDVHLPKAPEVKLPRAPEVQLKATKAEQAEGMEFGFKMPKMTMPKLGRAESPSRGKPGEAGAEVSGKLVTLPCLQPEVDGEAHVGVPSLTLPSVELDLPGALGLQGQVPAAKMGKGERVEGPEVAAGVREVGFRVPSVEIVTPQLPAVEIEEGRLEMIETKVKPSSKFSLPKFGLSGPKVAKAEAEGAGRATKLKVSKFAISLPKARVGAEAEAKGAGEAGLLPALDLSIPQLSLDAHLPSGKVEVAGADLKFKGPRFALPKFGVRGRDTEAAELVPGVAELEGKGWGWDGRVKMPKLKMPSFGLARGKEAEVQGDRASPGEKAESTAVQLKIPEVELVTLGAQEEGRAEGAVAVSGMQLSGLKVSTAGQVVTEGHDAGLRMPPLGISLPQVELTGFGEAGTPGQQAQSTVPSAEGTAGYRVQVPQVTLSLPGAQVAGGELLVGEGVFKMPTVTVPQLELDVGLSREAQAGEAATGEGGLRLKLPTLGARARVGGEGAEEQPPGAERTFCLSLPDVELSPSGGNHAEYQVAEGEGEAGHKLKVRLPRFGLVRAKEGAEEGEKAKSPKLRLPRVGFSQSEMVTGEGSPSPEEEEEEEEEGSGEGASGRRGRVRVRLPRVGLAAPSKASRGQEGDAAPKSPVREKSPKFRFPRVSLSPKARSGSGDQEEGGLRVRLPSVGFSETGAPGPARMEGAQAAAV

SEQ ID NO: 5285 - protein, 284 aa, Homo sapiens
MTTAHFYCQYCTASLLGKKYVLKDDSPYCVTCYDRVFSNYCEECKKPIESDSKDLCYKDRHWHEGCFKCTKCNHSLVEKPFAAKDERLLCTECYSNECSSKCFHCKRTIMPGSRKMEFKGNYWHETCFVCENCRQPIGTKPLISKESGNYCVPCFEKEFAHYCNFCKKVITSGGITFCDQLWHKECFLCSGCRKDLCEEQFMSRDDYPFCVDCYNHLYANKCVACSKPISGLTGAKFICFQDSQWHSECFNCGKCSVSLVGKGFLTQNKEIFCQKCGSGMDTDI

SEQ ID NO: 5286 - protein, 1014 aa, Homo sapiens
MGAARGSPARPRRLPLLSVLLLPLLGGTQTAIVFIKQPSSQDALQGRRALLRCEVEAPGPVHVYWLLDGAPVQDTERRFAQGSSLSFAAVDRLQDSGTFQCVARDDVTGEEARSANASFNIKWIEAGPVVLKHPASEAEIQPQTQVTLRCHIDGHPRPTYQWFRDGTPLSDGQSNHTVSSKERNLTLRPAGPEHSGLYSCCAHSAFGQACSSQNFTLSIADESFARVVLAPQDVVVARYEEAMFHCQFSAQPPPSLQWLFEDETPITNRSRPPHLRRATVFANGSLLLTQVRPRNAGIYRCIGQGQRGPPIILEATLHLAEIEDMPLFEPRVFTAGSEERVTCLPPKGLPEPSVWWEHAGVRLPTHGRVYQKGHELVLANIAESDAGVYTCHAANLAGQRRQDVNITVATVPSWLKKPQDSQLEEGKPGYLDCLTQATPKPTVVWYRNQMLISEDSRFEVFKNGTLRINSVEVYDGTWYRCMSSTPAGSIEAQARVQVLEKLKFTPPPQPQQCMEFDKEATVPCSATGREKPTIKWERADGSSLPEWVTDNAGTLHFARVTRDDAGNYTCIASNGPQGQIRAHVQLTVAVFITFKVEPERTTVYQGHTALLQCEAQGDPKPLIQWKDKPVPEESEGPGSPPPYKMIQTIGLSVGAAVAYIIAVLGLMFYCKKRCKAKRLQKQPEGEEPEMECLNGGPLQNGQPSAEIQEEVALTSLGSGPAATNKRHSTSDKMHFPRSSLQPITTLGKSEFGEVFLAKAQGLEEGVAETLVLVKSLQSKDEQQQLDFRRELEMFGKLNHANVVRLLGLCREAEPHYMVLEYVDLGDLKQFLRISKSKDEKLKSQPLSTKQKVALCTQVALGMEHLSNNRFVHKDLAARNCLVSAQRQVKVSALGLSKDVYNSEYYHFRQAWVPLRWMSPEAILEGDFSTKSDVWAFGVLMWEVFTHGEMPHGGQADDEVLADLQAGKARLPQPEGCPSKLYRLMQRCWALSPKDRPSFSEIASALGDSTVDSKP

SEQ ID NO: 5287 - protein, 914 aa, Homo sapiens
MGNKAKIAKCPLRTKTGHILKSTQDTCIGSEKLLQKKPVGSETSQAKGEKNGMTFSSTKDLCKQCIDKDCLHIQKEISPATPNMQKTRNTVNTSLVGKQKPHKKHITAENMKSSLVCLTQDQLQQILMTVNQGNRSLSLTENGKEAKSQYSLYLNSISNQPKDENIMGLFKKTEMVSSVPAENKSVLNEHQETSKQCEQKIAIENEWKPADIFSTLGERECDRSSLEAKKAQWRKELDEQVALKKKEKEVSEKWNDPWKKSESDKIIWEKHQILDQSRETVLLEHPFSAVKQELQRKWIEELNKQIEDDRQRKIEEKIIYSKGEEHDRWAMHFDSLKSYPGSQSQLFSQSTHKQPEYFCVSPDTQELADVSSVCTPTTGSQVEPSEEEHIAKPIKDVVMANSKKTNFLRSMTALLDPAQIEERDRRRQKQLEHQKAITAQVEEKRRKKQLEEEQRKKEEQEEELRLAQEREEMQKQYEEDILKQKQKEEIMTLKTNELFQTMQRAQELAQRLKQEQRIRELAQKGHDTSRLIKNLGVDTIQMEYNASNISNSRHDSDEISGKMNTYMNSTTSKKDTGVQTDDLNIGIFTNAESHCGSLMERDITNCSSPEISAELIGQFSTKKNKQELTQDKGASLEKENNRCNDQCNQFTRIEKQTKHMKKYPKRPDWNINKPPKRYIPASEKYPKQLQKQREEKKVRRQMELLHLVEKNNPGHLSQNRGISPEIFHSSHQETESKLRWHLVKKEEEPLNIHSFSKERSPSSPVPVVKNRTQQTQNTLHLPLKNSSYERENLISGSNQTELSSGISESSHFIPYVRTNEIYYLDPDAPLSGPSTQDPQYQNSQDCGQKRQLFDSDCVRDPLLNPNMVKNRDRQQAILKGLSELRQGLLQKQKELESSLLPLAENQEESFGSSF

SEQ ID NO: 5288 - protein, 488 aa, Homo sapiens
MPGGRRGPSRQQLSRSALPSLQTLVGGGCGNGTGLRNRNGSAIGLPVPPITALITPGPVRHCQIPDLPVDGSLLFEFLFFIYLLVALFIQYINIYKTVWWYPYNHPASCTSLNFHLIDYHLAAFITVMLARRLVWALISEATKAGAASMIHYMVLISARLVLLTLCGWVLCWTLVNLFRSHSVLNLLFLGYPFGVYVPLCCFHQDSRAHLLLTDYNYVVQHEAVEESASTVGGLAKSKDFLSLLLESLKEQFNNATPIPTHSCPLSPDLIRNEVECLKADFNHRIKEVLFNSLFSAYYVAFLPLCFVKSTQYYDMRWSCEHLIMVWINAFVMLTTQLLPSKYCDLLHKSAAHLGKWQKLEHGSYSNAPQHIWSENTIWPQGVLVRHSRCLYRAMGPYNVAVPSDVSHARFYFLFHRPLRLLNLLILIEGSVVFYQLYSLLRSEKWNHTLSMALILFCNYYVLFKLLRDRIVLGRAYSYPLNSYELKAN

SEQ ID NO: 5289 - protein, 507 aa, Homo sapiens
MDGTETRQRRLDSCGKPGELGLPHPLSTGGLPVASEDGALRAPESQSVTPKPLETEPSRETTWSIGLQVTVPFMFAGLGLSWAGMLLDYFQHWPVFVEVKDLLTLVPPLVGLKGNLEMTLASRLSTAANTGQIDDPQEQHRVISSNLALIQVQATVVGLLAAVAALLLGVVSREEVDVAKVELLCASSVLTAFLAAFALGVLMVCIVIGARKLGVNPDNIATPIAASLGDLITLSILALVSSFFYRHKDSRYLTPLVCLSFAALTPVWVLIAKQSPPIVKILKFGWFPIILAMVISSFGGLILSKTVSKQQYKGMAIFTPVICGVGGNLVAIQTSRISTYLHMWSAPGVLPLQMKKFWPNPCSTFCTSEINSMSARVLLLLVVPGHLIFFYIIYLVEGQSVINSQTFVVLYLLAGLIQVTILLYLAEVMVRLTWHQALDPDNHCIPYLTGLGDLLGSSSVGHTAAVPRRCTASPGWGLIQPFICTQHLIVSLLSFYFPFCLLAKTSI

SEQ ID NO: 5290 - protein, 667 aa, Homo sapiens
MSSQPAGNQTSPGATEDYSYGSWYIDEPQGGEELQPEGEVPSCHTSIPPGLYHACLASLSILVLLLLAMLVRRRQLWPDCVRGRPGLPSPVDFLAGDRPRAVPAAVFMVLLSSLCLLLPDEDALPFLTLASAPSQDGKTEAPRGAWKILGLFYYAALYYPLAACATAGHTAAHLLGSTLSWAHLGVQVWQRAECPQVPKIYKYYSLLASLPLLLGLGFLSLWYPVQLVRSFSRRTGAGSKGLQSSYSEEYLRNLLCRKKLGSSYHTSKHGFLSWARVCLRHCIYTPQPGFHLPLKLVLSATLTGTAIYQVALLLLVGVVPTIQKVRAGVTTDVSYLLAGFGIVLSEDKQEVVELVKHHLWALEVCYISALVLSCLLTFLVLMRSLVTHRTNLRALHRGAALDLSPLHRSPHPSRQAIFCWMSFSAYQTAFICLGLLVQQIIFFLGTTALAFLVLMPVLHGRNLLLFRSLESSWPFWLTLALAVILQNMAAHWVFLETHDGHPQLTNRRVLYAATFLLFPLNVLVGAMVATWRVLLSALYNAIHLGQMDLSLLPPRAATLDPGYYTYRNFLKIEVSQSHPAMTAFCSLLLQAQSLLPRTMAAPQDSLRPGEEDEGMQLLQTKDSMAKGARPGASRGRARWGLAYTLLHNPTLQVFRKTALLGANGAQP

SEQ ID NO: 5291 - protein, 680 aa, Homo sapiens
MSTADALDDENTFKILVATDIHLGFMEKDAVRGNDTFVTLDEILRLAQENEVDFILLGGDLFHENKPSRKTLHTCLELLRKYCMGDRPVQFEILSDQSVNFGFSKFPWVNYQDGNLNISIPVFSIHGNHDDPTGADALCALDILSCAGFVNHFGRSMSVEKIDISPVLLQKGSTKIALYGLGSIPDERLYRMFVNKKVTMLRPKEDENSWFNLFVIHQNRSKHGSTNFIPEQFLDDFIDLVIWGHEHECKIAPTKNEQQLFYISQPGSSVVTSLSPGEAVKKHVGLLRIKGRKMNMHKIPLHTVRQFFMEDIVLANHPDIFNPDNPKVTQAIQSFCLEKIEEMLENAERERLGNSHQPEKPLVRLRVDYSGGFEPFSVLRFSQKFVDRVANPKDIIHFFRHREQKEKTGEEINFGKLITKPSEGTTLRVEDLVKQYFQTAEKNVQLSLLTERGMGEAVQEFVDKEEKDAIEELVKYQLEKTQRFLKERHIDALEDKIDEEVRRFRETRQKNTNEEDDEVREAMTRARALRSQSEESASAFSADDLMSIDLAEQMANDSDDSISAATNKGRGRGRGRRGGRGQNSASRGGSQRGRAFKSTRQQPSRNVTTKNYSEVIEVDESDVEEDIFPTTSKTDQRWSSTSSSKIMSQSQVSKGVDFESSEDDDDDPFMNTSSLRRNRR

SEQ ID NO: 5292 - protein, 703 aa, Homo sapiens
MARARRAVVGSVRDVSTAATNLFYFTDFCIFLQPTHCFCCPEVSSSNYLSESFFMVKGAALFLQQGSSPQGQRSLQHPHKHAGDLPQHLQVMINLLRCEDRIKLAVRLESAWADRVRYMVVVYSSGRQDTEENILLGVDFSSKESKSCTIGMVLRLWSDTKIHLDGDGGFSVSTAGRMHIFKPVSVQAMWSALQVLHKACEVARRHNYFPGGVALIWATYYESCISSEQSCINEWNAMQDLESTRPDSPALFVDKPTEGERTERLIKAKLRSIMMSQDLENVTSKEIRNELEKQMNCNLKELKEFIDNEMLLILGQMDKPSLIFDHLYLGSEWNASNLEELQGSGVDYILNVTREIDNFFPGLFAYHNIRVYDEETTDLLAHWNEAYHFINKAKRNHSKCLVHCKMGVSRSASTVIAYAMKEFGWPLEKAYNYVKQKRSITRPNAGFMRQLSEYEGILDASKQRHNKLWRQQTDSSLQQPVDDPAGPGDFLPETPDGTPESQLPFLDDAAQPGLGPPLPCCFRRLSDPLLPSPEDETGSLVHLEDPEREALLEEAAPPAEVHRPARQPQQGSGLCEKDVKKKLEFGSPKGRSGSLLQVEETEREEGLGAGRWGQLPTQLDQNLLNSENLNNNSKRSCPNGMEVGRARPAGWHTPSLPSHSNWPTSASVVGTTGTRHHTQLIFFYCLLWAPSSHLQGPEGSFTG

SEQ ID NO: 5293 - protein, 738 aa, Homo sapiens
MTSDQDAKVVAEPQTQRVQEGKDSAHLMNGPISQTTSQTSSIPPLSQVPATKVSELNPNAEVWGAPVLHLEASSAADGVSAAWEEVAGHHADRGPQGSDANGDGDQGHENAALPDPQESDPADMNALALGPSEYDSLPENSETGGNESQPDSQEDPREVLKKTLEFCLSRENLASDMYLISQMDSDQYVPITTVANLDHIKKLSTDVDLIVEVLRSLPLVQVDEKGEKVRPNQNRCIVILREISESTPVEEVEALFKGDNLPKFINCEFAYNDNWFITFETEADAQQAYKYLREEVKTFQGKPIKARIKAKAIAINTFLPKNGFRPLDVSLYAQQRYATSFYFPPMYSPQQQFPLYSLITPQTWSATHSYLDPPLVTPFPNTGFINGFTSPAFKPAASPLTSLRQYPPRSRNPSKSHLRHAIPSAERGPGLLESPSIFNFTADRLINGVRSPQTRQAGQTRTRIQNPSAYAKREAGPGRVEPGSLESSPGLGRGRKNSFGYRKKREEKFTSSQTQSPTPPKPPSPSFELGLSSFPPLPGAAGNLKTEDLFENRLSSLIIGPSKERTLSADASVNTLPVVVSREPSVPASCAVSATYERSPSPAHLPDDPKVAEKQRETHSVDRLPSALTATACKSVQVNGAATELRKPSYAEICQRTSKEPPSSPLQPQKEQKPNTVGCGKEEKKLAEPAERYREPPALKSTPGAPRDQRRPAGGRPSPSAMGKRLSREQSTPPKSPQ

SEQ ID NO: 5294 - protein, 1181 aa, Homo sapiens
MPENPATDKLQVLQVLDRLKMKLQEKGDTSQNEKLSMFYETLKSPLFNQILTLQQSIKQLKGQLNHIPSDCSANFDFSRKGLLVFTDGSITNGNVHRPSNNSTVSGLFPWTPKLGNEDFNSVIQQMAQGRQIEYIDIERPSTGGLGFSVVALRSQNLGKVDIFVKDVQPGSVADRDQRLKENDQILAINHTPLDQNISHQQAIALLQQTTGSLRLIVAREPVHTKSSTSSSLNDTTLPETVCWGHVEEVELINDGSGLGFGIVGGKTSGVVVRTIVPGGLADRDGRLQTGDHILKIGGTNVQGMTSEQVAQVLRNCGNSVRMLVARDPAGDISVTPPAPAALPVALPTVASKGPGSDSSLFETYNVELVRKDGQSLGIRIVGYVGTSHTGEASGIYVKSIIPGSAAYHNGHIQVNDKIVAVDGVNIQGFANHDVVEVLRNAGQVVHLTLVRRKTSSSTSPLEPPSDRGTVVEPLKPPALFLTGAVETETNVDGEDEEIKERIDTLKNDNIQALEKLEKVPDSPENELKSRWENLLGPDYEVMVATLDTQIADDAELQKYSKLLPIHTLRLGVEVDSFDGHHYISSIVSGGPVDTLGLLQPEDELLEVNGMQLYGKSRREAVSFLKEVPPPFTLVCCRRLFDDEASVDEPRRTETSLPETEVDHNMDVNTEEDDDGELALWSPEVKIVELVKDCKGLGFSILDYQDPLDPTRSVIVIRSLVADGVAERSGGLLPGDRLVSVNEYCLDNTSLAEAVEILKAVPPGLVHLGICKPLVEDNEEESCYILHSSSNEDKTEFSGTIHDINSSLILEAPKGFRDEPYFKEELVDEPFLDLGKSFHSQQKEIEQSKEAWEMHEFLTPRLQEMDEEREILVDEEYELYQDPSPSMELYPLSHIQEATPVPSVNELHFGTQWLHDNEPSESQEARTGRTVYSQEAQPYGYCPENVMKENFVMESLPSVPSTEGNSQQGRFDDLENLNSLAKTSLDLGMIPNDVQGPSLLIDLPVVAQRREQEDLPLYQHQATRVISKASAYTGMLSSRYATDTCELPEREEGEGEETPNFSHWGPPRIVEIFREPNVSLGISIVGGQTVIKRLKNGEELKGIFIKQVLEDSPAGKTNALKTGDKILEVSGVDLQNASHSEAVEAIKNAGNPVVFIVQSLSSTPPWTTERDSVSKKKKRKER

SEQ ID NO: 5295 - protein, 1053 aa, Homo sapiens
MSSEESYRAILRYLTNEREPYAPGTEGNVKRKIRKAAACYVVRGGTLYYQRRQRHRKTFAELEVVLQPERRRDLIEAAHLGPGGTHHTRHQTWHYLSKTYWWRGILKQVKDYIKQCSKCQEKLDRSRPISDVSEMLEELGLDLESGEESNESEDDLSNFTSSPTTASKPAKKKPVSKHELVFVDTKGVVKRSSPKHCQAVLKQLNEQRLSNQFCDVTLLIEGEEYKAHKSVLSANSEYFRDLFIEKGAVSSHEAVVDLSGFCKASFLPLLEFAYTSVLSFDFCSMADVAILARHLFMSEVLEICESVHKLMEEKQLTVYKKGEVQTVASTQDLRVQNGGTAPPVASSEGTTTSLPTELGDCEIVLLVNGELPEAEQNGEVGRQPEPQVSSEAESALSSVGCIADSHPEMESVDLITKNNQTELETSNNRENNTVSNIHPKLSKENVISSSPEDSGMGNDISAEDICAEDIPKHRQKVDQPLKDQENLVASTAKTDFGPDDDTYRSRLRQRSVNEGAYIRLHKGMEKKLQKRKAVPKSAVQQVAQKLVQRGKKMKQPKRDAKENTEEASHKCGECGMVFQRRYALIMHKLKHERARDYKCPLCKKQFQYSASLRAHLIRHTRKDAPSSSSSNSTSNEASGTSSEKGRTKREFICSICGRTLPKLYSLRIHMLKHTGVKPHACQVCGKTFIYKHGLKLHQSLHQSQKQFQCELCVKSFVTKRSLQEHMSIHTGESKYLCSVCGKSFHRGSGLSKHFKKHQPKPEVRGYHCTQCEKSFFEARDLRQHMNKHLGVKPFQCQFCDKCYSWKKDWYSHVKSHSVTEPYRCNICGKEFYEKALFRRHVKKATHGKKGRAKQNLERVCEKCGRKFTQLREYRRHMNNHEGVKPFECLTCGVAWADARSLKRHVRTHTGERPYVCPVCSEAYIDARTLRKHMTKFHRDYVPCKIMLEKDTLQFHNQGTQVAHAVSILTAGMQEQESSGPQELETVVVTGETMEALEAVAATEEYPSVSTLSDQSIMQVVNYVLAQQQGQKLSEVAEAIQTVKVEVAHISGGE

SEQ ID NO: 5296 - protein, 312 aa, Homo sapiens
MENGSYTSYFILLGLFNHTRAHQVLFMMVLSIVLTSLFGNSLMILLIHWDHRLHTPMYFLLSQLSLMDVMLVSTTVPKMAADYLTGSKAISRAGCGAQIFFLPTLGGGECFLLAAMAYDRYAAVCHPLRYPTLMSWQLCLRMNLSCWLLGAADGLLQAVATLSFPYCGAHEIDHFFCETPVLVRLACADTSVFENAMYICCVLMLLVPFSLILSSYGLILAAVLHMRSTEARKKAFATCSSHVAVVGLFYGAAIFTYMRPKSHRSTNHDKVVSAFYTMFTPLLNPLIYSVKNSEVKGALTRCMGRCVALSRE

SEQ ID NO: 5297 - protein, 914 aa, Homo sapiens
MEAAVKEEISLEDEAVDKNIFRDCNKIAFYRRQKQWLSKKSTYQALLDSVTTDEDSTRFQIINEASKVPLLAEIYGIEGNIFRLKINEETPLKPRFEVPDVLTSKPSTVRLISCSGDTGSLILADGKGDLKCHITANPFKVDLVSEEEVVISINSLGQLYFEHLQILHKQRAAKENEEETSVDTSQENQEDLGLWEEKFGKFVDIKANGPSSIGLDFSLHGFEHLYGIPQHAESHQLKNTGDGDAYRLYNLDVYGYQIYDKMGIYGSVPYLLAHKLGRTIGIFWLNASETLVEINTEPAVEYTLTQMGPVAAKQKVRSRTHVHWMSESGIIDVFLLTGPTPSDVFKQYSHLTGTQAMPPLFSLGYHQCRWNYEDEQDVKAVDAGFDEHDIPYDAMWLDIEHTEGKRYFTWDKNRFPNPKRMQELLRSKKRKLVVISDPHIKIDPDYSVYVKAKDQGFFVKNQEGEDFEGVCWPGLSSYLDFTNPKVREWYSSLFAFPVYQGSTDILFLWNDMNEPSVFRGPEQTMQKNAIHHGNWEHRELHNIYGFYHQMATAEGLIKRSKGKERPFVLTRSFFAGSQKYGAVWTGDNTAEWSNLKISIPMLLTLSITGISFCGADIGGFIGNPETELLVRWYQAGAYQPFFRGHATMNTKRREPWLFGEEHTRLIREAIRERYGLLPYWYSLFYHAHVASQPVMRPLWVEFPDELKTFDMEDEYMLGSALLVHPVTEPKATTVDVFLPGSNEVWYDYKTFAHWEGGCTVKIPVALDTIPVFQRGGSVIPIKTTVGKSTGWMTESSYGLRVALSTKGSSVGELYLDDGHSFQYLHQKQFLHRKFSFCSSVLINSFADQRGHYPSKCVVEKILVLGFRKEPSSVTTHSSDGKDQPVAFTYCAKTSILSLEKLSLNIATDWEVRII

SEQ ID NO: 5298 - protein, 318 aa, Homo sapiens
MSDSNLSDNHLPDTFFLTGIPGLEAAHFWIAIPFCAMYLVALVGNAALILVIAMDNALHAPMYLFLCLLSLTDLALSSTTVPKMLAILWLHAGEISFGGCLAQMFCVHSIYALESSILLAMAFDRYVAICNPLRYTTILNHAVIGRIGFVGLFRSVAIVSPFIFLLRRLPYCGHRVMTHTYCEHMGIARLACANITVNIVYGLTVALLAMGLDSILIAISYGFILHAVFHLPSHDAQHKALSTCGSHIGIILVFYIPAFFSFLTHRFGHHEVPKHVHIFLANLYVLVPPVLNPILYGARTKEIRSRLLKLLHLGKTSI

SEQ ID NO: 5299 - protein, 610 aa, Homo sapiens
MQYSHHCEHLLERLNKQREAGFLCDCTIVIGEFQFKAHRNVLASFSEYFGAIYRSTSENNVFLDQSQVKADGFQKLLEFIYTGTLNLDSWNVKEIHQAADYLKVEEVVTKCKIKMEDFAFIANPSSTEISSITGNIELNQQTCLLTLRDYNNREKSEVSTDLIQANPKQGALAKKSSQTKKKKKAFNSPKTGQNKTVQYPSDILENASVELFLDANKLPTPVVEQVAQINDNSELELTSVVENTFPAQDIVHTVTVKRKRGKSQPNCALKEHSMSNIASVKSPYEAENSGEELDQRYSKAKPMCNTCGKVFSEASSLRRHMRIHKGVKPYVCHLCGKAFTQCNQLKTHVRTHTGEKPYKCELCDKGFAQKCQLVFHSRMHHGEEKPYKCDVCNLQFATSSNLKIHARKHSGEKPYVCDRCGQRFAQASTLTYHVRRHTGEKPYVCDTCGKAFAVSSSLITHSRKHTGEKPYICGICGKSFISSGELNKHFRSHTGERPFICELCGNSYTDIKNLKKHKTKVHSGADKTLDSSAEDHTLSEQDSIQKSPLSETMDVKPSDMTLPLALPLGTEDHHMLLPVTDTQSPTSDTLLRSTVNGYSEPQLIFLQQLY

SEQ ID NO: 5300 - protein, 468 aa, Homo sapiens
MPEDGAGDGGEVPALIPDGEPLREEQRPLKQSLGSSLCRESHWKCLLLTLLIHACGAVVAWCRLATVPRLVLGPEAALARGAGGPPPTYPASPCSDGYLYIPLAFVSLLYLLYLAECWHCHVRSCQAPRTDAHTVLALIRRLQQAPPCVWWKATSYHYVRRTRQITRYRNGDAYTTTQVYHERADSRTARGEFDYSAHGVRDVSKELVGLAEHAATRLRFTKCFSFGSAEAEASYLTQRARFFSANEGLDDYLEAREGMHLKDVDFRESLMVFADPRSPPWYARAWVFWLVSAATLSWPLRVVAAYGTAHVHYQVEKLFGASSPPPGAVPSGPPLSRVATVDFTELEWHICSNRQLVPSYSEAVVMGAGSGAYLRGCQRCRRSVSSNSLPPARPSGPRLPFSRSRLSLGAGGRATPGVFRSLSGGPLGRRGEDTEPLESPPCYEDALYFPVLIVHGDSGCQGDGQGAL

SEQ ID NO: 5301 - protein, 1584 aa, Homo sapiens
MSKQVSLPEMIKDWTKEHVKKWVNEDLKINEQYGQILLSEEVTGLVLQELTEKDLVEMGLPWGPALLIKRSYNKLNSKSPESDNHDPGQLDNSKPSKTEHQKNPKHTKKEEENSMSSNIDYDPREIRDIKQEESILMKENVLDEVANAKHKKKGKLKPEQLTCMPYPFDQFHDSHRYIEHYTLQPETGALNLIDPIHEFKALTNTETATEVDIKMKFSNEVFRFASACMNSRTNGTIHFGVKDKPHGEIVGVKITSKAAFIDHFNVMIKKYFEESEINEAKKCIREPRFVEVLLQNNTPSDRFVIEVDTIPKHSICNDKYFYIQMQICKDKIWKQNQNLSLFVREGASSRDILANSKQRDVDFKAFLQNLKSLVASRKEAEEEYGMKAMKKESEGLKLVKLLIGNRDSLDNSYYDWYILVTNKCHPNQIKHLDFLKEIKWFAVLEFDPESMINGVVKAYKESRVANLHFPNQYEDKTTNMWEKISTLNLYQQPSWIFCNGRSDLKSETYKPLEPHLWQRERASEVRKLILFLTDENIMTRGKFLVVFLLLSSVESPGDPLIETFWAFYQALKGMENMLCISVNSHIYQRWKDLLQTRMKMEDELTNHSISTLNIELVNSTILKLKSVTRSSRRFLPARGSSSVILEKKKEDVLTALEILCENECTETDIEKDKSKFLEFKKSKEEHFYRGGKVSWWNFYFSSENYSSDFVKRDSYEKLKDLIHCWAESPKPIFAKIINLYHHPGCGGTTLAMHVLWDLKKNFRCAVLKNKTTDFAEIAEQVINLVTYRAKSHQDYIPVLLLVDDFEEQENVYFLQNAIHSVLAEKDLRYEKTLVIILNCMRSRNPDESAKLADSIALNYQLSSKEQRAFGAKLKEIEKQHKNCENFYSFMIMKSNFDETYIENVVRNILKGQDVDSKEAQLISFLALLSSYVTDSTISVSQCEIFLGIIYTSTPWEPESLEDKMGTYSTLLIKTEVAEYGRYTGVRIIHPLIALYCLKELERSYHLDKCQIALNILEENLFYDSGIGRDKFQHDVQTLLLTRQRKVYGDETDTLFSPLMEALQNKDIEKVLSAGSRRFPQNAFICQALARHFYIKEKDFNTALDWARQAKMKAPKNSYISDTLGQVYKSEIKWWLDGNKNCRSITVNDLTHLLEAAEKASRAFKESQRQTDSKNYETENWSPQKSQRRYDMYNTACFLGEIEVGLYTIQILQLTPFFHKENELSKKHMVQFLSGKWTIPPDPRNECYLALSKFTSHLKNLQSDLKRCFDFFIDYMVLLKMRYTQKEIAEIMLSKKVSRCFRKYTELFCHLDPCLLQSKESQLLQEENCRKKLEALRADRFAGLLEYLNPNYKDATTMESIVNEYAFLLQQNSKKPMTNEKQNSILANIILSCLKPNSKLIQPLTTLKKQLREVLQFVGLSHQYPGPYFLACLLFWPENQELDQDSKLIEKYVSSLNRSFRGQYKRMCRSKQASTLFYLGKRKGLNSIVHKAKIEQYFDKAQNTNSLWHSGDVWKKNEVKDLLRRLTGQAEGKLISVEYGTEEKIKIPVISVYSGPLRSGRNIERVSFYLGFSIEGPLAYDIEVI

SEQ ID NO: 5302 - protein, 522 aa, Homo sapiens
MAVSHLPTMVQESVTFKDVAILFTQEEWGQLSPAQRALYRDVMLENYSNLVSLGLLGPKPDTFSQLEKREVWMPEDTPGGFCLDWMTMPASKKSTVKAEIPEEELDQWTIKERFSSSSHWKCASLLEWQCGGQEISLQRVVLTHPNTPSQECDESGSTMSSSLHSDQSQGFQPSKNAFECSECGKVFSKSSTLNKHQKIHNEKNANQKIHIKEKRYECRECGKAFHQSTHLIHHQRIHTGEKPYECKECGKAFSVSSSLTYHQKIHTGEKPFECNLCGKAFIRNIHLAHHHRIHTGEKPFKCNICEKAFVCRAHLTKHQNIHSGEKPYKCNECGKAFNQSTSFLQHQRIHTGEKPFECNECGKAFRVNSSLTEHQRIHTGEKPYKCNECGKAFRDNSSFARHRKIHTGEKPYRCGLCEKAFRDQSALAQHQRIHTGEKPYTCNICEKAFSDHSALTQHKRIHTREKPYKCKICEKAFIRSTHLTQHQRIHTGEKPYKCNKCGKAFNQTANLIQHQRHHIGEK

SEQ ID NO: 5303 - protein, 261 aa, Homo sapiens
MDEALETQLKTSRGRFSATESLPTLELLSQVDMDCRVHMRPIGLTWVLQLTLAWILLEACGGSRPLQARSQQHHGLAADLGKGKLHLAGPCCPSEMDTTETSGPGNHPERCGVPSPECESFLEHLQRALRSRFRLRLLGVRQAQPLCEELCQAWFANCEDDITCGPTWLPLSEKRGCEPSCLTYGQTFADGTDLCRSALGHALPVAAPGARHCFNISISAVPRPRPGRRGREAPSRRSRSPRTSILDAAGSGSGSGSGSGP

SEQ ID NO: 5304 - protein, 314 aa, Homo sapiens
MIIFNLSSYNPGPFILVGIPGLEQFHVWIGIPFCIIYIVAVVGNCILLYLIVVEHSLHEPMFFFLSMLAMTDLILSTAGVPKALSIFWLGAREITFPGCLTQMFFLHYNFVLDSAILMAMAFDHYVAICSPLRYTTILTPKTIIKSAMGISFRSFCIILPDVFLLTCLPFCRTRIIPHTYCEHIGVAQLACADISINFWYGFCVPIMTVISDVILIAVSYAHILCAVFGLPSQDACQKALGTCGSHVCVILMFYTPAFFSILAHRFGHNVSRTFHIMFANLYIVIPPALNPMVYGVKTKQIRDKVILLFSKGTG

SEQ ID NO: 5305 - protein, 345 aa, Homo sapiens
MSHLFDPRLPALAASPMLYLYGPERPGLPLAFAPAAALAASGRAETPQKPPYSYIALIAMAIQDAPEQRVTLNGIYQFIMDRFPFYHDNRQGWQNSIRHNLSLNDCFVKVPREKGRPGKGSYWTLDPRCLDMFENGNYRRRKRKPKPGPGAPEAKRPRAETHQRSAEAQPEAGSGAGGSGPAISRLQAAPAGPSPLLDGPSPPAPLHWPGTASPNEDAGDAAQGAAAVAVGQAARTGDGPGSPLRPASRSSPKSSDKSKSFSIDSILAGKQGQKPPSGDELLGGAKPGPGGRLGASLLAASSSLRPPFNASLMLDPHVQGGFYQLGIPFLSYFPLQVPDTVLHFQ

SEQ ID NO: 5306 - protein, 773 aa, Homo sapiens
MPTVISASVAPRTAAEPRSPGPVPHPAQSKATEAGGGNPSGIYSAIISRNFPIIGVKEKTFEQLHKKCLEKKVLYVDPEFPPDETSLFYSQKFPIQFVWKRPPEICENPRFIIDGANRTDICQGELGDCWFLAAIACLTLNQHLLFRVIPHDQSFIENYAGIFHFQFWRYGEWVDVVIDDCLPTYNNQLVFTKSNHRNEFWSALLEKAYAKLHGSYEALKGGNTTEAMEDFTGGVAEFFEIRDAPSDMYKIMKKAIERGSLMGCSIDTIIPVQYETRMACGLVRGHAYSVTGLDEVPFKGEKVKLVRLRNPWGQVEWNGSWSDRWKDWSFVDKDEKARLQHQVTEDGEFWMSYEDFIYHFTKLEICNLTADALQSDKLQTWTVSVNEGRWVRGCSAGGCRNFPDTFWTNPQYRLKLLEEDDDPDDSEVICSFLVALMQKNRRKDRKLGASLFTIGFAIYEVPKEMHGNKQHLQKDFFLYNASKARSKTYINMREVSQRFRLPPSEYVIVPSTYEPHQEGEFILRVFSEKRNLSEEVENTISVDRPVKKKKTKPIIFVSDRANSNKELGVDQESEEGKGKTSPDKQKQSPQPQPGSSDQESEEQQQFRNIFKQIAGDDMEICADELKKVLNTVVNKHKDLKTHGFTLESCRSMIALMDTDGSGKLNLQEFHHLWNKIKAWQKIFKHYDTDQSGTINSYEMRNAVNDAGFHLNNQLYDIITMRYADKHMNIDFDSFICCFVRLEGMFRAFHAFDKDGDGIIKLNVLEWLQLTMYA

SEQ ID NO: 5307 - protein, 266 aa, Homo sapiens
MHNILKKYHQYIVECHGITLLPQFLGMYRLNVDGVEIYVIVTRNVFSHRLSVYRKYDLKMANLKATFTFPKPTGSTVAREASDKEKAKELPTLKDNDFINEGQKIYIDDNNKKVFLEKLKKDVEFLAQLKLMDYSLLVGIHDVERAEQEEVECEENDGEEEGESDGTHPVGTPPDSPGNTLNSSPPLAPGEFDPNIDVYGIKCHENSPRKEVYFMAIIDILTHYDAKKKAAHAAKTVKHGAGAEISTVNPEQYSKRFLDFIGHILT

SEQ ID NO: 5308 - protein, 302 aa, Homo sapiens
MAQRYDELPHYGGMDGVGVPASMYGDPHAPRPIPPVHHLNHGPPLHATQHYGAHAPHPNVMPASMGSAVNDALKRDKDAIYGHPLFPLLALVFEKCELATCTPREPGVAGGDVCSSDSFNEDIAVFAKQVRAEKPLFSSNPELDNLMIQAIQVLRFHLLELEKVHELCDNFCHRYISCLKGKMPIDLVIDERDGSSKSDHEELSGSSTNLADHNPSSWRDHDDATSTHSAGTPGPSSGGHASQSGDNSSEQGDGLDNSVASPGTGDDDDPDKDKKRQKKRGIFPKVATNIMRAWLFQHLTVY

SEQ ID NO: 5309 - protein, 301 aa, Homo sapiens
MADQPKPISPLKNLLAGGFGGVCLVFVGHPLDTVKVRLQTQPPSLPGQPPMYSGTFDCFRKTLFREGITGLYRGMAAPIIGVTPMFAVCFFGFGLGKKLQQKHPEDVLSYPQLFAAGMLSGVFTTGIMTPGERIKCLLQIQASSGESKYTGTLDCAKKLYQEFGIRGIYKGTVLTLMRDVPASGMYFMTYEWLKNIFTPEGKRVSELSAPRILVAGGIAGIFNWAVAIPPDVLKSRFQTAPPGKYPNGFRDVLRELIRDEGVTSLYKGFNAVMIRAFPANAACFLGFEVAMKFLNWATPNL

SEQ ID NO: 5310 - protein, 1976 aa, Homo sapiens
MGVLKVWLGLALALAEFAVLPHHSEGACVYQDSLLADATIWKPDSCQSCRCHGDIVICKPAVCRNPQCAFEKGEVLQIAANQCCPECVLRTPGSCHHEKKIHEHGTEWASSPCSVCSCNHGEVRCTPQPCPPLSCGHQELAFIPEGSCCPVCVGLGKPCSYEGHVFQDGEDWRLSRCAKCLCRNGVAQCFTAQCQPLFCNQDETVVRVPGKCCPQCSARSCSAAGQVYEHGEQWSENACTTCICDRGEVRCHKQACLPLRCGKGQSRARRHGQCCEECVSPAGSCSYDGVVRYQDEMWKGSACEFCMCDHGQVTCQTGECAKVECARDEELIHLDGKCCPECISRNGYCVYEETGEFMSSNASEVKRIPEGEKWEDGPCKVCECRGAQVTCYEPSCPPCPVGTLALEVKGQCCPDCTSVHCHPDCLTCSQSPDHCDLCQDPTKLLQNGWCVHSCGLGFYQAGSLCLACQPQCSTCTSGLECSSCQPPLLMRHGQCVPTCGDGFYQDRHSCAVCHESCAGCWGPTEKHCLACRDPLHVLRDGGCESSCGKGFYNRQGTCSACDQSCDSCGPSSPRCLTCTEKTVLHDGKCMSECPGGYYADATGRCKVCHNSCASCSGPTPSHCTACSPPKALRQGHCLPRCGEGFYSDHGVCKACHSSCLACMGPAPSHCTGCKKPEEGLQVEQLSDVGIPSGECLAQCRAHFYLESTGICEACHQSCFRCAGKSPHNCTDCGPSHVLLDGQCLSQCPDGYFHQEGSCTECHPTCRQCHGPLESDCISCYPHISLTNGNCRTSCREEQFLNLVGYCADCHHLCQHCAADLHNTGSICLRCQNAHYLLLGDHCVPDCPSGYYAERGACKKCHSSCRTCQGRGPFSCSSCDTNLVLSHTGTCSTTCFPGHYLDDNHVCQPCNTHCGSCDSQASCTSCRDPNKVLLFGECQYESCAPQYYLDFSTNTCKECDWSCSACSGPLKTDCLQCMDGYVLQDGACVEQCLSSFYQDSGLCKNCDSYCLQCQGPHECTRCKGPFLLLEAQCVQECGKGYFADHAKHKCTACPQGCLQCSHRDRCHLCDHGFFLKSGLCVYNCVPGFSVHTSNETCSGKIHTPSLHVNGSLILPIGSIKPLDFSLLNVQDQEGRVEDLLFHVVSTPTNGQLVLSRNGKEVQLDKAGRFSWKDVNEKKVRFVHSKEKLRKGYLFLKISDQQFFSEPQLINIQAFSTQAPYVLRNEVLHISRGERATITTQMLDIRDDDNPQDVVIEIIDPPLHGQLLQTLQSPATPIYQFQLDELSRGLLHYAHDGSDSTSDVAVLQANDGHSFHNILFQVKTVPQNDRGLQLVANSMVWVPEGGMLQITNRILQAEAPGASAEEIIYKITQDYPQFGEVVLLVNMPADSPADEGQHLPDGRTATPTSTFTQQDINEGIVWYRHSGAPAQSDSFRFEVSSASNAQTRLESHMFNIAILPQTPEAPKVSLEASLHMTAREDGLTVIQPHSLSFINSEKPSGKIVYNITLPLHPNQGIIEHRDHPHSPIRYFTQEDINQGKVMYRPPPAAPHLQELMAFSFAGLPESVKFHFTVSDGEHTSPEMVLTIHLLPSDQQLPVFQVTAPRLAVSPGGSTSVGLQVVVRDAETAPKELFFELRRPPQHGVLLKHTAEFRRPMATGDTFTYEDVEKNALQYIHDGSSTREDSMEISVTDGLTVTMLEVRVEVSLSEDRGPRLAAGSSLSITVASKSTAIITRSHLAYVDDSSPDPEIWIQLNYLPSYGTLLRISGSEVEELSEVSNFTMEDINNKKIRYSAVFETDGHLVTDSFYFSVSDMDHNHLDNQIFTIMITPAENPPPVIAFADLITVDEGGRAPLSFHHFFATDDDDNLQRDAIIKLSALPKYGCIENTGTGDRFGPETASDLEASFPIQDVLENYIYYFQSVHESIEPTHDIFSFYVSDGTSRSEIHSINITIEVKTLEVGKVEPLTTIFHTIRELSL

SEQ ID NO: 5311 - protein, 619 aa, Homo sapiens
MAGPGVPGAPAARWKRHIVRQLRLRDRTQKALFLELVPAYNHLLEKAELLDKFSKKLQPEPNSVTPTTHQGPWEESELDSDQVPSLVALRVKWQEEEEGLRLVCGEMAYQVVEKGAALGTLESELQQRQSRLAALEARVAQLREARAQQAQQVEEWRAQNAVQRAAYEALRAHVGLREAALRRLQEEARDLLERLVQRKARAAAERNLRNERRERAKQARVSQELKKAAKRTVSISEGPDTLGDGMRERRETLALAPEPEPLEKEACEKWKRPFRSASATSLTLSHCVDVVKGLLDFKKRRGHSIGGAPEQRYQIIPVCVAARLPTRAQDVLDAHLSEVNAVRFGPNSSLLATGGADRLIHLWNVVGSRLEANQTLEGAGGSITSVDFDPSGYQVLAATYNQAAQLWKVGEAQSKETLSGHKDKVTAAKFKLTRHQAVTGSRDRTVKEWDLGRAYCSRTINVLSYCNDVVCGDHIIISGHNDQKIRFWDSRGPHCTQVIPVQGRVTSLSLSHDQLHLLSCSRDNTLKVIDLRVSNIRQVFRADGFKCGSDWTKAVFSPDRSYALAGSCDGALYIWDVDTGKLESRLQGPHCAAVNAVAWCYSGSHMVSVDQGRKVVLWQ

SEQ ID NO: 5312 - protein, 317 aa, Homo sapiens
MGMVRHTNESNLAGFILLGFSDYPQLQKVLFVLILILYLLTILGNTTIILVSRLEPKLHMPMYFFLSHLSFLYRCFTSSVIPQLLVNLWEPMKTIAYGGCLVHLYNSHALGSTECVLPAVMSCDRYVAVCRPLHYTVLMHIHLCMALASMAWLSGIATTLVQSTLTLQLPFCGHRQVDHFICEVPVLIKLACVGTTFNEAELFVASILFLIVPVSFILVSSGYIAHAVLRIKSATRRQKAFGTCFSHLTVVTIFYGTIIFMYLQPAKSRSRDQGKFVSLFYTVVTRMLNPLIYTLRIKEVKGALKKVLAKALGVNIL

SEQ ID NO: 5313 - protein, 542 aa, Homo sapiens
MATTVTCTRFTDEYQLYEDIGKGAFSVVRRCVKLCTGHEYAAKIINTKKLSARDHQKLEREARICRLLKHSNIVRLHDSISEEGFHYLVFDLVTGGELFEDIVAREYYSEADASHCIQQILEAVLHCHQMGVVHRDLKPENLLLASKCKGAAVKLADFGLAIEVQGDQQAWFGFAGTPGYLSPEVLRKEAYGKPVDIWACGVILYILLVGYPPFWDEDQHKLYQQIKAGAYDFPSPEWDTVTPEAKNLINQMLTINPAKRITAHEALKHPWVCQRSTVASMMHRQETVECLKKFNARRKLKGAILTTMLATRNFSVGRQTTAPATMSTAASGTTMGLVEQAKSLLNKKADGVKPQTNSTKNSAAATSPKGTLPPAALEPQTTVIHNPVDGIKESSDSANTTIEDEDAKARKQEIIKTTEQLIEAVNNGDFEAYAKICDPGLTSFEPEALGNLVEGMDFHRFYFENLLAKNSKPIHTTILNPHVHVIGEDAACIAYIRLTQYIDGQGRPRTSQSEETRVWHRRDGKWQNVHFHCSGAPVAPLQ

SEQ ID NO: 5314 - protein, 407 aa, Homo sapiens
MSGGSADYNREHGGPEGMDPDGVIESNWNEIVDNFDDMNLKESLLRGIYAYGFEKPSAIQQRAIIPCIKGYDVIAQAQSGTGKTATFAISILQQLEIEFKETQALVLAPTRELAQQIQKVILALGDYMGATCHACIGGTNVRNEMQKLQAEAPHIVVGTPGRVFDMLNRRYLSPKWIKMFVLDEADEMLSRGFKDQIYEIFQKLNTSIQVVLLSATMPTDVLEVTKKFMRDPIRILVKKEELTLEGIKQFYINVEREEWKLDTLCDLYETLTITQAVIFLNTRRKVDWLTEKMHARDFTVSALHGDMDQKERDVIMREFRSGSSRVLITTDLLARGIDVQQVSLVINYDLPTNRENYIHRIGRGGRFGRKGVAINFVTEEDKRILRDIETFYNTTVEEMPMNVADLI

SEQ ID NO: 5315 - protein, 706 aa, Homo sapiens
MGRKVTVATCALNQWALDFEGNLQRILKSIEIAKNRGARYRLGPELEICGYGCWDHYYESDTLLHSFQVLAALVESPVTQDIICDVGMPVMHRNVRYNCRVIFLNRKILLIRPKMALANEGNYRELRWFTPWSRSRHTEEYFLPRMIQDLTKQETVPFGDAVLVTWDTCIGSEICEELWTPHSPHIDMGLDGVEIITNASGSHQVLRKANTRVDLVTMVTSKNGGIYLLANQKGCDGDRLYYDGCAMIAMNGSVFAQGSQFSLDDVEVLTATLDLEDVRSYRAEISSRNLAASRASPYPRVKVDFALSCHEDLLAPISEPIEWKYHSPEEEISLGPACWLWDFLRRSQQAGFLLPLSGGVDSAATACLIYSMCCQVCEAVRSGNEEVLADVRTIVNQISYTPQDPRDLCGRILTTCYMASKNSSQETCTRARELAQQIGSHHISLNIDPAVKAVMGIFSLVTGKSPLFAAHGGSSRENLALQNVQARIRMVLAYLFAQLSLWSRGVHGGLLVLGSANVDESLLGYLTKYDCSSADINPIGGISKTDLRAFVQFCIQRFQLPALQSILLAPATAELEPLADGQVSQTDEEDMGMTYAELSVYGKLRKVAKMGPYSMFCKLLGMWRHICTPRQVADKVKRFFSKYSMNRHKMTTLTPAYHAENYSPEDNRFDLRPFLYNTSWPWQFRCIENQVLQLERAEPQSLDGVD

SEQ ID NO: 5316 - protein, 479 aa, Homo sapiens
MATTVTCTRFTDEYQLYEDIGKGAFSVVRRCVKLCTGHEYAAKIINTKKLSARDHQKLEREARICRLLKHSNIVRLHDSISEEGFHYLVFDLVTGGELFEDIVAREYYSEADASHCIQQILEAVLHCHQMGVVHRDLKPENLLLASKCKGAAVKLADFGLAIEVQGDQQAWFGFAGTPGYLSPEVLRKEAYGKPVDIWACGVILYILLVGYPPFWDEDQHKLYQQIKAGAYDFPSPEWDTVTPEAKNLINQMLTINPAKRITAHEALKHPWVCQRSTVASMMHRQETVECLKKFNARRKLKGAILTTMLATRNFSAAKSLLNKKADGVKESSDSANTTIEDEDAKARKQEIIKTTEQLIEAVNNGDFEAYAKICDPGLTSFEPEALGNLVEGMDFHRFYFENLLAKNSKPIHTTILNPHVHVIGEDAACIAYIRLTQYIDGQGRPRTSQSEETRVWHRRDGKWQNVHFHCSGAPVAPLQ

SEQ ID NO: 5317 - protein, 707 aa, Homo sapiens
MGEKNGDAKTFWMELEDDGKVDFIFEQVQNVLQSLKQKIKDGSATNKEYIQAMILVNEATIINSSTSIKDPMPVTQKEQENKSNAFPSTSCENSFPEDCTFLTTENKEILSLEDKVVDFREKDSSSNLSYQSHDCSGACLMKMPLNLKGENPLQLPIKCHFQRRHAKTNSHSSALHVSYKTPCGRSLRNVEEVFRYLLETECNFLFTDNFSFNTYVQLARNYPKQKEVVSDVDISNGVESVPISFCNEIDSRKLPQFKYRKTVWPRAYNLTNFSSMFTDSCDCSEGCIDITKCACLQLTARNAKTSPLSSDKITTGYKYKRLQRQIPTGIYECSLLCKCNRQLCQNRVVQHGPQVRLQVFKTEQKGWGVRCLDDIDRGTFVCIYSGRLLSRANTEKSYGIDENGRDENTMKNIFSKKRKLEVACSDCEVEVLPLGLETHPRTAKTEKCPPKFSNNPKELTVETKYDNISRIQYHSVIRDPESKTAIFQHNGKKMEFVSSESVTPEDNDGFKPPREHLNSKTKGAQKDSSSNHVDEFEDNLLIESDVIDITKYREETPPRSRCNQATTLDNQNIKKAIEVQIQKPQEGRSTACQRQQVFCDEELLSETKNTSSDSLTKFNKGNVFLLDATKEGNVGRFLNHSCCPNLLVQNVFVETHNRNFPLVAFFTNRYVKARTELTWDYGYEAGTVPEKEIFCQCGVNKCRKKIL

SEQ ID NO: 5318 - protein, 387 aa, Homo sapiens
MATAQLQRTPMSALVFPNKISTEHQSLVLVKRLLAVSVSCITYLRGIFPECAYGTRYLDDLCVKILREDKNCPGSTQLVKWMLGCYDALQKKYVYTNPEDPQTISECYQFKFKYTNNGPLMDFISKNQSNESSMLSTDTKKASILLIRKIYILMQNLGPLPNDVCLTMKLFYYDEVTPPDYQPPGFKDGDCEGVIFEGEPMYLNVGEVSTPFHIFKVKVTTERERMENIDSTILSPKQIKTPFQKILRDKDVEDEQEHYTSDDLDIETKMEEQEKNPASSELEEPSLVCEEDEIMRSKESPDLSISHSQVEQLVNKTSELDMSESKTRSGKVFQNKMANGNQPVKSSKENRKRSQHESGRIVLHHFDSSSQESVPKRRKFSEPKEHI

SEQ ID NO: 5319 - protein, 422 aa, Homo sapiens
MSSSCSGLSRVLVAVATALVSASSPCPQAWGPPGVQYGQPGRSVKLCCPGVTAGDPVSWFRDGEPKLLQGPDSGLGHELVLAQADSTDEGTYICQTLDGALGGTVTLQLGYPPARPVVSCQAADYENFSCTWSPSQISGLPTRYLTSYRKKTVLGADSQRRSPSTGPWPCPQDPLGAARCVVHGAEFWSQYRINVTEVNPLGASTRLLDVSLQSILRPDPPQGLRVESVPGYPRRLRASWTYPASWPCQPHFLLKFRLQYRPAQHPAWSTVEPAGLEEVITDAVAGLPHAVRVSARDFLDAGTWSTWSPEAWGTPSTGTIPKEIPAWGQLHTQPEVEPQVDSPAPPRPSLQPHPRLLDHRDSVEQVAVLASLGILSFLGLVAGALALGLWLRLRRGGKDGSPKPGFLASVIPVDRRPGAPNL

SEQ ID NO: 5320 - protein, 894 aa, Homo sapiens
MTAIKHALQRDIFTPNDERLLSIVNVCKAGKKKKNCFLCATVTTERPVQVKVVKVKKSDKGDFYKRQIAWALRDLAVVDAKDAIKENPEFDLHFEKIYKWVASSTAEKNAFISCIWKLNQRYLRKKIDFVNVSSQLLEESVPSGENQSVTGGDEEVVDEYQELNAREEQDIEIMMEGCEYAISNAEAFAEKLSRELQVLDGANIQSIMASEKQVNILMKLLDEALKEVDQIELKLSSYEEMLQSVKEQMDQISESNHLIHLSNTNNVKLLSEIEFLVNHMDLAKGHIKALQEGDLASSRGIEACTNAADALLQCMNVALRPGHDLLLAVKQQQQRFSDLRELFARRLASHLNNVFVQQGHDQSSTLAQHSVELTLPNHHPFHRDLLRYAKLMEWLKSTDYGKYEGLTKNYMDYLSRLYEREIKDFFEVAKIKMTGTTKESKKFATLPRKESAVKQETESLHGSSGKLTGSTSSLNKLSVQSSGNRRSQSSSLLDMGNMSASDLDVADRTKFDKIFEQVLSELEPLCLAEQDFISKFFKLQQHQSMPGTMAEAEDLDGGTLSRQHNCGTPLPVSSEKDMIRQMMIKIFRCIEPELNNLIALGDKIDSFNSLYMLVKMSHHVWTAQNVDPASFLSTTLGNVLVTVKRNFDKCISNQIRQMEEVKISKKSKVGILPFVAEFEEFAGLAESIFKNAERRGDLDKAYTKLIRGVFVNVEKVANESQKTPRDVVMMENFHHIFATLSRLKISCLEAEKKEAKQKYTDHLQSYVIYSLGQPLEKLNHFFEGVEARVAQGIREEEVSYQLAFNKQELRKVIKEYPGKEVKKGLDNLYKKVDKHLCEEENLLQVVWHSMQDEFIRQYKHFEGLIARCYPGSGVTMEFTIQDILDYCSSIAQSH

SEQ ID NO: 5321 - protein, 449 aa, Homo sapiens
MATTVTCTRFTDEYQLYEDIGKGAFSVVRRCVKLCTGHEYAAKIINTKKLSARDHQKLEREARICRLLKHSNIVRLHDSISEEGFHYLVFDLVTGGELFEDIVAREYYSEADASHCIQQILEAVLHCHQMGVVHRDLKPENLLLASKCKGAAVKLADFGLAIEVQGDQQAWFGFAGTPGYLSPEVLRKEAYGKPVDIWACGVILYILLVGYPPFWDEDQHKLYQQIKAGAYDFPSPEWDTVTPEAKNLINQMLTINPAKRITAHEALKHPWVCQRSTVASMMHRQETVECLKKFNARRKLKGAILTTMLATRNFSARKQEIIKTTEQLIEAVNNGDFEAYAKICDPGLTSFEPEALGNLVEGMDFHRFYFENLLAKNSKPIHTTILNPHVHVIGEDAACIAYIRLTQYIDGQGRPRTSQSEETRVWHRRDGKWQNVHFHCSGAPVAPLQ

SEQ ID NO: 5322 - protein, 492 aa, Homo sapiens
MATTVTCTRFTDEYQLYEDIGKGAFSVVRRCVKLCTGHEYAAKIINTKKLSARDHQKLEREARICRLLKHSNIVRLHDSISEEGFHYLVFDLVTGGELFEDIVAREYYSEADASHCIQQILEAVLHCHQMGVVHRDLKPENLLLASKCKGAAVKLADFGLAIEVQGDQQAWFGFAGTPGYLSPEVLRKEAYGKPVDIWACGVILYILLVGYPPFWDEDQHKLYQQIKAGAYDFPSPEWDTVTPEAKNLINQMLTINPAKRITAHEALKHPWVCQRSTVASMMHRQETVECLKKFNARRKLKGAILTTMLATRNFSVGRQTTAPATMSTAASGTTMGLVEQAKSLLNKKADGVKEPQTTVIHNPVDGIKESSDSANTTIEDEDAKARKQEIIKTTEQLIEAVNNGDFEAYAFYFENLLAKNSKPIHTTILNPHVHVIGEDAACIAYIRLTQYIDGQGRPRTSQSEETRVWHRRDGKWQNVHFHCSGAPVAPLQ

SEQ ID NO: 5323 - protein, 1761 aa, Homo sapiens
MADAAASPVGKRLLLLFADTAASASASAPAAAAASGDPGPALRTRAWRAGTVRAMSGAVPQDLAIFVEFDGCNWKQHSWVKVHAEEVIVLLLEGSLVWAPREDPVLLQGIRVSIAQWPALTFTPLVDKLGLGSVVPVEYLLDRELRFLSDANGLHLFQMGTDSQNQILLEHAALRETVNALISDQKLQEIFSRGPYSVQGHRVKIYQPEGEEGWLYGVVSHQDSITRLMEVSVTESGEIKSVDPRLIHVMLMDNSAPQSEGGTLKAVKSSKGKKKRESIEGKDGRRRKSASDSGCDPASKKLKGDRGEVDSNGSDGGEASRGPWKGGNASGEPGLDQRAKQPPSTFVPQINRNIRFATYTKENGRTLVVQDEPVGGDTPASFTPYSTATGQTPLAPEVGGAENKEAGKTLEQVGQGIVASAAVVTTASSTPNTVRISDTGLAAGTVPEKQKGSRSQASGENSRNSILASSGFGAPLPSSSQPLTFGSGRSQSNGVLATENKPLGFSFGCSSAQEAQKDTDLSKNLFFQCMSQTLPTSNYFTTVSESLADDSSSRDSFKQSLESLSSGLCKGRSVLGTDTKPGSKAGSSVDRKVPAESMPTLTPAFPRSLLNARTPENHENLFLQPPKLSREEPSNPFLAFVEKVEHSPFSSFASQASGSSSSATTVTSKVAPSWPESHSSADSASLAKKKPLFITTDSSKLVSGVLGSALTSGGPSLSAMGNGRSSSPTSSLTQPIEMPTLSSSPTEERPTVGPGQQDNPLLKTFSNVFGRHSGGFLSSPADFSQENKAPFEAVKRFSLDERSLACRQDSDSSTNSDLSDLSDSEEQLQAKTGLKGIPEHLMGKLGPNGERSAELLLGKSKGKQAPKGRPRTAPLKVGQSVLKDVSKVKKLKQSGEPFLQDGSCINVAPHLHKCRECRLERYRKFKEQEQDDSTVACRFFHFRRLIFTRKGVLRVEGFLSPQQSDPDAMNLWIPSSSLAEGIDLETSKYILANVGDQFCQLVMSEKEAMMMVEPHQKVAWKRAVRGVREMCDVCETTLFNIHWVCRKCGFGVCLDCYRLRKSRPRSETEEMGDEEVFSWLKCAKGQSHEPENLMPTQIIPGTALYNIGDMVHAARGKWGIKANCPCISRQNKSVLRPAVTNGMSQLPSINPSASSGNETTFSGGGGPAPVTTPEPDHVPKADSTDIRSEEPLKTDSSASNSNSELKAIRPPCPDTAPPSSALHWLADLATQKAKEETKEAGSLRSVLNKESHSPFGLDSFNSTAKVSPLTPKLFNSLLLGPTASNNKTEGSSLRDLLHSGPGKLPQTPLDTGIPFPPVFSTSSAGVKSKASLPNFLDHIIASVVENKKTSDASKRACNLTDTQKEVKEMVMGLNVLDPHTSHSWLCDGRLLCLHDPSNKNNWKIFRECWKQGQPVLVSGVHKKLKSELWKPEAFSQEFGDQDVDLVNCRNCAIISDVKVRDFWDGFEIICKRLRSEDGQPMVLKLKDWPPGEDFRDMMPTRFEDLMENLPLPEYTKRDGRLNLASRLPSYFVRPDLGPKMYNAYGLITAEDRRVGTTNLHLDVSDAVNVMVYVGIPIGEGAHDEEVLKTIDEGDADEVTKQRIHDGKEKPGALWHIYAAKDAEKIRELLRKVGEEQGQENPPDHDPIHDQSWYLDQTLRKRLYEEYGVQGWAIVQFLGDAVFIPAGAPHQVHNLYSCIKVAEDFVSPEHVKHCFRLTQEFRHLSNTHTNHEDKLQVKNIIYHAVKDAVGTLKAHESKLARS

SEQ ID NO: 5324 - protein, 495 aa, Homo sapiens
MRLTRCQAALAAAITLNLLVLFYVSWLQHQPRNSRARGPRRASAAGPRVTVLVREFEAFDNAVPELVDSFLQQDPAQPVVVAADTLPYPPLALPRIPNVRLALLQPALDRPAAASRPETYVATEFVALVPDGARAEAPGLLERMVEALRAGSARLVAAPVATANPARCLALNVSLREWTARYGAAPAAPRCDALDGDAVVLLRARDLFNLSAPLARPVGTSLFLQTALRGWAVQLLDLTFAAARQPPLATAHARWKAEREGRARRAALLRALGIRLVSWEGGRLEWFGCNKETTRCFGTVVGDTPAYLYEERWTPPCCLRALRETARYVVGVLEAAGVRYWLEGGSLLGAARHGDIIPWDYDVDLGIYLEDVGNCEQLRGAEAGSVVDERGFVWEKAVEGDFFRVQYSESNHLHVDLWPFYPRNGVMTKDTWLDHRQDVEFPEHFLQPLVPLPFAGFVAQAPNNYRRFLELKFGPGVIENPQYPNPALLSLTGSG

SEQ ID NO: 5325 - protein, 1588 aa, Homo sapiens
MLPPKHLSATKPKKSWAPNLYELDSDLTKEPDVIIGEGPTDSEFFHQRFRNLIYVEFVGPRKTLIKLRNLCLDWLQPETRTKEEIIELLVLEQYLTIIPEKLKPWVRAKKPENCEKLVTLLENYKEMYQPEDDNNSDVTSDDDMTRNRRESSPPHSVHSFSDRDWDRRGRSRDMEPRDRWSHTRNPRSRMPPRDLSLPVVAKTSFEMDREDDRDSRAYESRSQDAESYQNVVDLAEDRKPHNTIQDNMENYRKLLSLVQLAEDDGHSHMTQGHSSRSKRSAYPSTSRGLKTMPEAKKSTHRRGICEDESSHGVIMEKFIKDVSRSSKSGRARESSDRSQRFPRMSDDNWKDISLNKRESVIQQRVYEGNAFRGGFRFNSTLVSRKRVLERKRRYHFDTDGKGSIHDQKGCPRKKPFECGSEMRKAMSVSSLSSLSSPSFTESQPIDFGAMPYVCDECGRSFSVISEFVEHQIMHTRENLYEYGESFIHSVAVSEVQKSQVGGKRFECKDCGETFNKSAALAEHRKIHARGYLVECKNQECEEAFMPSPTFSELQKIYGKDKFYECRVCKETFLHSSALIEHQKIHFGDDKDNEREHERERERERGETFRPSPALNEFQKMYGKEKMYECKVCGETFLHSSSLKEHQKIHTRGNPFENKGKVCEETFIPGQSLKRRQKTYNKEKLCDFTDGRDAFMQSSELSEHQKIHSRKNLFEGRGYEKSVIHSGPFTESQKSHTITRPLESDEDEKAFTISSNPYENQKIPTKENVYEAKSYERSVIHSLASVEAQKSHSVAGPSKPKVMAESTIQSFDAINHQRVRAGGNTSEGREYSRSVIHSLVASKPPRSHNGNELVESNEKGESSIYISDLNDKRQKIPARENPCEGGSKNRNYEDSVIQSVFRAKPQKSVPGEGSGEFKKDGEFSVPSSNVREYQKARAKKKYIEHRSNETSVIHSLPFGEQTFRPRGMLYECQECGECFAHSSDLTEHQKIHDREKPSGSRNYEWSVIRSLAPTDPQTSYAQEQYAKEQARNKCKDFRQFFATSEDLNTNQKIYDQEKSHGEESQGENTDGEETHSEETHGQETIEDPVIQGSDMEDPQKDDPDDKIYECEDCGLGFVDLTDLTDHQKVHSRKCLVDSREYTHSVIHTHSISEYQRDYTGEQLYECPKCGESFIHSSFLFEHQRIHEQDQLYSMKGCDDGFIALLPMKPRRNRAAERNPALAGSAIRCLLCGQGFIHSSALNEHMRLHREDDLLEQSQMAEEAIIPGLALTEFQRSQTEERLFECAVCGESFVNPAELADHVTVHKNEPYEYGSSYTHTSFLTEPLKGAIPFYECKDCGKSFIHSTVLTKHKELHLEEEEEDEAAAAAAAAAQEVEANVHVPQVVLRIQGLNVEAAEPEVEAAEPEVEAAEPEVEAAEPNGEAEGPDGEAAEPIGEAGQPNGEAEQPNGDADEPDGAGIEDPEERAEEPEGKAEEPEGDADEPDGVGIEDPEEGEDQEIQVEEPYYDCHECTETFTSSTAFSEHLKTHASMIIFEPANAFGECSGYIERASTSTGGANQADEKYFKCDVCGQLFNDRLSLARHQNTHTG

SEQ ID NO: 5326 - protein, 385 aa, Homo sapiens
MGRWCQTVARGQRPRTSAPSRAGALLLLLLLLRSAGCWGAGEAPGALSTADPADQSVQCVPKATCPSSRPRLLWQTPTTQTLPSTTMETQFPVSEGKVDPYRSCGFSYEQDPTLRDPEAVARRWPWMVSVRANGTHICAGTIIASQWVLTVAHCLIWRDVIYSVRVGSPWIDQMTQTASDVPVLQVIMHSRYRAQRFWSWVGQANDIGLLKLKQELKYSNYVRPICLPGTDYVLKDHSRCTVTGWGLSKADGMWPQFRTIQEKEVIILNNKECDNFYHNFTKIPTLVQIIKSQMMCAEDTHREKFCYELTGEPLVCSMEGTWYLVGLVSWGAGCQKSEAPPIYLQVSSYQHWIWDCLNGQALALPAPSRTLLLALPLPLSLLAAL

SEQ ID NO: 5327 - protein, 2005 aa, Homo sapiens
MAAADGGGPGGASVGTEEDGGGVGHRTVYLFDRREKESELGDRPLQVGERSDYAGFRACVCQTLGISPEEKFVITTTSRKEITCDNFDETVKDGVTLYLLQSVNQLLLTATKERIDFLPHYDTLVKSGMYEYYASEGQNPLPFALAELIDNSLSATSRNIGVRRIQIKLLFDETQGKPAVAVIDNGRGMTSKQLNNWAVYRLSKFTRQGDFESDHSGYVRPVPVPRSLNSDISYFGVGGKQAVFFVGQSARMISKPADSQDVHELVLSKEDFEKKEKNKEAIYSGYIRNRKPSDSVHITNDDERFLHHLIIEEKEKDSFTAVVITGVQPEHIQYLKNYFHLWTRQLAHIYHYYIHGPKGNEIRTSKEVEPFNNIDIEISMFEKGKVPKIVNLREIQDDMQTLYVNTAADSFEFKAHVEGDGVVEGIIRYHPFLYDRETYPDDPCFPSKLKDEDDEDDCFILEKAARGKRPIFECFWNGRLIPYTSVEDFDWCTPPKKRGLAPIECYNRISGALFTNDKFQVSTNKLTFMDLELKLKDKNTLFTRILNGQEQRMKIDREFALWLKDCHEKYDKQIKFTLFKGVITRPDLPSKKQGPWATYAAIEWDGKIYKAGQLVKTIKTLPLFYGSIVRFFLYGDHDGEVYATGGEVQIAMEPQALYDEVRTVPIAKLDRTVAEKAVKKYVEDEMARLPDRLSVTWPEGDELLPNEVRPAGTPIGALRIEILNKKGEAMQKLPGTSHGGSKKLLVELKVILHSSSGNKEIISHISQHGGKWPYWFKKMENIQKLGNYTLKLQVVLNESNADTYAGRPLPSKAIKFSVKEGKPEKFSFGLLDLPFRVGVPFNIPLEFQDEFGHTSQLVTDIQPVLEASGLSLHYEEITKGPNCVIRGVTAKGPVNSCQGKNYNLKVTLPGLKEDSQILKIRLLPGHPRRLKVKPDSEILVIENGTAFPFQVEVLDESDNITAQPKLIVHCKFSGAPNLPVYVVDCSSSGTSILTGSAIQVQNIKKDQTLKARIEIPSCKDVAPVEKTIKLLPSSHVARLQIFSVEGQKAIQIKHQDEVNWIAGDIMHNLIFQMYDEGEREINITSALAEKIKVNWTPEINKEHLLQGLLPDVQVPTSVKDMRYCQVSFQDDHVSLESAFTVRPLPDEPKHLKCEMKGGKTVQMGQELQGEVVIIITDQYGNQIQAFSPSSLSSLSIAGVGLDSSNLKTTFQENTQSISVRGIKFIPGPPGNKDLCFTWREFSDFIRVQLISGPPAKLLLIDWPELKESIPVINGRDLQNPIIVQLCDQWDNPAPVQHVKISLTKASNLKLMPSNQQHKTDEKGRANLGVFSVFAPRGEHTLQVKAIYNKSIIEGPIIKLMILPDPEKPVRLNVKYDKDASFLAGGLFTDFMISVISEDDSIIKNINPARISMKMWKLSTSGNRPPANAETFSCNKIKDNDKEDGCFYFRDKVIPNKVGTYCIQFGFMMDKTNILNSEQVIVEVLPNQPVKLVPKIKPPTPAVSNVRSVASRTLVRDLHLSITDDYDNHTGIDLVGTIIATIKGSNEEDTDTPLFIGKVRTLEFPFVNGSAEIMSLVLAESSPGRDSTEYFIVFEPRLPLLSRTLEPYILPFMFYNDVKKQQQMAALTKEKDQLSQSIVMYKSLFEASQQLLNEMKCQVEEARLKEAQLRNELKIHNIDIPTTQQVPHIEALLKRKLSEQEELKKKPRRSCTLPNYTKGSGDVLGKIAHLAQIEDDRAAMVISWHLASDMDCVVTLTTDAARRIYDETQGRQQVLPLDSIYKKTLPDWKRSLPHFRNGKLYFKPIGDPVFARDLLTFPDNVEHCETVFGMLLGDTIILDNLDAANHYRKEVVKITHCPTLLTRDGDRIRSNGKFGGLQNKAPPMDKLRGMVFGAPVPKQCLILGEQIDLLQQYRSAVCKLDSVNKDLNSQLEYLRTPDMRKKKQELDEHEKNLKLIEEKLGMTPIRKCNDSLRHSPKVETTDCPVPPKRMRREATRQNRIITKTDV

SEQ ID NO: 5328 - protein, 490 aa, Homo sapiens
MEGQDEVSAREQHFHSQVRESTICFLLFAILYVVSYFIITRYKRKSDEQEDEDAIVNRISLFLSTFTLAVSAGAVLLLPFSIISNEILLSFPQNYYIQWLNGSLIHGLWNLASLFSNLCLFVLMPFAFFFLESEGFAGLKKGIRARILETLVMLLLLALLILGIVWVASALIDNDAASMESLYDLWEFYLPYLYSCISLMGCLLLLLCTPVGLSRMFTVMGQLLVKPTILEDLDEQIYIITLEEEALQRRLNGLSSSVEYNIMELEQELENVKTLKTKLERRKKASAWERNLVYPAVMVLLLIETSISVLLVACNILCLLVDETAMPKGTRGPGIGNASLSTFGFVGAALEIILIFYLMVSSVVGFYSLRFFGNFTPKKDDTTMTKIIGNCVSILVLSSALPVMSRTLGITRFDLLGDFGRFNWLGNFYIVLSYNLLFAIVTTLCLVRKFTSAVREELFKALGLHKLHLPNTSRDSETAKPSVNGHQKAL

SEQ ID NO: 5329 - protein, 971 aa, Homo sapiens
MKQQALTEFEAYKHRVEDMQLCAEAQHVQRIVTMSREVEEIRRKFEEKLRSFGQLQVQFEKDKRLALEDLQAAHRREIQELLKSQQDHSASVNKGQEKAEELHRMEVESLNKMLEELRLERKKLIEDYEGKLNKAQSFYERELDTLKRSQLFTAESLQASKEKEADLRKEFQGQEAILRKTIGKLKTELQMVQDEAGSLLDKCQKLQTALAIAENNVQVLQKQLDDAKEGEMALLSKHKEVESELAAARERLQQQASDLVLKASHIGMLQATQMTQEVTIKDLESEKSRVNERLSQLEEERAFLRSKTQSLDEEQKQQILELEKKVNEAKRTQQEYYERELKNLQSRLEEEVTQLNEAHSKTLEELAWKHHMAIEAVHSNAIRDKKKLQMDLEEQHNKDKLNLEEDKNQLQQELENLKEVLEDKLNTANQEIGHLQDMVRKSEQGLGSAEGLIASLQDSQERLQNELDLTKDSLKETKDALLNVEGELEQERQQHEETIAAMKEEEKLKVDKMAHDLEIKWTENLRQECSKLREELRLQHEEDKKSAMSQLLQLKDREKNAARDSWQKKVEDLLNQISLLKQNLEIQLSQSQTSLQQLQAQFTQERQRLTQELEELEEQHQQRHKSLKEAHVLAFQTMEEEKEKEQRALENHLQQKHSAELQSLKDAHRESMEGFRIEMEQELQTLRFELEDEGKAMLASLRSELNHQHAAAIDLLRHNHHQELAAAKMELERSIDISRRQSKEHICRITDLQEELRHREHHISELDKEVQHLHENISALTKELEFKGKEILRIRSESNQQIRLEEMEEKYLMRESKPEDIQMITELKAMLTERDQIIKKLIEDNKFYQLELVNRETNFNKVFNSSPTVGVINPLAKQKKKNDKSPTNRFVSVPNLSALESGGVGNGHPNRLDPIPNSPVHDIEFNSSKPLPQPVPPKGPKTFLSPAQSEASPVASPDPQRQEWFARYFTF

SEQ ID NO: 5330 - protein, 323 aa, Homo sapiens
MPLLKLVHGSPLVFGEKFKLFTLVSACIPVFRLARRRKKILFYCHFPDLLLTKRDSFLKRLYRAPIDWIEEYTTGMADCILVNSQFTAAVFKETFKSLSHIDPDVLYPSLNVTSFDSVVPEKLDDLVPKGKKFLLLSINRYERKKNLTLALEALVQLRGRLTSQDWERVHLIVAGGYDERVLENVEHYQELKKMVQQSDLGQYVTFLRSFSDKQKISLLHSCTCVLYTPSNEHFGIVPLEAMYMQCPVIAVNSGGPLESIDHSVTGFLCEPDPVHFSEAIEKFIREPSLKATMGLAGRARVKEKFSPEAFTEQLYRYVTKLLV

SEQ ID NO: 5331 - protein, 647 aa, Homo sapiens
MLSGAAGAARRGGAALAPSLTRSLAGTHAGADSCAGADKGSHKETIEERDKRQQRQQRQRQHQGCGAAGSGSDSPTSGPHPVPVLFPLALSLEEQPLPPLPLGRAPGLLAREGQGREALASPSSRGQMPIEIVCKIKFAEEDAKPKEKEAGDEQSLLGAVAPGAAPRDLATFASTSTLHGLGRACGPGPHGLRRTLWALALLTSLAAFLYQAAGLARGYLTRPHLVAMDPAAPAPVAGFPAVTLCNINRFRHSALSDADIFHLANLTGLPPKDRDGHRAAGLRYPEPDMVDILNRTGHQLADMLKSCNFSGHHCSASNFSVVYTRYGKCYTFNADPRSSLPSRAGGMGSGLEIMLDIQQEEYLPIWRETNETSFEAGIRVQIHSQEEPPYIHQLGFGVSPGFQTFVSCQEQRLTYLPQPWGNCRAESELREPELQGYSAYSVSACRLRCEKEAVLQRCHCRMVHMPDSLGGGPEGPCFCPTPCNLTRYGKEISMVRIPNRGSARYLARKYNRNETYIRENFLVLDVFFEALTSEAMEQRAAYGLSALLGDLGGQMGLFIGASILTLLEILDYIYEVSWDRLKRVWRRPKTPLRTSTGGISTLGLQELKEQSPCPSRGRVEGGGVSSLLPNHHHPHGPPGGLFEDFAC

SEQ ID NO: 5332 - protein, 1006 aa, Homo sapiens
MSRRKQSNPRQIKRSLGDMEAREEVQLVGASHMEQKATAPEAPSPPSADVNSPPPLPPPTSPGGPKELEGQEPEPRPTEEEPGSPWSGPDELEPVVQDGQRRIRARLSLATGLSWGPFHGSVQTRASSPRQAEPSPALTLLLVDEACWLRTLPQALTEAEANTEIHRKDDALWCRVTKPVPAGGLLSVLLTAEPHSTPGHPVKKEPAEPTCPAPAHDLQLLPQQAGMASILATAVINKDVFPCKDCGIWYRSERNLQAHLLYYCASRQGTGSPAAAATDEKPKETYPNERVCPFPQCRKSCPSASSLEIHMRSHSGERPFVCLICLSAFTTKANCERHLKVHTDTLSGVCHSCGFISTTRDILYSHLVTNHMVCQPGSKGEIYSPGAGHPATKLPPDSLGSFQQQHTALQGPLASADLGLAPTPSPGLDRKALAEATNGEARAEPLAQNGGSSEPPAAPRSIKVEAVEEPEAAPILGPGEPGPQAPSRTPSPRSPAPARVKAELSSPTPGSSPVPGELGLAGALFLPQYVFGPDAAPPASEILAKMSELVHSRLQQGAGAGAGGAQTGLFPGAPKGATCFECEITFSNVNNYYVHKRLYCSGRRAPEDAPAARRPKAPPGPARAPPGQPAEPDAPRSSPGPGAREEGAGGAATPEDGAGGRGSEGSQSPGSSVDDAEDDPSRTLCEACNIRFSRHETYTVHKRYYCASRHDPPPRRPAAPPGPPGPAAPPAPSPAAPVRTRRRRKLYELHAAGAPPPPPPGHAPAPESPRPGSGSGSGPGLAPARSPGPAADGPIDLSKKPRRPLPGAPAPALADYHECTACRVSFHSLEAYLAHKKYSCPAAPPPGALGLPAAACPYCPPNGPVRGDLLEHFRLAHGLLLGAPLAGPGVEARTPADRGPSPAPAPAASPQPGSRGPRDGLGPEPQEPPPGPPPSPAAAPEAVPPPPAPPSYSDKGVQTPSKGTPAPLPNGNHRYCRLCNIKFSSLSTFIAHKKYYCSSHAAEHVK

SEQ ID NO: 5333 - protein, 1256 aa, Homo sapiens
MPGPRGAAGGLAPEMRGAGAAGLLALLLLLLLLLLGLGGRVEGGPAGERGAGGGGALARERFKVVFAPVICKRTCLKGQCRDSCQQGSNMTLIGENGHSTDTLTGSGFRVVVCPLPCMNGGQCSSRNQCLCPPDFTGRFCQVPAGGAGGGTGGSGPGLSRTGALSTGALPPLAPEGDSVASKHAIYAVQVIADPPGPGEGPPAQHAAFLVPLGPGQISAEVQAPPPVVNVRVHHPPEASVQVHRIESSNAESAAPSQHLLPHPKPSHPRPPTQKPLGRCFQDTLPKQPCGSNPLPGLTKQEDCCGSIGTAWGQSKCHKCPQLQYTGVQKPGPVRGEVGADCPQGYKRLNSTHCQDINECAMPGVCRHGDCLNNPGSYRCVCPPGHSLGPSRTQCIADKPEEKSLCFRLVSPEHQCQHPLTTRLTRQLCCCSVGKAWGARCQRCPTDGTAAFKEICPAGKGYHILTSHQTLTIQGESDFSLFLHPDGPPKPQQLPESPSQAPPPEDTEEERGVTTDSPVSEERSVQQSHPTATTTPARPYPELISRPSPPTMRWFLPDLPPSRSAVEIAPTQVTETDECRLNQNICGHGECVPGPPDYSCHCNPGYRSHPQHRYCVDVNECEAEPCGPGRGICMNTGGSYNCHCNRGYRLHVGAGGRSCVDLNECAKPHLCGDGGFCINFPGHYKCNCYPGYRLKASRPPVCEDIDECRDPSSCPDGKCENKPGSFKCIACQPGYRSQGGGACRDVNECAEGSPCSPGWCENLPGSFRCTCAQGYAPAPDGRSCLDVDECEAGDVCDNGICSNTPGSFQCQCLSGYHLSRDRSHCEDIDECDFPAACIGGDCINTNGSYRCLCPQGHRLVGGRKCQDIDECSQDPSLCLPHGACKNLQGSYVCVCDEGFTPTQDQHGCEEVEQPHHKKECYLNFDDTVFCDSVLATNVTQQECCCSLGAGWGDHCEIYPCPVYSSAEFHSLCPDGKGYTQDNNIVNYGIPAHRDIDECMLFGSEICKEGKCVNTQPGYECYCKQGFYYDGNLLECVDVDECLDESNCRNGVCENTRGGYRCACTPPAEYSPAQRQCLSPEEMERAPERRDVCWSQRGEDGMCAGPLAGPALTFDDCCCRQGRGWGAQCRPCPPRGAGSHCPTSQSESNSFWDTSPLLLGKPPRDEDSSEEDSDECRCVSGRCVPRPGGAVCECPGGFQLDASRARCVDIDECRELNQRGLLCKSERCVNTSGSFRCVCKAGFARSRPHGACVPQRRR

SEQ ID NO: 5334 - protein, 700 aa, Homo sapiens [sequence omitted]

SEQ ID NO: 5335 - protein, 344 aa, Homo sapiens
MLSSFPHRKTWRKSKKTVKVTRSYPTFPSLNAWEEFRGLLPVDGEPNPGAGLGVEEGLLCRVVHSPEFNLFLDSVVFESNFIQVKRGRNWRDVYKASNTMALGVTSSVPCLPLPNILLMASVKWHQGQNQTWNRPSIAPNIFLKRILPLRFVELQVCDHYQRILQLRTVTEKIYYLKLHPDHPETVFHFWIRLVQILQKGLSITTKDPRILVTHCLVPKNCSSPSGDSKLVQKKLQASQPSESLIQLMTKGESEALSQIFADLHQQNQLSFRSSRKVETNKNSSGKDSSREDSIPCTCDLRWRASFTYGEWERENPSGLQPLSLLSTLAASTGPQLAPPIGNSI

SEQ ID NO: 5336 - protein, 602 aa, Homo sapiens
MDSLQDTVALDHGGCCPALSRLVPRGFGTEMWTLFALSGPLFLFQVLTFMIYIVSTVFCGHLGKVELASVTLAVAFVNVCGVSVGVGLSSACDTLMSQSFGSPNKKHVGVILQRGALVLLLCCLPCWALFLNTQHILLLFRQDPDVSRLTQDYVMIFIPGLPVIFLYNLLAKYLQNQGWLKGQEEESPFQTPGLSILHPSHSHLSRASFHLFQKITWPQVLSGVVGNCVNGVANYALVSVLNLGVRGSAYANIISQFAQTVFLLLYIVLKKLHLETWAGWSSQCLQDWGPFFSLAVPSMLMICVEWWAYEIGSFLMGLLSVVDLSAQAVIYEVATVTYMIPLGLSIGVCVRVGMALGAADTVQAKRSAVSGVLSIVGISLVLGTLISILKNQLGHIFTNDEDVIALVSQVLPVYSVFHVFEAICCVYGGVLRGTGKQAFGAAVNAITYYIIGLPLGILLTFVVRMRIMGLWLGMLACVFLATAAFVAYTARLDWKLAAEEAKKHSGRQQQQRAESTATRPGPEKAVLSSVATGSSPGITLTTYSRSECHVDFFRTPEEAHALSAPTSRLSVKQLVIRRGAALGAASATLMVGLTVRILATRH

SEQ ID NO: 5337 - protein, 318 aa, Homo sapiens
MGNGVKEGPVRLHEDAEAVLSSSVSSKRDHRQVLSSLLSGALAGALAKTAVAPLDRTKIIFQVSSKRFSAKEAFRVLYYTYLNEGFLSLWRGNSATMVRVVPYAAIQFSAHEEYKRILGSYYGFRGEALPPWPRLFAGALAGTTAASLTYPLDLVRARMAVTPKEMYSNIFHVFIRISREEGLKTLYHGFMPTVLGVIPYAGLSFFTYETLKSLHREYSGRRQPYPFERMIFGACAGLIGQSASYPLDVVRRRMQTAGVTGYPRASIARTLRTIVREEGAVRGLYKGLSMNWVKGPIAVGISFTTFDLMQILLRHLQS

SEQ ID NO: 5338 - protein, 610 aa, Homo sapiens
MHFQAFWLCLGLLFISINAEFMDDDVETEDFEENSEEIDVNESELSSEIKYKTPQPIGEVYFAETFDSGRLAGWVLSKAKKDDMDEEISIYDGRWEIEELKENQVPGDRGLVLKSRAKHHAISAVLAKPFIFADKPLIVQYEVNFQDGIDCGGAYIKLLADTDDLILENFYDKTSYIIMFGPDKCGEDYKLHFIFRHKHPKTGVFEEKHAKPPDVDLKKFFTDRKTHLYTLVMNPDDTFEVLVDQTVVNKGSLLEDVVPPIKPPKEIEDPNDKKPEEWDERAKIPDPSAVKPEDWDESEPAQIEDSSVVKPAGWLDDEPKFIPDPNAEKPDDWNEDTDGEWEAPQILNPACRIGCGEWKPPMIDNPKYKGVWRPPLVDNPNYQGIWSPRKIPNPDYFEDDHPFLLTSFSALGLELWSMTSDIYFDNFIICSEKEVADHWAADGWRWKIMIANANKPGVLKQLMAAAEGHPWLWLIYLVTAGVPIALITSFCWPRKVKKKHKDTEYKKTDICIPQTKGVLEQEEKEEKAALEKPMDLEEEKKQNDGEMLEKEEESEPEEKSEEEIEIIEGQEESNQSNKSGSEDEMKEADESTGSGDGPIKSVRKRRVRKD

SEQ ID NO: 5339 - protein, 490 aa, Homo sapiens
MEEEGVKEAGEKPRGAQMVDKAGWIKKSSGGLLGFWKDRYLLLCQAQLLVYENEDDQKCVETVELGSYEKCQDLRALLKRKHRFILLRSPGNKVSDIKFQAPTGEEKESWIKALNEGINRGKNKAFDEVKVDKSCALEHVTRDRVRGGQRRRPPTRVHLKEVASAASDGLLRLDLDVPDSGPPVFAPSNHVSEAQPRETPRPLMPPTKPFLAPETTSPGDRVETPVGERAPTPVSASSEVSPESQEDSETPAEEDSGSEQPPNSVLPDKLKVSWENPSPQEAPAAESAEPSQAPCSETSEAAPREGGKPPTPPPKILSEKLKASMGEMQASGPPAPGTVQVSVNGMDDSPEPAKPSQAEGTPGTPPKDATTSTALPPWDLPPQFHPRCSSLGDLLGEGPRHPLQPRERLYRAQLEVKVASEQTEKLLNKVLGSEPAPVSAETLLSQAVEQLRQATQVLQEMRDLGELSQEAPGLREKRKELVTLYRRSAP

SEQ ID NO: 5340 - protein, 1134 aa, Homo sapiens
MGLLASAGLLLLLVIGHPRSLGLKCGIRMVNMKSKEPAVGSRFFSRISSWRNSTVTGHPWQVSLKSDEHHFCGGSLIQEDRVVTAAHCLDSLSEKQLKNITVTSGEYSLFQKDKQEQNIPVSKIITHPEYNSREYMSPDIALLYLKHKVKFGNAVQPICLPDSDDKVEPGILCLSSGWGKISKTSEYSNVLQEMELPIMDDRACNTVLKSMNLPPLGRTMLCAGFPDWGMDACQGDSGGPLVCRRGGGIWILAGITSWVAGCAGGSVPVRNNHVKASLGIFSKVSELMDFITQNLFTGLDRGQPLSKVGSRYITKALSSVQEVNGSQRGKGILDMEKQVGCDHDYVSLRSSSGVLFNQRSLMEDDGKQNKRVCGKILPSPLLAETSEAMVPFVSDTEDSGSGFELTVTAVQKSEAGSGCGSLAILVEEGTNHSAKYPDLYPSNTRCHWFICAPEKHIIKLTFEDFAVKFSPNCIYDAVVIYGDSEEKHKLAKLCGMLTITSIFSSSNMTVIYFKSDGKNRLQGFKARFTILPSESLNKFEPKLPPQNNPVSTVKAILHDVCGIPPFSPQWLSRRIAGGEEACPHCWPWQVGLRFLGDYQCGGAIINPVWILTAAHCVQLKNNPLSWTIIAGDHDRNLKESTEQVRRAKHIIVHEDFNTLSYDSDIALIQLSSPLEYNSVVRPVCLPHSAEPLFSSEICAVTGWGSISADGGLASRLQQIQVHVLEREVCEHTYYSAHPGGITEKMICAGFAASGEKDFCQGDSGGPLVCRHENGPFVLYGIVSWGAGCVQPWKPGVFARVMIFLDWIQSKINGPASLQTNNKCKTLKQQLPPPTPSPDSASWPGCCSEAELEKPRGFFPTPRYLLDYRGRLECSWVLRVSASSMAKFTIEYLSLLGSPVCQDSVLIIYEERHSKRKTAGGLHGRRLYSMTFMSPGPLVRVTFHALVRGAFGISYIVLKVLGPKDSKITRLSQSSNREHLVPCEDVLLTKPEGIMQIPRNSHRTTMGCQWRLVAPLNHIIQLNIINFPMKPTTFVCHGHLRVYEGFGPGKKLIASFAGTLAMILTKDILKREKLNFINTYIMHIWENSVYDNVRSVGKRKQKKFASNLSYSMEAEKSRIQVPADLVPAKGSLSGS

SEQ ID NO: 5341 - protein, 316 aa, Homo sapiens
MICENHTRVTEFILLGFTNNPEMQVSLFIFFLAIYTVTLLGNFLIVTVTSVDLALQTPMYFFLQNLSLLEVCFTLVMVPKMLVDLVSPRKIISFVGCGTQMYFFFFFGSSECFLLSMMAYDRFVAICNPLHYSVIMNRSLCLWMAIGSWMSGVPVSMLQTAWMMALPFCGPNAVDHFFCDGPPVLKLVTVDTTMYEMQALASTLLFIMFPFCLILVSYTRIIITILRMSSATGRQKAFSTCSSHLIVVSLFYGTASLTYLRPKSNQSPESKKLVSLSYTVITPMLNPIIYGLRNNEVKGAVKRTITQKVLQKLDVF

SEQ ID NO: 5342 - protein, 929 aa, Homo sapiens
MSQPIMVQRRSGQGFHGNSEVNAILSPRSESGGLGVSMVEYVLSSSPADKLDSRFRKGNFGTRDAETDGPEKGDQKGKASPFEEDQNRDLKQGDDDDSKINGRGLPNGMDADCKDFNRTPGSRQASPTEVVERLGPNTNPSEGLGPLPNPTANKPLVEEFSNPETQNLDAMEQVGLESLQFDYPGNQVPMDSSGATVGLFDYNSQQQLFQRTNALTVQQLTAAQQQQYALAAAQQPHIAGVFSAGLAPAAFVPNPYIISAAPPGTDPYTAAGLAAAATLAGPAVVPPQYYGVPWGVYPANLFQQQAAAAANNTASQQAASQAQPGQQQVLRAGAGQRPLTPNQGQQGQQAESLAAAAAANPTLAFGQGLATGMPGYQVLAPTAYYDQTGALVVGPGARTGLGAPVRLMAPTPVLISSAAAQAAAAAAAGGTASSLTGSTNGLFRPIGTQPPQQQQQQPSTNLQSNSFYGSSSLTNSSQSSSLFSHGPGQPGSTSLGFGSGNSLGAAIGSALSGFGSSGGLTNGSGRYISAAPGAEAKYRSASSTSSLFSSSSQLFPPSRLRYNRSDIMPSGRSRLLEDFRNNRFPNLQLRDLIGHIVEFSQDQHGSRFIQQKLERATPAERQMVFNEILQAAYQLMTDVFGNYVIQKFFEFGSLDQKLALATRIRGHVLPLALQMYGCRVIQKALESISSDQQSEMVKELDGHVLKCVKDQNGNHVVQKCIECVQPQSLQFIIDAFKGQVFVLSTHPYGCRVIQRILEHCTAEQTLPILEELHQHTEQLVQDQYGNYVIQHVLEHGRPEDKSKIVSEIRGKVLALSQHKFASNVVEKCVTHASRAERALLIDEVCCQNDGPHSALYTMMKDQYANYVVQKMIDMAEPAQRKIIMHKIRPHITTLRKYTYGKHILAKLEKYYLKNSPDLGPIGGPPNGML

SEQ ID NO: 5343 - protein, 499 aa, Homo sapiens
MLHALLRSRMIQGRILLLTICAAGIGGTFQFGYNLSIINAPTLHIQEFTNETWQARTGEPLPDHLVLLMWSLIVSLYPLGGLFGALLAGPLAITLGRKKSLLVNNIFVVSAAILFGFSRKAGSFEMIMLGRLLVGVNAGVSMNIQPMYLGESAPKELRGAVAMSSAIFTALGIVMGQVVGLRELLGGPQAWPLLLASCLVPGALQLASLPLLPESPRYLLIDCGDTEACLAALRRLRGSGDLAGELEELEEERAACQGCRARRPWELFQHRALRRQVTSLVVLGSAMELCGNDSVYAYASSVFRKAGVPEAKIQYAIIGTGSCELLTAVVSCVVIERVGRRVLLIGGYSLMTCWGSIFTVALCLQSSFPWTLYLAMACIFAFILSFGIGPAGVTGILATELFDQMARPAACMVCGALMWIMLILVGLGFPFIMEALSHFLYVPFLGVCVCGAIYTGLFLPETKGKTFQEISKELHRLNFPRRAQGPTWRSLEVIQSTEL

SEQ ID NO: 5344 - protein, 1119 aa, Homo sapiens
MSAPSLRARAAGLGLLLCAVLGRAGRSDSGGRGELGQPSGVAAERPCPTTCRCLGDLLDCSRKRLARLPEPLPSWVARLDLSHNRLSFIKASSMSHLQSLREVKLNNNELETIPNLGPVSANITLLSLAGNRIVEILPEHLKEFQSLETLDLSSNNISELQTAFPALQLKYLYLNSNRVTSMEPGYFDNLANTLLVLKLNRNRISAIPPKMFKLPQLQHLELNRNKIKNVDGLTFQGLGALKSLKMQRNGVTKLMDGAFWGLSNMEILQLDHNNLTEITKGWLYGLLMLQELHLSQNAINRISPDAWEFCQKLSELDLTFNHLSRLDDSSFLGLSLLNTLHIGNNRVSYIADCAFRGLSSLKTLDLKNNEISWTIEDMNGAFSGLDKLRRLILQGNRIRSITKKAFTGLDALEHLDLSDNAIMSLQGNAFSQMKKLQQLHLNTSSLLCDCQLKWLPQWVAENNFQSFVNASCAHPQLLKGRSIFAVSPDGFVCDDFPKPQITVQPETQSAIKGSNLSFICSAASSSDSPMTFAWKKDNELLHDAEMENYAHLRAQGGEVMEYTTILRLREVEFASEGKYQCVISNHFGSSYSVKAKLTVNMLPSFTKTPMDLTIRAGAMARLECAAVGHPAPQIAWQKDGGTDFPAARERRMHVMPEDDVFFIVDVKIEDIGVYSCTAQNSAGSISANATLTVLETPSFLRPLLDRTVTKGETAVLQCIAGGSPPPKLNWTKDDSPLVVTERHFFAAGNQLLIIVDSDVSDAGKYTCEMSNTLGTERGNVRLSVIPTPTCDSPQMTAPSLDDDGWATVGVVIIAVVCCVVGTSLVWVVIIYHTRRRNEDCSITNTDETNLPADIPSYLSSQGTLADRQDGYVSSESGSHHQFVTSSGAGFFLPQHDSSGTCHIDNSSEADVEAATDLFLCPFLGSTGPMYLKGNVYGSDPFETYHTGCSPDPRTVLMDHYEPSYIKKKECYPCSHPSEESCERSFSNISWPSHVRKLLNTSYSHNEGPGMKNLCLNKSSLDFSANPEPASVASSNSFMGTFGKALRRPHLDAYSSFGQPSDCQPRAFYLKAHSSPDLDSGSEEDGKERTDFQEENHICTFKQTLENYRTPNFQSYDLDT

SEQ ID NO: 5345 - protein, 1134 aa, Homo sapiens
MESTPSFLKGTPTWEKTAPENGIVRQEPGSPPRDGLHHGPLCLGEPAPFWRGVLSTPDSWLPPGFPQGPKDMLPLVEGEGPQNGERKVNWLGSKEGLRWKEAMLTHPLAFCGPACPPRCGPLMPEHSGGHLKSDPVAFRPWHCPFLLETKILERAPFWVPTCLPPYLVSGLPPEHPCDWPLTPHPWVYSGGQPKVPSAFSLGSKGFYYKDPSIPRLAKEPLAAAEPGLFGLNSGGHLQRAGEAERPSLHQRDGEMGAGRQQNPCPLFLGQPDTVPWTSWPACPPGLVHTLGNVWAGPGDGNLGYQLGPPATPRCPSPEPPVTQRGCCSSYPPTKGGGLGPCGKCQEGLEGGASGASEPSEEVNKASGPRACPPSHHTKLKKTWLTRHSEQFECPRGCPEVEERPVARLRALKRAGSPEVQGAMGSPAPKRPPDPFPGTAEQGAGGWQEVRDTSIGNKDVDSGQHDEQKGPQDGQASLQDPGLQDIPCLALPAKLAQCQSCAQAAGEGGGHACHSQQVRRSPLGGELQQEEDTATNSSSEEGPGSGPDSRLSTGLAKHLLSGLGDRLCRLLRREREALAWAQREGQGPAVTEDSPGIPRCCSRCHHGLFNTHWRCPRCSHRLCVACGRVAGTGRAREKAGFQEQSAEECTQEAGHAACSLMLTQFVSSQALAELSTAMHQVWVKFDIRGHCPCQADARVWAPGDAGQQKESTQKTPPTPQPSCNGDTHRTKSIKEETPDSAETPAEDRAGRGPLPCPSLCELLASTAVKLCLGHERIHMAFAPVTPALPSDDRITNILDSIIAQVVERKIQEKALGPGLRAGPGLRKGLGLPLSPVRPRLPPPGALLWLQEPQPCPRRGFHLFQEHWRQGQPVLVSGIQRTLQGNLWGTEALGALGGQVQALSPLGPPQPSSLGSTTFWEGFSWPELRPKSDEGSVLLLHRALGDEDTSRVENLAASLPLPEYCALHGKLNLASYLPPGLALRPLEPQLWAAYGVSPHRGHLGTKNLCVEVADLVSILVHADTPLPAWHRAQKDFLSGLDGEGLWSPGSQVSTVWHVFRAQDAQRIRRFLQMVQGLVSTVSVTQHFLSPETSALSAQLCHQGPSLPPDCHLLYAQMDWAVFQAVKVAVGTLQEAK

SEQ ID NO: 5346 - protein, 776 aa, Homo sapiens
MSSTRSQNPHGLKQIGLDQIWDDLRAGIQQVYTRQSMAKSRYMELYTHVYNYCTSVHQSNQARGAGVPPSKSKKGQTPGGAQFVGLELYKRLKEFLKNYLTNLLKDGEDLMDESVLKFYTQQWEDYRFSSKVLNGICAYLNRHWVRRECDEGRKGIYEIYSLALVTWRDCLFRPLNKQVTNAVLKLIEKERNGETINTRLISGVVQSYVELGLNEDDAFAKGPTLTVYKESFESQFLADTERFYTRESTEFLQQNPVTEYMKKAEARLLEEQRRVQVYLHESTQDELARKCEQVLIEKHLEIFHTEFQNLLDADKNEDLGRMYNLVSRIQDGLGELKKLLETHIHNQGLAAIEKCGEAALNDPKMYVQTVLDVHKKYNALVMSAFNNDAGFVAALDKACGRFINNNAVTKMAQSSSKSPELLARYCDSLLKKSSKNPEEAELEDTLNQVMVVFKYIEDKDVFQKFYAKMLAKRLVHQNSASDDAEASMISKLKQACGFEYTSKLQRMFQDIGVSKDLNEQFKKHLTNSEPLDLDFSIQVLSSGSWPFQQSCTFALPSELERSYQRFTAFYASRHSGRKLTWLYQLSKGELVTNCFKNRYTLQASTFQMAILLQYNTEDAYTVQQLTDSTQIKMDILAQVLQILLKSKLLVLEDENANVDEVELKPDTLIKLYLGYKNKKLRVNINVPMKTEQKQEQETTHKNIEEDRKLLIQAAIVRIMKMRKVLKHQQLLGEVLTQLSSRFKPRVPVIKKCIDILIEKEYLERVDGEKDTYSYLA

SEQ ID NO: 5347 - protein, 484 aa, Homo sapiens
MRHSKRTYCPDWDDKDWDYGKWRSSSSHKRRKRSHSSAQENKRCKYNHSKMCDSHYLESRSINEKDYHSRRYIDEYRNDYTQGCEPGHRQRDHESRYQNHSSKSSGRSGRSSYKSKHRIHHSTSHRRSHGKSHRRKRTRSVEDDEEGHLICQSGDVLSARYEIVDTLGEGAFGKVVECIDHKAGGRHVAVKIVKNVDRYCEAARSEIQVLEHLNTTDPNSTFRCVQMLEWFEHHGHICIVFELLGLSTYDFIKENGFLPFRLDHIRKMAYQICKSVNFLHSNKLTHTDLKPENILFVQSDYTEAYNPKIKRDERTLINPDIKVVDFGSATYDDEHHSTLVSTRHYRAPEVILALGWSQPCDVWSIGCILIEYYLGFTVFPTHDSKEHLAMMERILGPLPKHMIQKTRKRKYFHHDRLDWDEHSSAGRYVSRRCKPLKEFMLSQDVEHERLFDLIQKMLEYDPAKRITLREALKHPFFDLLKKSI

SEQ ID NO: 5348 - protein, 501 aa, Homo sapiens
MFGKRKKRVEISAPSNFEHRVHTGFDQHEQKFTGLPRQWQSLIEESARRPKPLVDPACITSIQPGAPKTIVRGSKGAKDGALTLLLDEFENMSVTRSNSLRRDSPPPPARARQENGMPEEPATTARGGPGKGEPHDVAPNGPSAGGLAIPQSSSSSSRPPTRARGAPSPGVLGPHASEPQLAPPACTPAAPAVPGPPGPRSPQREPQRVSHEQFRAALQLVVDPGDPRSYLDNFIKIGEGSTGIVCIATVRSSGKLVAVKKMDLRKQQRRELLFNEVVIMRDYQHENVVEMYNSYLVGDELWVVMEFLEGGALTDIVTHTRMNEEQIAAVCLAVLQALSVLHAQGVIHRDIKSDSILLTHDGRVKLSDFGFCAQVSKEVPRRKSLVGTPYWMAPELISRLPYGPEVDIWSLGIMVIEMVDGEPPYFNEPPLKAMKMIRDNLPPRLKNLHKVSPSLKGFLDRLLVRDPAQRATAAELLKHPFLAKAGPPASIVPLMRQNRTR

SEQ ID NO: 5349 - protein, 523 aa, Homo sapiens
MNQPCNSMEPRVMDDDMLKLAVGDQGPQEEAGQLAKQEGILFKDVLSLQLDFRNILRIDNLWQFENLRKLQLDNNIIEKIEGLENLAHLVWLDLSFNNIETIEGLDTLVNLEDLSLFNNRISKIDSLDALVKLQVLSLGNNRIDNMMNIIYLRRFKCLRTLSLSRNPISEAEDYKMFICAYLPDLMYLDYRRIDDHTKKLAEAKHQYSIDELKHQENLMQAQLEDEQAQREELEKHKTAFVEHLNGSFLFDSMYAEDSEGNNLSYLPGVGELLETYKDKFVIICVNIFEYGLKQQEKRKTELDTFSECVREAIQENQEQGKRKIAKFEEKHLSSLSAIREELELPNIEKMILECSADISELFDALMTLEMQLVEQLEETINMFERNIVDMVGLFIENVQSLMAQCRDLENHHHEKLLEISISTLEKIVEGDLDEDLPNDLRALFVDKDTIVNAVGASHDIHLLKIDNREDELVTRINSWCTRLIDRIHKDEIMRNRKRVKEINQYIDHMQSELDNLECGDILD

SEQ ID NO: 5350 - protein, 365 aa, Homo sapiens
MAARLGALAASGLYRRRQHRQSPPPATGNMSDALANAVCQRCQARFSPAERIVNSNGELYHEHCFVCAQCFRPFPEGLFYEFEGRKYCEHDFQMLFAPCCGSCGEFIIGRVIKAMNNNWHPGCFRCELCDVELADLGFVKNAGRHLCRPCHNREKAKGLGKYICQRCHLVIDEQPLMFRSDAYHPDHFNCTHCGKELTAEARELKGELYCLPCHDKMGVPICGACRRPIEGRVVNALGKQWHVEHFVCAKCEKPFLGHRHYEKKGLAYCETHYNQLFGDVCYNCSHVIEGDVVSALNKAWCVSCFSCSTCNSKLTLKNKFVEFDMKPVCKRCYEKFPLELKKRLKKLSELTSRKAQPKATDLNSA

SEQ ID NO: 5351 - protein, 1913 aa, Homo sapiens
MRELEAKATKDVERNLSRDLVQEEEQLMEEKKKKKDDKKKKEAAQKKATEQKIKVPEQIKPSVSQPQPANSNNGTSTATSTNNNAKRATANNQQPQQQQQQQQPQQQQPQQQPQPQPQQQQPQQQPQALPRYPREVPPRFRHQEHKQLLKRGQHFPVIAANLGSAVKVLNSQSESSALTNQQPQNNGEVQNSKNQSDINHSTSGSHYENSQRGPVSSTSDSSTNCKNAVVSDLSEKEAWPSAPGSDPELASECMDADSASSSESERNITIMASGNTGGEKDGLRNSTGLGSQNKFVVGSSSNNVGHGSSTGPWGFSHGAIISTCQVSVDAPESKSESSNNRMNAWGTVSSSSNGGLNPSTLNSASNHGAWPVLENNGLALKGPVGSGSSGINIQCSTIGQMPNNQSINSKVSGGSTHGTWGSLQETCESEVSGTQKVSFSGQPQNITTEMTGPNNTTNFMTSSLPNSGSVQNNELPSSNTGAWRVSTMNHPQMQAPSGMNGTSLSHLSNGESKSGGSYGTTWGAYGSNYSGDKCSGPNGQANGDTVNATLMQPGVNGPMGTNFQVNTNKGGGVWESGAANSQSTSWGSGNGANSGGSRRGWGTPAQNTGTNLPSVEWNKLPSNQHSNDSANGNGKTFTNGWKSTEEEDQGSATSQTNEQSSVWAKTGGTVESDGSTESTGRLEEKGTGESQSRDRRKIDQHTLLQSIVNRTDLDPRVLSNSGWGQTPIKQNTAWDTETSPRGERKTDNGTEAWGSSATQTFNSGACIDKTSPNGNDTSSVSGWGDPKPALRWGDSKGSNCQGGWEDDSAATGMVKSNQWGNCKEEKAAWNDSQKNKQGWGDGQKSSQGWSVSASDNWGETSRNNHWGEANKKSSSGGSDSDRSVSGWNELGKTSSFTWGNNINPNNSSGWDESSKPTPSQGWGDPPKSNQSLGWGDSSKPVSSPDWNKQQDIVGSWGIPPATGKPPGTGWLGGPIPAPAKEEEPTGWEEPSPESIRRKMEIDDGTSAWGDPSKYNYKNVNMWNKNVPNGNSRSDQQAQVHQLLTPASAISNKEASSGSGWGEPWGEPSTPATTVDNGTSAWGKPIDSGPSWGEPIAAASSTSTWGSSSVGPQALSKSGPKSMQDGWCGDDMPLPGNRPTGWEEEEDVEIGMWNSNSSQELNSSLNWPPYTKKMSSKGLSGKKRRRERGMMKGGNKQEEAWINPFVKQFSNISFSRDSPEENVQSNKMDLSGGMLQDKRMEIDKHSLNIGDYNRTVGKGPGSRPQISKESSMERNPYFDKNGNPSMFGVGNTAAQPRGMQQPPAQPLSSSQPNLRAQVPPPLLSPQVPVSLLKYAPNNGGLNPLFGPQQVAMLNQLSQLNQLSQISQLQRLLAQQQRAQSQRSVPSGNRPQQDQQGRPLSVQQQMMQQSRQLDPNLLVKQQTPPSQQQPLHQPAMKSFLDNVMPHTTPELQKGPSPINAFSNFPIGLNSNLNVNMDMNSIKEPQSRLRKWTTVDSISVNTSLDQNSSKHGAISSGFRLEESPFVPYDFMNSSTSPASPPGSIGDGWPRAKSPNGSSSVNWPPEFRPGEPWKGYPNIDPETDPYVTPGSVINNLSINTVREVDHLRDRNSGSSSSLNTTLPSTSAWSSIRASNYNVPLSSTAQSTSARNSDSKLTWSPGSVTNTSLAHELWKVPLPPKNITAPSRPPPGLTGQKPPLSTWDNSPLRIGGGWGNSDARYTPGSSWGESSSGRITNWLVLKNLTPQIDGSTLRTLCMQHGPLITFHLNLPHGNALVRYSSKEEVVKAQKSLHMCVLGNTTILAEFASEEEISRFFAQSQSLTPSPGWQSLGSSQSRLGSLDCSHSFSSRTDLNHWNGAGLSGTNCGDLHGTSLWGTPHYSTSLWGPPSSSDPRGISSPSPINAFLSVDHLGGGGESM

SEQ ID NO: 5352 - protein, 1400 aa, Homo sapiens
MMASFQRSNSHDKVRRIVAEEGRTARNLIAWSVPLESKDDDGKPKCQTGGKSKRTIQGTHKTTKQSTAVDCKITSSTTGDKHFDKSPTKTRHPRKIDLRARYWAFLFDNLRRAVDEIYVTCESDQSVVECKEVLMMLDNYVRDFKALIDWIQLQEKLEKTDAQSRPTSLAWEVKKMSPGRHVIPSPSTDRINVTSNARRSLNFGGSTGTVPAPRLAPTGVSWADKVKAHHTGSTASSEITPAQSCPPMTVQKASRKNERKDAEGWETVQRGRPIRSRSTAVMPKVSLATEATRSKDDSDKENVCLLPDESIQKGQFVGDGTSNTIESHPKDSLHSCDHPLAEKTQFTVSTLDDVKNSGSIRDNYVRTSEISAVHIDTECVSVMLQAGTPPLQVNEEKFPAEKARIENEMDPSDISNSMAEVLAKKEELADRLEKANEEAIASAIAEEEQLTREIEAEENNDINIETDNDSDFSASMGSGSVSFCGMSMDWNDVLADYEARESWRQNTSWGDIVEEEPARPPGHGIHMHEKLSSPSRKRTIAESKKKHEEKQMKAQQLREKLREEKTLKLQKLLEREKDVRKWKEELLDQRRRMMEEKLLHAEFKREVQLQAIVKKAQEEEAKVNEIAFINTLEAQNKRHDVLSKLKEYEQRLNELQEERQRRQEEKQARDEAVQERKRALEAERQARVEELLMKRKEQEARIEQQRQEKEKAREDAARERARDREERLAALTAAQQEAMEELQKKIQLKHDESIRRHMEQIEQRKEKAAELSSGRHANTDYAPKLTPYERKKQCSLCNVLISSEVYLFSHVKGRKHQQAVRENTSIQGRELSDEEVEHLSLKKYIIDIVVESTAPAEALKDGEERQKNKKKAKKIKARMNFRAKEYESLMETKNSGSDSPYKAKLQRLAKDLLKQVQVQDSGSWANNKVSALDRTLGEITRILEKENVADQIAFQAAGGLTALEHILQAVVPATNVNTVLRIPPKSLCNAINVYNLTCNNCSENCSDVLFSNKITFLMDLLIHQLTVYVPDENNTILGRNTNKQVFEGLTTGLLKVSAVVLGCLIANRPDGNCQPATPKIPTQEMKNKPSQGDPFNNRVQDLISYVVNMGLIDKLCACFLSVQGPVDENPKMAIFLQHAAGLLHAMCTLCFAVTGRSYSIFDNNRQDPTGLTAALQATDLAGVLHMLYCVLFHGTILDPSTASPKENYTQNTIQVAIQSLRFFNSFAALHLPAFQSIVGAEGLSLAFRHMASSLLGHCSQVSCESLLHEVIVCVGYFTVNHPDNQVIVQSGRHPTVLQKLCQLPFQYFSDPRLIKVLFPSLIAACYNNHQNKIILEQEMSCVLLATFIQDLAQTPGQAENQPYQPKGKCLGSQDYLELANRFPQQAWEEARQFFLKKEKK

SEQ ID NO: 5353 - protein, 390 aa, Homo sapiens
MAEIHNGGELCDFMENGEIFSEHSCLNAHMGTENTGDTYDCDEYGENFPMLHNSAPAGETLSVLNQCRKAFSLPPNVHQRTWIGDKSFEYSDCEEAFVDQSHLQANRITHNGETLYEQKQCGRAFTYSTSHAVSVKMHTVEKPYECKECGKFFRYSSYLNSHMRTHTGEKPYECKECGKCFTVSSHLVEHVRIHTGEKPYQCKECGRAFAGRSGLTKHVRIHTGEKPYECNECGKAYNRFYLLTEHFKTHTEEKPFECKVCGKSFRSSSCLKNHFRIHTGIKPYKCKECGKAFTVSSSLHNHVKIHTGEKPYECKDCGKAFATSSQLIEHIRTHTGEKPYICKECGKTFRASSHLQKHVRIHTGEKPYICNECGKAYNRFYLLTKHLKTH

SEQ ID NO: 5354 - protein, 705 aa, Homo sapiens
MTIEDLPDFPLEGNPLFGRYPFIFSASDTPVIFSISAAPMPSDCEFSFFDPNDASCQEILFDPKTSVSELFAILRQWVPQVQQNIDIIGNEILKRGCNVNDRDGLTDMTLLHYTCKSGAHGIGDVETAVKFATQLIDLGADISLRSRWTNMNALHYAAYFDVPELIRVILKTSKPKDVDATCSDFNFGTALHIAAYNLCAGAVKCLLEQGANPAFRNDKGQIPADVVPDPVDMPLEMADAAATAKEIKQMLLDAVPLSCNISKAMLPNYDHVTGKAMLTSLGLKLGDRVVIAGQKVGTLRFCGTTEFASGQWAGIELDEPEGKNNGSVGKVQYFKCAPKYGIFAPLSKISKAKGRRKNITHTPSTKAAVPLIRSQKIDVAHVTSKVNTGLMTSKKDSASESTLSLPPGEELKTVTEKDVALLGSVSSCSSTSSLEHRQSYPKKQNAISSNKKTMSKSPSLSSRASAGLNSSATSTANNSRCEGELRLGERVLVVGQRLGTIRFFGTTNFAPGYWYGIELEKPHGKNDGSVGGVQYFSCSPRYGIFAPPSRVQRVTDSLDTLSEISSNKQNHSYPGFRRSFSTTSASSQKEINRRNAFSKSKAALRRSWSSTPTAGGIEGSVKLHEGSQVLLTSSNEMGTVRYVGPTDFASGIWLGLELRSAKGKNDGSVGDKRYFTCKPNHGVLVRPSRVTYRGINGSKLVDENC

SEQ ID NO: 5355 - protein, 518 aa, Homo sapiens
MDRAPQRQHRASRELLAAKKTHTSQIEVIPCKICGDKSSGIHYGVITCEGCKGFFRRSQRCNAAYSCTRQQNCPIDRTSRNRCQHCRLQKCLALGMSRDAVKFGRMSKKQRDSLHAEVQKQLQQRQQQQQEPVVKTPPAGAQGADTLTYTLGLPDGQLPLGSSPDLPEASACPPGLLKASGSGPSYSNNLAKAGLNGASCHLEYSPERGKAEGRESFYSTGSQLTPDRCGLRFEEHRHPGLGELGQGPDSYGSPSFRSTPEAPYASLTEIEHLVQSVCKSYRETCQLRLEDLLRQRSNIFSREEVTGYQRKSMWEMWERCAHHLTEAIQYVVEFAKRLSGFMELCQNDQIVLLKAGAMEVVLVRMCRAYNADNRTVFFEGKYGGMELFRALGCSELISSIFDFSHSLSALHFSEDEIALYTALVLINAHRPGLQEKRKVEQLQYNLELAFHHHLCKTHRQSILAKLPPKGKLRSLCSQHVERLQIFQHLHPIVVQAAFPPLYKELFSTETESPVGLSK

SEQ ID NO: 5356 - protein, 450 aa, Homo sapiens
MSDFSEELKGPVTDDEEVETSVLSGAGMHFPWLQTYVETVAIGGKRRKDFAQTTSACLSFIQEALLKHQWQQAAEYMYSYFQTLEDSDSYKRQAAPEIIWKLGSEILFYHPKSNMESFNTFANRMKNIGVMNYLKISLQHALYLLHHGMLKDAKRNLSEAETWRHGENTSSREILINLIQAYKGLLQYYTWSEKKMELSKLDKDDYAYNAVAQDVFNHSWKTSANISALIKIPGVWDPFVKSYVEMLEFYGDRDGAQEVLTNYAYDEKFPSNPNAHIYLYNFLKRQKAPRSKLISVLKILYQIVPSHKLMLEFHTLLRKSEKEEHRKLGLEVLFGVLDFAGCTKNITAWKYLAKYLKNILMGNHLAWVQEEWNSRKNWWPGFHFSYFWAKSDWKEDTALACEKAFVAGLLLGKGCRYFRYILKQDHQILGKKIKRMKRSVKKYSIVNPRL

SEQ ID NO: 5357 - protein, 290 aa, Homo sapiens
MPLLTLYLLLFWLSGYSIVTQITGPTTVNGLERGSLTVQCVYRSGWETYLKWWCRGAIWRDCKILVKTSGSEQEVKRDRVSIKDNQKNRTFTVTMEDLMKTDADTYWCGIEKTGNDLGVTVQVTIDPAPVTQEETSSSPTLTGHHLDNRHKLLKLSVLLPLIFTILLLLLVAASLLAWRMMKYQQKAAGMSPEQVLQPLEGDLCYADLTLQLAGTSPQKATTKLSSAQVDQVEVEYVTMASLPKEDISYASLTLGAEDQEPTYCNMGHLSSHLPGRGPEEPTEYSTISRP

SEQ ID NO: 5358 - protein, 2024 aa, Homo sapiens
MATGGGPFEDGMNDQDLPNWSNENVDDRLNNMDWGAQQKKANRSSEKNKKKFGVESDKRVTNDISPESSPGVGRRRTKTPHTFPHSRYMSQMSVPEQAELEKLKQRINFSDLDQRSIGSDSQGRATAANNKRQLSENRKPFNFLPMQINTNKSKDASTNPPNRETIGSAQCKELFASALSNDLLQNCQVSEEDGRGEPAMESSQIVSRLVQIRDYITKASSMREDLVEKNERSANVERLTHLIDHLKEQEKSYMKFLKKILARDPQQEPMEEIENLKKQHDLLKRMLQQQEQLRALQGRQAALLALQHKAEQAIAVMDDSVVAETAGSLSGVSITSELNEELNDLIQRFHNQLRDSQPPAVPDNRRQAESLSLTREVSQSRKPSASERLPDEKVELFSKMRVLQEKKQKMDKLLGELHTLRDQHLNNSSSSPQRSVDQRSTSAPSASVGLAPVVNGESNSLTSSVPYPTASLVSQNESENEGHLNPSEKLQKLNEVRKRLNELRELVHYYEQTSDMMTDAVNENRKDEETEESEYDSEHENSEPVTNIRNPQVASTWNEVNSHSNAQCVSNNRDGRTVNSNCEINNRSAANIRALNMPPSLDCRYNREGEQEIHVAQGEDDEEEEEEAEEEGVSGASLSSHRSSLVDEHPEDAEFEQKINRLMAAKQKLRQLQDLVAMVQDDDAAQGVISASASNLDDFYPAEEDTKQNSNNTRGNANKTQKDTGVNEKAREKFYEAKLQQQQRELKQLQEERKKLIDIQEKIQALQTACPDLQLSAASVGNCPTKKYMPAVTSTPTVNQHETSTSKSVFEPEDSSIVDNELWSEMRRHEMLREELRQRRKQLEALMAEHQRRQGLAETASPVAVSLRSDGSENLCTPQQSRTEKTMATWGGSTQCALDEEGDEDGYLSEGIVRTDEEEEEEQDASSNDNFSVCPSNSVNHNSYNGKETKNRWKNNCPFSADENYRPLAKTRQQNISMQRQENLRWVSELSYVEEKEQWQEQINQLKKQLDFSVSICQTLMQDQQTLSCLLQTLLTGPYSVMPSNVASPQVHFIMHQLNQCYTQLTWQQNNVQRLKQMLNELMRQQNQHPEKPGGKERGSSASHPPSPSLFCPFSFPTQPVNLFNIPGFTNFSSFAPGMNFSPLFPSNFGDFSQNISTPSEQQQPLAQNSSGKTEYMAFPKPFESSSSIGAEKPRNKKLPEEEVESSRTPWLYEQEGEVEKPFIKTGFSVSVEKSTSSNRKNQLDTNGRRRQFDEESLESFSSMPDPVDPTTVTKTFKTRKASAQASLASKDKTPKSKSKKRNSTQLKSRVKNIRYESASMSSTCEPCKSRNRHSAQTEEPVQAKVFSRKNHEQLEKIIKCNRSTEISSETGSDFSMFEALRDTIYSEVATLISQNESRPHFLIELFHELQLLNTDYLRQRALYALQDIVSRHISESHEKGENVKSVNSGTWIASNSELTPSESLATTDDETFEKNFERETHKISEQNDADNASVLSVSSNFEPFATDDLGNTVIHLDQALARMREYERMKTEAESNSNMRCTCRIIEDGDGAGAGTTVNNLEETPVIENRSSQQPVSEVSTIPCPRIDTQQLDRQIKAIMKEVIPFLKEHMDEVCSSQLLTSVRRMVLTLTQQNDESKEFVKFFHKQLGSILQDSLAKFAGRKLKDCGEDLLVEISEVLFNELAFFKLMQDLDNNSITVKQRCKRKIEATGVIQSCAKEAKRILEDHGSPAGEIDDEDKDKDETETVKQTQTSEVYDGPKNVRSDISDQEEDEESEGCPVSINLSKAETQALTNYGSGEDENEDEEMEEFEEGPVDVQTSLQANTEATEENEHDEQVLQRDFKKTAESKNVPLEREATSKNDQNNCPVKPCYLNILEDEQPLNSAAHKESPPTVDSTQQPNPLPLRLPEMEPLVPRVKEVKSAQETPESSLAGSPDTESPVLVNDYEAESGNISQKSDEEDFVKVEDLPLKLTIYSEADLRKKMVEEEQKNHLSGEICEMQTEELAGNSETLKEPETVGAQSI

SEQ ID NO: 5359 - protein, 491 aa, Homo sapiens
MEKAADLQDTASLTLKFKFNPKLGIDNPVLSLAEDHDPYDPWSLERPRFCLLSKEEGKSFGFHLQQELGRAGHVVCRVDPGTSAQRQGLQEGDRILAVNNDVVEHEDYAVVVRRIRASSPRVLLTVLARHAHDVARAQLGEDAHLCPTLGPGVRPRLCHIVKDEGGFGFSVTHGNQGPFWLVLSTGGAAERAGVPPGARLLEVNGLWQSGQQVTLLVAGPEVEEQCRQLGLPLAAPLAEGWALPTKPRCLHLEKGPQGFGFLLREEKGLDGRPGQFLWEVDPGLPAKKAGMQAGDRLVAVAGESVEGLGHEETVSRIQGQGSCVSLTVVDPEADRFFSMVRLSPLLFLENTEAPASPRGSSSASLVETEDPSLEDTSVPSVPLGSRQCFLYPGPGGSYGFRLSCVASGPRLFISQVTPGGSAARAGLQVGDVILEVNGYPVGGQNDLERLQQLPEAEPPLCLKLAARSLRGLEAWIPPGAAEDWALASDLL

SEQ ID NO: 5360 - protein, 535 aa, Homo sapiens
MFSWLGTDDRRRKDPEVFQTVSEGLKKLYKSKLLPLEEHYRFHEFHSPALEDADFDNKPMVLLVGQYSTGKTTFIRYLLEQDFPGMRIGPEPTTDSFIAVMQGDMEGIIPGNALVVDPKKPFRKLNAFGNAFLNRFVCAQLPNPVLESISVIDTPGILSGEKQRISRGYDFAAVLEWFAERVDRIILLFDAHKLDISDEFSEVIKALKNHEDKMRVVLNKADQIETQQLMRVYGALMWSLGKIVNTPEVIRVYIGSFWSHPLLIPDNRKLFEAEEQDLFRDIQSLPRNAALRKLNDLIKRARLAKVHAYIISSLKKEMPSVFGKDNKKKELVNNLAEIYGRIEREHQISPGDFPNLKRMQDQLQAQDFSKFQPLKSKLLEVVDDMLAHDIAQLMVLVRQEESQRPIQMVKGGAFEGTLHGPFGHGYGEGAGEGIDDAEWVVARDKPMYDEIFYTLSPVDGKITGANAKKEMVRSKLPNSVLGKIWKLADIDKDGMLDDDEFALANHLIKVKLEGHELPNELPAHLLPPSKRKVAE

SEQ ID NO: 5361 - protein, 612 aa, Homo sapiens
MAAGQREARPQVSLTFEDVAVLFTWDEWRKLAPSQRNLYRDVMLENYRNLVSLGLSFTKPKVISLLQQGEDPWEVEKDSSGVSSLGCKSTPKMTKSTQTQDSFQEQIRKRLKRDEPWNFISERSCIYEEKLKKQQDKNENLQIISVAHTKILTVDRSHKNVEFGQNFYLKSVFIKQQRFAKEKTPSKCEIQRNSFKQNSNLLNQSKIKTAEKRYKCSTCEKAFIHNSSLRKHQKNHTGEKLFKCKECLKAFSQSSALIQHQRTHTGEKPYICKECGKAFSHSASLCKHLRTHTVEKCYRCKECGKSFSRRSGLFIHQKIHAQENPHKYNPGRKASSYSTSLSGSQKIHLRKKSYLCNECGNTFKSSSSLRYHQRIHTGEKPFKCSECGRAFSQSASLIQHERIHTGEKPYRCNECGKGFTSISRLNRHRIIHTGEKLYNCNECGKALSSHSTLIIHERIHTGEKPCKCKVCGKAFRQSSALIQHQRMHTGERPYKCNECDKTFRCNSSLSNHQRIHTGEKPYRCLECGMSFGQSAALIQHQRIHTGEKPFKCNTCGKTFRQSSSLIAHQRIHTGEKPYECNACGKLFSQRSSLTNHYKIHIEEDSLKADLHV

SEQ ID NO: 5362 - protein, 2725 aa, Homo sapiens
MMNNSGYSDAGLGLGDETDEMPSTEKDLAEDAPWKKIQQNTFTRWCNEHLKCVGKRLTDLQRDLSDGLRLIALLEVLSQKRMYRKFHPRPNFRQMKLENVSVALEFLEREHIKLVSIDSKAIVDGNLKLILGLIWTLILHYSISMPMWEDEDDEDARKQTPKQRLLGWIQNKVPQLPITNFNRDWQDGKALGALVDNCAPGLCPDWEAWDPNQPVENAREAMQQADDWLGVPQVIAPEEIVDPNVDEHSVMTYLSQFPKAKLKPGAPVRSKQLNPKKAIAYGPGIEPQGNTVLQPAHFTVQTVDAGVGEVLVYIEDPEGHTEEAKVVPNNDKDRTYAVSYVPKVAGLHKVTVLFAGQNIERSPFEVNVGMALGDANKVSARGPGLEPVGNVANKPTYFDIYTAGAGTGDVAVVIVDPQGRRDTVEVALEDKGDSTFRCTYRPAMEGPHTVHVAFAGAPITRSPFPVHVSEACNPNACRASGRGLQPKGVRVKEVADFKVFTKGAGSGELKVTVKGPKGTEEPVKVREAGDGVFECEYYPVVPGKYVVTITWGGYAIPRSPFEVQVSPEAGVQKVRAWGPGLETGQVGKSADFVVEAIGTEVGTLGFSIEGPSQAKIECDDKGDGSCDVRYWPTEPGEYAVHVICDDEDIRDSPFIAHILPAPPDCFPDKVKAFGPGLEPTGCIVDKPAEFTIDARAAGKGDLKLYAQDADGCPIDIKVIPNGDGTFRCSYVPTKPIKHTIIISWGGVNVPKSPFRVNVGEGSHPERVKVYGPGVEKTGLKANEPTYFTVDCSEAGQGDVSIGIKCAPGVVGPAEADIDFDIIKNDNDTFTVKYTPPGAGRYTIMVLFANQEIPASPFHIKVDPSHDASKVKAEGPGLNRTGVEVGKPTHFTVLTKGAGKAKLDVQFAGTAKGEVVRDFEIIDNHDYSYTVKYTAVQQGNMAVTVTYGGDPVPKSPFVVNVAPPLDLSKIKVQGLNSKVAVGQEQAFSVNTRGAGGQGQLDVRMTSPSRRPIPCKLEPGGGAEAQAVRYMPPEEGPYKVDITYDGHPVPGSPFAVEGVLPPDPSKVCAYGPGLKGGLVGTPAPFSIDTKGAGTGGLGLTVEGPCEAKIECQDNGDGSCAVSYLPTEPGEYTINILFAEAHIPGSPFKATIRPVFDPSKVRASGPGLERGKVGEAATFTVDCSEAGEAELTIEILSDAGVKAEVLIHNNADGTYHITYSPAFPGTYTITIKYGGHPVPKFPTRVHVQPAVDTSGVKVSGPGVEPHGVLREVTTEFTVDARSLTATGGNHVTARVLNPSGAKTDTYVTDNGDGTYRVQYTAYEEGVHLVEVLYDEVAVPKSPFRVGVTEGCDPTRVRAFGPGLEGGLVNKANRFTVETRGAGTGGLGLAIEGPSEAKMSCKDNKDGSCTVEYIPFTPGDYDVNITFGGRPIPGSPFRVPVKDVVDPGKVKCSGPGLGAGVRARVPQTFTVDCSQAGRAPLQVAVLGPTGVAEPVEVRDNGDGTHTVHYTPATDGPYTVAVKYADQEVPRSPFKIKVLPAHDASKVRASGPGLNASGIPASLPVEFTIDARDAGEGLLTVQILDPEGKPKKANIRDNGDGTYTVSYLPDMSGRYTITIKYGGDEIPYSPFRIHALPTGDASKCLVTVSIGGHGLGACLGPRIQIGQETVITVDAKAAGEGKVTCTVSTPDGAELDVDVVENHDGTFDIYYTAPEPGKYVITIRFGGEHIPNSPFHVLACDPLPHEEEPSEVPQLRQPYAPPRPGARPTHWATEEPVVPVEPMESMLRPFNLVIPFAVQKGELTGEVRMPSGKTARPNITDNKDGTITVRYAPTEKGLHQMGIKYDGNHIPGSPLQFYVDAINSRHVSAYGPGLSHGMVNKPATFTIVTKDAGEGGLSLAVEGPSKAEITCKDNKDGTCTVSYLPTAPGDYSIIVRFDDKHIPGSPFTAKITGDDSMRTSQLNVGTSTDVSLKITESDLSQLTASIRAPSGNEEPCLLKRLPNRHIGISFTPKEVGEHVVSVRKSGKHVTNSPFKILVGPSEIGDASKVRVWGKGLSEGHTFQVAEFIVDTRNAGYGGLGLSIEGPSKVDINCEDMEDGTCKVTYCPTEPGTYIINIKFADKHVPGSPFTVKVTGEGRMKESITRRRQAPSIATIGSTCDLNLKIPGNWFQMVSAQERLTRTFTRSSHTYTRTERTEISKTRGGETKREVRVEESTQVGGDPFPAVFGDFLGRERLGSFGSITRQQEGEASSQDMTAQVTSPSGKVEAAEIVEGEDSAYSVRFVPQEMGPHTVAVKYRGQHVPGSPFQFTVGPLGEGGAHKVRAGGTGLERGVAGVPAEFSIWTREAGAGGLSIAVEGPSKAEIAFEDRKDGSCGVSYVVQEPGDYEVSIKFNDEHIPDSPFVVPVASLSDDARRLTVTSLQETGLKVNQPASFAVQLNGARGVIDARVHTPSGAVEECYVSELDSDKHTIRFIPHENGVHSIDVKFNGAHIPGSPFKIRVGEQSQAGDPGLVSAYGPGLEGGTTGVSSEFIVNTLNAGSGALSVTIDGPSKVQLDCRECPEGHVVTYTPMAPGNYLIAIKYGGPQHIVGSPFKAKVTGPRLSGGHSLHETSTVLVETVTKSSSSRGSSYSSIPKFSSDASKVVTRGPGLSQAFVGQKNSFTVDCSKAGTNMMMVGVHGPKTPCEEVYVKHMGNRVYNVTYTVKEKGDYILIVKWGDESVPGSPFKVKVP

SEQ ID NO: 5363 - protein, 1158 aa, Homo sapiens
MTHGEELGSDVHQDSIVLTYLEGLLMHQAAGGSGTAVDKKSAGHNEEDQNFNISGSAFPTCQSNGPVLNTHTYQGSGMLHLKKARLLQSSEDWNAAKRKRLSDSIMNLNVKKEALLAGMVDSVPKGKQDSTLLASLLQSFSSRLQTVALSQQIRQSLKEQGYALSHDSLKVEKDLRCYGVASSHLKTLLKKSKVKDQKPDTNLPDVTKNLIRDRFAESPHHVGQSGTKVMSEPLSCAARLQAVASMVEKRASPATSPKPSVACSQLALLLSSEAHLQQYSREHALKTQNANQAASERLAAMARLQENGQKDVGSYQLPKGMSSHLNGQARTSSSKLMASKSSATVFQNPMGIIPSSPKNAGYKNSLERNNIKQAANNSLLLHLLKSQTIPKPMNGHSHSERGSIFEESSTPTTIDEYSDNNPSFTDDSSGDESSYSNCVPIDLSCKHRTEKSESDQPVSLDNFTQSLLNTWDPKVPDVDIKEDQDTSKNSKLNSHQKVTLLQLLLGHKNEENVEKNTSPQGVHNDVSKFNTQNYARTSVIESPSTNRTTPVSTPPLLTSSKAGSPINLSQHSLVIKWNSPPYVCSTQSEKLTNTASNHSMDLTKSKDPPGEKPAQNEGAQNSATFSASKLLQNLAQCGMQSSMSVEEQRPSKQLLTGNTDKPIGMIDRLNSPLLSNKTNAVEENKAFSSQPTGPEPGLSGSEIENLLERRTVLQLLLGNPNKGKSEKKEKTPLRDESTQEHSERALSEQILMVKIKSEPCDDLQIPNTNVHLSHDAKSAPFLGMAPAVQRSAPALPVSEDFKSEPVSPQDFSFSKNGLLSRLLRQNQDSYLADDSDRSHRNNEMALLESKNLCMVPKKRKLYTEPLENPFKKMKNNIVDAANNHSAPEVLYGSLLNQEELKFSRNDLEFKYPAGHGSASESEHRSWARESKSFNVLKQLLLSENCVRDLSPHRSNSVADSKKKGHKNNVTNSKPEFSISSLNGLMYSSTQPSSCMDNRTFSYPGVVKTPVSPTFPEHLGCAGSRPESGLLNGCSMPSEKGPIKWVITDAEKNEYEKDSPRLTKTNPILYYMLQKGGNSVTSRETQDKDIWREASSAESVSQVTAKEELLPTAETKASFFNLRSPYNSHMGNNASRPHSANGEVYGLLGSVLTIKKESE

SEQ ID NO: 5364 - protein, 731 aa, Homo sapiens
MWSWKCLLFWAVLVTATLCTARPSPTLPEQDALPSSEDDDDDDDSSSEEKETDNTKPNPVAPYWTSPEKMEKKLHAVPAAKTVKFKCPSSGTPNPTLRWLKNGKEFKPDHRIGGYKVRYATWSIIMDSVVPSDKGNYTCIVENEYGSINHTYQLDVVERSPHRPILQAGLPANKTVALGSNVEFMCKVYSDPQPHIQWLKHIEVNGSKIGPDNLPYVQILKTAGVNTTDKEMEVLHLRNVSFEDAGEYTCLAGNSIGLSHHSAWLTVLEALEERPAVMTSPLYLEIIIYCTGAFLISCMVGSVIVYKMKSGTKKSDFHSQMAVHKLAKSIPLRRQVTVSADSSASMNSGVLLVRPSRLSSSGTPMLAGVSEYELPEDPRWELPRDRLVLGKPLGEGCFGQVVLAEAIGLDKDKPNRVTKVAVKMLKSDATEKDLSDLISEMEMMKMIGKHKNIINLLGACTQDGPLYVIVEYASKGNLREYLQARRPPGLEYCYNPSHNPEEQLSSKDLVSCAYQVARGMEYLASKKCIHRDLAARNVLVTEDNVMKIADFGLARDIHHIDYYKKTTNGRLPVKWMAPEALFDRIYTHQSDVWSFGVLLWEIFTLGGSPYPGVPVEELFKLLKEGHRMDKPSNCTNELYMMMRDCWHAVPSQRPTFKQLVEDLDRIVALTSNQEYLDLSMPLDQYSPSFPDTRSSTCSSGEDSVFSHEPLPEEPCLPRHPAQLANGGLKRR

SEQ ID NO: 5365 - protein, 1153 aa, Homo sapiens
MACPWKFLFKTKFHQYAMNGEKDINNNVEKAPCATSSPVTQDDLQYHNLSKQQNESPQPLVETGKKSPESLVKLDATPLSSPRHVRIKNWGSGMTFQDTLHHKAKGILTCRSKSCLGSIMTPKSLTRGPRDKPTPPDELLPQAIEFVNQYYGSFKEAKIEEHLARVEAVTKEIETTGTYQLTGDELIFATKQAWRNAPRCIGRIQWSNLQVFDARSCSTAREMFEHICRHVRYSTNNGNIRSAITVFPQRSDGKHDFRVWNAQLIRYAGYQMPDGSIRGDPANVEFTQLCIDLGWKPKYGRFDVVPLVLQANGRDPELFEIPPDLVLEVAMEHPKYEWFRELELKWYALPAVANMLLEVGGLEFPGCPFNGWYMGTEIGVRDFCDVQRYNILEEVGRRMGLETHKLASLWKDQAVVEINIAVLHSFQKQNVTIMDHHSAAESFMKYMQNEYRSRGGCPADWIWLVPPMSGSITPVFHQEMLNYVLSPFYYYQVEAWKTHVWQDEKRRPKRREIPLKVLVKAVLFACMLMRKTMASRVRVTILFATETGKSEALAWDLGALFSCAFNPKVVCMDKYRLSCLEEERLLLVVTSTFGNGDCPGNGEKLKKSLFMLKELNNKFRYAVFGLGSSMYPRFCAFAHDIDQKLSHLGASQLTPMGEGDELSGQEDAFRSWAVQTFKAACETFDVRGKQHIQIPKLYTSNVTWDPHHYRLVQDSQPLDLSKALSSMHAKNVFTMRLKSRQNLQSPTSSRATILVELSCEDGQGLNYLPGEHLGVCPGNQPALVQGILERVVDGPTPHQTVRLEALDESGSYWVSDKRLPPCSLSQALTYFLDITTPPTQLLLQKLAQVATEEPERQRLEALCQPSEYSKWKFTNSPTFLEVLEEFPSLRVSAGFLLSQLPILKPRFYSISSSRDHTPTEIHLTVAVVTYHTRDGQGPLHHGVCSTWLNSLKPQDPVPCFVRNASGFHLPEDPSHPCILIGPGTGIAPFRSFWQQRLHDSQHKGVRGGRMTLVFGCRRPDEDHIYQEEMLEMAQKGVLHAVHTAYSRLPGKPKVYVQDILRQQLASEVLRVLHKEPGHLYVCGDVRMARDVAHTLKQLVAAKLKLNEEQVEDYFFQLKSQKRYHEDIFGAVFPYEAKKDRVAVQPSSLEMSAL

SEQ ID NO: 5366 - protein, 455 aa, Homo sapiens
MFCSGRKWVAEATICTKLMKREKRRMGKRRAKKAKREEKKKGGERRRNEKRGNQMKRMCERKKYETDLEDQDIMGAFLDKPKMEKHNAQGQGNGLRYGLSSMQGWRVEMEDAHTAVIGLPSGLESWSFFAVYDGHAGSQVAKYCCEHLLDHITNNQDFKGSAGAPSVENVKNGIRTGFLEIDEHMRVMSEKKHGADRSGSTAVGVLISPQHTYFINCGDSRGLLCRNRKVHFFTQDHKPSNPLEKERIQNAGGSVMIQRVNGSLAVSRALGDFDYKCVHGKGPTEQLVSPEPEVHDIERSEEDDQFIILACDGIWDVMGNEELCDFVRSRLEVTDDLEKVCNEVVDTCLYKGSRDNMSVILICFPNAPKVSPEAVKKEAELDKYLECRVEEIIKKQGEGVPDLVHVMRTLASENIPSLPPGGELASKRNVIEAVYNRLNPYKNDDTDSTSTDDMW

SEQ ID NO: 5367 - protein, 1188 aa, Homo sapiens
MDLPRGLVVAWALSLWPGFTDTFNMDTRKPRVIPGSRTAFFGYTVQQHDISGNKWLVVGAPLETNGYQKTGDVYKCPVIHGNCTKLNLGRVTLSNVSERKDNMRLGLSLATNPKDNSFLACSPLWSHECGSSYYTTGMCSRVNSNFRFSKTVAPALQRCQTYMDIVIVLDGSNSIYPWVEVQHFLINILKKFYIGPGQIQVGVVQYGEDVVHEFHLNDYRSVKDVVEAASHIEQRGGTETRTAFGIEFARSEAFQKGGRKGAKKVMIVITDGESHDSPDLEKVIQQSERDNVTRYAVAVLGYYNRRGINPETFLNEIKYIASDPDDKHFFNVTDEAALKDIVDALGDRIFSLEGTNKNETSFGLEMSQTGFSSHVVEDGVLLGAVGAYDWNGAVLKETSAGKVIPLRESYLKEFPEELKNHGAYLGYTVTSVVSSRQGRVYVAGAPRFNHTGKVILFTMHNNRSLTIHQAMRGQQIGSYFGSEITSVDIDGDGVTDVLLVGAPMYFNEGRERGKVYVYELRQNLFVYNGTLKDSHSYQNARFGSSIASVRDLNQDSYNDVVVGAPLEDNHAGAIYIFHGFRGSILKTPKQRITASELATGLQYFGCSIHGQLDLNEDGLIDLAVGALGNAVILWSRPVVQINASLHFEPSKINIFHRDCKRSGRDATCLAAFLCFTPIFLAPHFQTTTVGIRYNATMDERRYTPRAHLDEGGDRFTNRAVLLSSGQELCERINFHVLDTADYVKPVTFSVEYSLEDPDHGPMLDDGWPTTLRVSVPFWNGCNEDEHCVPDLVLDARSDLPTAMEYCQRVLRKPAQDCSAYTLSFDTTVFIIESTRQRVAVEATLENRGENAYSTVLNISQSANLQFASLIQKEDSDGSIECVNEERRLQKQVCNVSYPFFRAKAKVAFRLDFEFSKSIFLHHLEIELAAGSDSNERDSTKEDNVAPLRFHLKYEADVLFTRSSSLSHYEVKPNSSLERYDGIGPPFSCIFRIQNLGLFPIHGMMMKITIPIATRSGNRLLKLRDFLTDEANTSCNIWGNSTEYRPTPVEEDLRRAPQLNHSNSDVVSINCNIRLVPNQEINFHLLGNLWLRSLKALKYKSMKIMVNAALQRQFHSPFIFREEDPSRQIVFEISKQEDWQVPIWIIVGSTLGGLLLLALLVLALWKLGFFRSARRRREPGLDPTPKVLE

SEQ ID NO: 5368 - protein, 679 aa, Homo sapiens
MESRSVAQAGVQWCDLGSLQAPPPGFTLFSCLSLLSSWDYSSGFSGFCASPIEESHGALISSCNSRTMTDGLVTFRDVAIDFSQEEWECLDPAQRDLYVDVMLENYSNLVSLDLESKTYETKKIFSENDIFEINFSQWEMKDKSKTLGLEASIFRNNWKCKSIFEGLKGHQEGYFSQMIISYEKIPSYRKSKSLTPHQRIHNTEKSYVCKECGKACSHGSKLVQHERTHTAEKHFECKECGKNYLSAYQLNVHQRFHTGEKPYECKECGKTFSWGSSLVKHERIHTGEKPYECKECGKAFSRGYHLTQHQKIHTGVKSYKCKECGKAFFWGSSLAKHEIIHTGEKPYKCKECGKAFSRGYQLTQHQKIHTGKKPYECKICGKAFCWGYQLTRHQIFHTGEKPYECKECGKAFNCGSSLIQHERIHTGEKPYECKECGKAFSRGYHLSQHQKIHTGEKPFECKECGKAFSWGSSLVKHERVHTGEKSHECKECGKTFCSGYQLTRHQVFHTGEKPYECKECGKAFNCGSSLVQHERIHTGEKPYECKECGKAFSRGYHLTQHQKIHTGEKPFKCKECGKAFSWGSSLVKHERVHTNEKSYECKDCGKAFGSGYQLSVHQRFHTGEKLYQRKEFGKTFTCGSKLVHERTHSNDKPYKYNECGEAFLWTTYSNEKIDTDETL

SEQ ID NO: 5369 - protein, 484 aa, Homo sapiens
MWYVSTRGVAPRVNFEGALFSGYAPDGGLFMPEELPQLDRGTLCQWSTLSYPGLVKELCALFIGSELLPKDELNDLIDRAFSRFRHREVVHLSRLRNGLNVLELWHGVTYAFKDLSLSCTTQFLQYFLEKREKHVTVVVGTSGDTGSAAIESVQGAKNMDIIVLLPKGHCTKIQELQMTTVLKQNVHVFGVEGNSDELDEPIKTVFADVAFVKKHNLMSLNSINWSRVLVQMAHHFFAYFQCTPSLDTHPLPLVEVVVPTGAAGNLAAGYIAQKIGLPIRLVVAVNRNDIIHRTVQQGDFSLSEAVKSTLASAMDIQVPYNMERVFWLLSGSDSQVTRALMEQFERTQSVNLPKELHSKLSEAVTSVSVSDEAITQTMGRCWDENQYLLCPHSAVAVNYHYQQIDRQQPSTPRCCLAPASAAKFPEAVLAAGLTPETPAEIVALEHKETRCTLMRRGDNWMLMLRDTIEDLSRQWRSHALNTSQ

SEQ ID NO: 5370 - protein, 611 aa, Homo sapiens
MNDISQKAEIKEMLASDDEEDVSSKVEKAYVPKLTGTVKGRFAEMEKQRQEEQRKRTEEERKRRIEQDMLEKRKIQRELAKRAEQIEDINNTGTESASEEGDDSLLITVVPVKSYKTSGKMKKNFEDLEKEREEKERIKYEEDKRIRYEEQRPSLKEAKCLSLVMDDEIESEAKKESLSPGKLKLTFEELERQRQENRKKQAEEEARKRLEEEKRAFEEARRQMVNEDEENQDTAKIFKGYRPGKLKLSFEEMERQRREDEKRKAEEEARRRIEEEKKAFAEARRNMVVDDDSPEMYKTISQEFLTPGKLEINFEELLKQKMEEEKRRTEEERKHKLEMEKQEFEQLRQEMGEEEEENETFGLSREYEELIKLKRSGSIQAKNLKSKFEKIGQLSEKEIQKKIEEERARRRAIDLEIKEREAENFHEEDDVDVRPARKSEAPFTHKVNMKARFEQMAKAREEEEQRRIEEQKLLRMQFEQREIDAALQKKREEEEEEEGSIMNGSTAEDEEQTRSGAPWFKKPLKNTSVVDSEPVRFTVKVTGEPKPEITWWFEGEILQDGEDYQYIERGETYCLYLPETFPEDGGEYMCKAVNNKGSAASTCILTIESKN

SEQ ID NO: 5371 - protein, 803 aa, Homo sapiens
MEVTDRIASLEQRVQMQEDDIQLLKSALADVVRRLNITEEQQAVLNRKGPTKARPLMQTLPLRTTVNNGTVLPKKPTGSLPSPSGVRKETAVPATKRLNRSVSLLNACKLNRSTPSNIKRTSSSERVSPGGRRESNGDSRGNRNRTGSTSSSSSGKKNSESKPKEPVFSAEEGYVKMFLRGRPVTMYMPKDQVDSYSLEAKVELPTKRLKLEWVYGYRGRDCRNNLYLLPTGETVYFIASVVVLYNVEEQLQRHYAGHNDDVKCLAVHPDRITIATGQVAGTSKDGKQLPPHVRIWDSVTLNTLHVIGIGFFDRAVTCIAFSKSNGGTNLCAVDDSNDHVLSVWDWQKEEKLADVKCSNEAVFAADFHPTDTNIIVTCGKSHLYFWTLEGSSLNKKQGLFEKQEKPKFVLCVTFSENGDTITGDSSGNILVWGKGTNRISYAVQGAHEGGIFALCMLRDGTLVSGGGKDRKLISWSGNYQKLRKTEIPEQFGPIRTVAEGKGDVILIGTTRNFVLQGTLSGDFTPITQGHTDELWGLAIHASKSQFLTCGHDKHATLWDAVGHRPVWDKIIEDPAQSSGFHPSGSVVAVGTLTGRWFVFDTETKDLVTVHTDGNEQLSVMRYSPDGNFLAIGSHDNCIYIYGVSDNGRKYTRVGKCSGHSSFITHLDWSVNSQFLVSNSGDYEILYWVPSACKQVVSVETTRDIEWATYTCTLGFHVFGVWPEGSDGTDINAVCRAHEKKLLSTGDDFGKVHLFSYPCSQFRAPSHIYGGHSSHVTNVDFLCEDSHLISTGGKDTSIMQWRVI

SEQ ID NO: 5372 - protein, 873 aa, Homo sapiens
MTTRKLSAHSAATPGYKAVTHKHHTGWARMAKTGLPEKGQSQAGGESGSGQLLDQENGAGESALVSVYVHLDFPDKTWPPELSRTLTLPAASASSSPRPLLTGLRLTTGEYMSCFEAQGFKWNLYEVVRVPLKATDVARLPYQLSISCATSPGFQLSCCIPSTNLAYTAAWSPGEGSKASSFNESGSQCFVLAVQRCPMADTTYACDLQSLGLAPLRVPISITIIQDGDITCPEDASVLTWNVTKAGHVAQAPCPESKRGIVRRLCGADGVWGPVHSSCTDARLLALFTRTKLLQAGQGSPAEEVPQILAQLPGQAAEASSPSDLLTLLSTMKYVAKVVAEARIQLDRRALKNLLIATDKVLDMDTRSLWTLAQARKPWAGSTLLLAVETLACSLCPQDHPFAFSLPNVLLQSQLFGPTFPADYSISFPTRPPLQAQIPRHSLAPLVRNGTEISITSLVLRKLDHLLPSNYGQGLGDSLYATPGLVLVISIMAGDRAFSQGEVIMDFGNTDGSPHCVFWDHSLFQGRGGWSKEGCQAQVASASPTAQCLCQHLTAFSVLMSPHTVPEEPALALLTQVGLGASILALLVCLGVYWLVWRVVVRNKISYFRHAALLNMVFCLLAADTCFLGAPFLSPGPRSPLCLAAAFLCHFLYLATFFWMLAQALVLAHQLLFVFHQLAKHRVLPLMVLLGYLCPLGLAGVTLGLYLPQGQYLREGECWLDGKGGALYTFVGPVLAIIGVNGLVLAMAMLKLLRPSLSEGPPAEKRQALLGVIKALLILTPIFGLTWGLGLATLLEEVSTVPHYIFTILNTLQGVFILLFGCLMDRKIQEALRKRFCRAQAPSSTISLATNEGCILEHSKGGSDTARKTDASE

SEQ ID NO: 5373 - protein, 1152 aa, Homo sapiens
MIFSDMNTVSGSPKVHPPNGTRFYTFQEFAALTKELNACREQLLEKEEEISELKAERNNTRLLLEHLECLVSRHERSLRMTVVKRQAQSPSGVSSEVEVLKALKSLFEHHKALDEKIVALREQNVHIQRKMASSEGSTESEHLEGMEPGQKVHEKRLSNGSIDSTDETSQIVELQELLEKQNYEMAQMKERLAALSSRVGEVEQEAETARKDLIKTEEMNTKYQRDIREAMAQKEDMEERITTLEKRYLSAQRESTSIHDMNDKLENELANKEAILRQMEEKNRQLQERLELAEQKLQQTMRKAETLPEVEAELAQRIAALTKAEERHGNIEERMRHLEGQLEEKNQELQRARQREKMNEEHNKRLSDTVDRLLTESNERLQLHLKERMAALEEKNVLIQESETFRKNLEESLHDKERLAEEIEKLRSELDQLKMRTGSLIEPTIPRTHLDTSAELRYSVGSLVDSQSDYRTTKVIRRPRRGRMGVRRDEPKVKSLGDHEWNRTQQIGVLSSHPFESDTEMSDIDDDDRETIFSSMDLLSPSGHSDAQTLAMMLQEQLDAINKEIRLIQEEKESTELRAEEIENRVASVSLEGLNLARVHPGTSITASVTASSLASSSPPSGHSTPKLTPRSPAREMDRMGVMTLPSDLRKHRRKIAVVEEDGREDKATIKCETSPPPTPRALRMTHTLPSSYHNDARSSLSVSLEPESLGLGSANSSQDSLHKAPKKKGIKSSIGRLFGKKEKARLGQLRGFMETEAAAQESLGLGKLGTQAEKDRRLKKKHELLEEARRKGLPFAQWDGPTVVAWLELWLGMPAWYVAACRANVKSGAIMSALSDTEIQREIGISNPLHRLKLRLAIQEMVSLTSPSAPPTSRTPSGNVWVTHEEMENLAAPAKTKESEEGSWAQTLAYGDMNHEWIGNEWLPSLGLPQYRSYFMECLVDARMLDHLTKKDLRVHLKMVDSFHRTSLQYGIMCLKRLNYDRKELERRREASQHEIKDVLVWSNDRVIRWIQAIGLREYANNILESGVHGSLIALDENFDYSSLALLLQIPTQNTQARQILEREYNNLLALGTERRLDESDDKNFRRGSTWRRQFPPREVHGISMMPGSSETLPAGFRLTTTSGQSRKMTTDVASSRLQRLDNSTVRTYSC

SEQ ID NO: 5374 - protein, 453 aa, Homo sapiens
MASPSLPGSDCSQIIDHSHVPEFEVATWIKITLILVYLIIFVMGLLGNSATIRVTQVLQKKGYLQKEVTDHMVSLACSDILVFLIGMPMEFYSIIWNPLTTSSYTLSCKLHTFLFEACSYATLLHVLTLSFERYIAICHPFRYKAVSGPCQVKLLIGFVWVTSALVALPLLFAMGTEYPLVNVPSHRGLTCNRSSTRHHEQPETSNMSICTNLSSRWTVFQSSIFGAFVVYLVVLLSVAFMCWNMMQVLMKSQKGSLAGGTRPPQLRKSESEESRTARRQTIIFLRLIVVTLAVCWMPNQIRRIMAAAKPKHDWTRSYFRAYMILLPFSETFFYLSSVINPLLYTVSSQQFRRVFVQVLCCRLSLQHANHEKRLRVHAHSTTDSARFVQRPLLFASRRQSSARRTEKIFLSTFQSEAEPQSKSQSLSLESLEPNSGAKPANSAAENGFQEHEV

SEQ ID NO: 5375 - protein, 149 aa, Homo sapiens
MADPGPDPESESESVFPREVGLFADSYSEKSQFCFCGHVLTITQNFGSRLGVAARVWDAALSLCNYFESQNVDFRGKKVIELGAGTGIVGILAALQGAYGLVRETEDDVIEQELWRGMRGACGHALSMSTMTPWESIKGSSVRGGCYHH

SEQ ID NO: 5376 - protein, 626 aa, Homo sapiens
MGNAAGSAEQPAGPAAPPPKQHRFEKLMEYFRNEDSNIDFMVACMQFINIVVHSVENMNFRVFLQYEFTHLGLDLYLERLRLTESDKLQVQIQAYLDNIFDVGALLEDTETKNAVLEHMEELQEQVALLTERLRDAENESMAKIAELEKQLSQARKELETLRERFSESTAMGPSRRPPEPEKAPPAAPTRPSALELKVEELEEKGLIRILRGPGDAVSIEILPVAVATPSGGDAPTPGVPTGSPSPDLAPAAEPAPGAAPPPPPPPPGGPPDALGRRDSELGPGVKAKKPIQTKFRMPLLNWVALKPSQITGTVFTELNDEKVLQELDMSDFEEQFKTKSQGPSLDLSALKSKAAQKAPSKATLIEANRAKNLAITLRKGNLGAERICQAIEAYDLQALGLDFLELLMRFLPTEYERSLITRFEREQRPMEELSEEDRFMLCFSRIPRLPERMTTLTFLGNFPDTAQLLMPQLNAIIAASMSIKSSDKLRQILEIVLAFGNYMNSSKRGAAYGFRLQSLDALLEMKSTDRKQTLLHYLVKVIAEKYPQLTGFHSDLHFLDKAGSVSLDSVLADVRSLQRGLELTQREFVRQDDCMVLKEFLRANSPTMDKLLADSKTAQAVPTGGL

SEQ ID NO: 5377 - protein, 577 aa, Homo sapiens
MHWLRKVQGLCTLWGTQMSSRTLYINSRQLVSLQWGHQEVPAKFNFASDVLDHWADMEKAGKRLPSPALWWVNGKGKELMWNFRELSENSQQAANILSGACGLQRGDRVAVMLPRVPEWWLVILGCIRAGLIFMPGTIQMKSTDILYRLQMSKAKAIVAGDEVIQEVDTVASECPSLRIKLLVSEKSCDGWLNFKKLLNEASTTHHCVETGSQEASAIYFTSGTSGLPKMAEHSYSSLGLKAKMDAGWTGLQASDIMWTISDTGWILNILGSLLESWTLGACTFVHLLPKFDPLVILKTLSSYPIKSMMGAPIVYRMLLQQDLSSYKFPHLQNCLAGGESLLPETLENWRAQTGLDIREFYGQTETGLTCMVSKTMKIKPGYMGTAASCYDVQVIDDKGNVLPPGTEGDIGIRVKPIRPIGIFSGYVENPDKTAANIRGDFWLLGDRGIKDEDGYFQFMGRADDIINSSGYRIGPSEVENALMKHPAVVETAVISSPDPVRGEVVKAFVILASQFLSHDPEQLTKELQQHVKSVTAPYKYPRKIEFVLNLPKTVTGKIQRTKLRDKEWKMSGKARAQ

SEQ ID NO: 5378 - protein, 1121 aa, Homo sapiens
MSLENEDKRARTRSKALRGPPETTAADLSCPTPGCTGSGHVRGKYSRHRSLQSCPLAKKRKLEGAEAEHLVSKRKSHPLKLALDEGYGVDSDGSEDTEVKDASVSDESEGTLEGAEAETSGQDEIHRPETAEGRSPVKSHFGSNPIGSATASSKGSYSSYQGIIATSLLNLGQIAEETLVEEDLGQAAKPGPGIVHLLQEAAEGAASEEGEKGLFIQPEDAEEVVEVTTERSQDLCPQSLEDAASEESSKQKGILSHEEEDEEEEEEEEEEEEDEEEEEEEEEEEEEEEEEEEEEEEEEEEEEEEEAAPDVIFQEDTSHTSAQKAPELRGPESPSPKPEYSVIVEVRSDDDKDEDTHSRKSTVTDESEMQDMMTRGNLGLLEQAIALKAEQVRTVCEPGCPPAEQSQLGLGEPGKAAKPLDTVRKSYYSKDPSRAEKREIKCPTPGCDGTGHVTGLYPHHRSLSGCPHKDRIPPEILAMHENVLKCPTPGCTGQGHVNSNRNTHRSLSGCPIAAAEKLAKSHEKQQPQTGDPSKSSSNSDRILRPMCFVKQLEVPPYGSYRPNVAPATPRANLAKELEKFSKVTFDYASFDAQVFGKRMLAPKIQTSETSPKAFQCFDYSQDAEAAHMAATAILNLSTRCWEMPENLSTKPQDLPSKSVDIEVDENGTLDLSMHKHRKRENAFPSSSSCSSSPGVKSPDASQRHSSTSAPSSSMTSPQSSQASRQDEWDRPLDYTKPSRLREEEPEESEPAAHSFASSEADDQEVSEENFEERKYPGEVTLTNFKLKFLSKDIKKELLTCPTPGCDGSGHITGNYASHRSLSGCPLADKSLRNLMAAHSADLKCPTPGCDGSGHITGNYASHRSLSGCPRAKKSGVKVAPTKDDKEDPELMKCPVPGCVGLGHISGKYASHRSASGCPLAARRQKEGSLNGSSFSWKSLKNEGPTCPTPGCDGSGHANGSFLTHRSLSGCPRATFAGKKGKLSGDEVLSPKFKTSDVLENDEEIKQLNQEIRDLNESNSEMEAAMVQLQSQISSMEKNLKNIEEENKLIEEQNEALFLELSGLSQALIQSLANIRLPHMEPICEQNFDAYVSTLTDMYSNQDPENKDLLESIKQAVRGIQV

SEQ ID NO: 5379 - protein, 1439 aa, Homo sapiens
MSLLMFTQLLLCGFLYVRVDGSRLRQEDFPPRIVEHPSDVIVSKGEPTTLNCKAEGRPTPTIEWYKDGERVETDKDDPRSHRMLLPSGSLFFLRIVHGRRSKPDEGSYVCVARNYLGEAVSRNASLEVALLRDDFRQNPTDVVVAAGEPAILECQPPRGHPEPTIYWKKDKVRIDDKEERISIRGGKLMISNTRKSDAGMYTCVGTNMVGERDSDPAELTVFERPTFLRRPINQVVLEEEAVEFRCQVQGDPQPTVRWKKDDADLPRGRYDIKDDYTLRIKKTMSTDEGTYMCIAENRVGKMEASATLTVRAPPQFVVRPRDQIVAQGRTVTFPCETKGNPQPAVFWQKEGSQNLLFPNQPQQPNSRCSVSPTGDLTITNIQRSDAGYYICQALTVAGSILAKAQLEVTDVLTDRPPPIILQGPANQTLAVDGTALLKCKATGDPLPVISWLKEGFTFPGRDPRATIQEQGTLQIKNLRISDTGTYTCVATSSSGETSWSAVLDVTESGATISKNYDLSDLPGPPSKPQVTDVTKNSVTLSWQPGTPGTLPASAYIIEAFSQSVSNSWQTVANHVKTTLYTVRGLRPNTIYLFMVRAINPQGLSDPSPMSDPVRTQDISPPAQGVDHRQVQKELGDVLVRLHNPVVLTPTTVQVTWTVDRQPQFIQGYRVMYRQTSGLQATSSWQNLDAKVPTERSAVLVNLKKGVTYEIKVRPYFNEFQGMDSESKTVRTTEEAPSAPPQSVTVLTVGSYNSTSISVSWDPPPPDHQNGIIQEYKIWCLGNETRFHINKTVDAAIRSVIIGGLFPGIQYRVEVAASTSAGVGVKSEPQPIIIGRRNEVVITENNNSITEQITDVVKQPAFIAGIGGACWVILMGFSIWLYWRRKKRKGLSNYAVTFQRGDGGLMSNGSRPGLLNAGDPSYPWLADSWPATSLPVNNSNSGPNEIGNFGRGDVLPPVPGQGDKTATMLSDGAIYSSIDFTTKTSYNSSSQITQATPYATTQILHSNSIHELAVDLPDPQWKSSIQQKTDLMGFGYSLPDQNKGNNGGKGGKKKKNKNSSKPQKNNGSTWANVPLPPPPVQPLPGTELEHYAVEQQENGYDSDSWCPPLPVQTYLHQGLEDELEEDDDRVPTPPVRGVASSPAISFGQQSTATLTPSPREEMQPMLQAHLDELTRAYQFDIAKQTWHIQSNNQPPQPPVPPLGYVSGALISDLETDVADDDADDEEEALEIPRPLRALDQTPGSSMDNLDSSVTGSMVNGWGSASDEDRNFSSHRSSVGSSSDGSIFASGSFAQALVAAADKAGFRLDGTSLTRTGKAFTSSQRPRPTSPFSTDSNTSAALSQSQRPRPTKKHKGGRMDQQPALPHRREGMTDEEALVPYSKPSFPSPGGHSSSGTASSKGSTGPRKTEVLRAGHQRNASDLLDIGYMGSNSQGQFTGEL

SEQ ID NO: 5380 - protein, 674 aa, Homo sapiens
MALTQGQLSFSDVAIEFSQEEWKCLDPGQKALYRDVMLENYRNLVSLGEDNVRPEACICSGICLPDLSVTSMLEQKRDPWTLQSEVKIINNPDGRECIKGVNTEKSSKLGSSAGNKSLKNQHGLTLQLHLTEWQPFQAVRNIYGCKHVEKSISDNSSVSPVQISFFSVKTHIFNNYRNDFLFSTLLPQEQKVHIREKPYGCNEHGKVFRVSSSLTNRQVIHIADKTYKCSDCGEIFSSNSNFAQHQRIHTGEKPYKYNECGKVFNQNSHLAQHQKIHTGQKPYNNKECGKVFSHHAYLAQHRKIHTGEKPYKCSECGKAFSVCSSLTAHLVIHTGEKPYDCKECGKVFRHKSSLTTHQTVHTGERPYKCNECGKGFSRIAFLARHRKVHTGEKPYKCNECGKVFIGNSRLARHRKIHTGGRRYKCNECGKAFRTCSDLTAHLLIHTGEKPYECIDCGKVFRHKSSLTYHCRIHTGEKPYKCNECGKVFSQNSNLQRHRKIHTGEKLYKCNECGKVFRQNSHLAQHRDIHTGEKPYSCNECGKVFRRNSHLVRHRNVHTGEKPYSCNECGKVFSRNSHLARHRNIHTGEKPHSCNECGKVFSRNSHLARHRKIHTGEKLYKCNECSKVFSRNSRLAQHRNIHTGVKPYSCNECGKVFSKNSILVQHCSIHTREKP

SEQ ID NO: 5381 - protein, 472 aa, Homo sapiens
MMLGTEGGEGFVVKVRGLPWSCSADEVQRFFSDCKIQNGAQGIRFIYTREGRPSGEAFVELESEDEVKLALKKDRETMGHRYVEVFKSNNVEMDWVLKHTGPNSPDTANDGFVRLRGLPFGCSKEEIVQFFSGLEIVPNGITLPVDFQGRSTGEAFVQFASQEIAEKALKKHKERIGHRYIEIFKSSRAEVRTHYDPPRKLMAMQRPGPYDRPGAGRGYNSIGRGAGFERMRRGAYGGGYGGYDDYNGYNDGYGFGSDRFGRDLNYCFSGMSDHRYGDGGSTFQSTTGHCVHMRGLPYRATENDIYNFFSPLNPVRVHIEIGPDGRVTGEADVEFATHEDAVAAMSKDKANMQHRYVELFLNSTAGASGGAYEHRYVELFLNSTAGASGGAYGSQMMGGMGLSNQSSYGGPASQQLSGGYGGGYGGQSSMSGYGNQGAVNSSYYSSGSRASMGVNGMGGLSSMSSMSGGWGM

SEQ ID NO: 5382 - protein, 293 aa, Homo sapiens
MDTTRYSKWGGSSEEVPGGPWGRWVHWSRRPLFLALAVLVTTVLWAVILSILLSKASTERAALLDGHDLLRTNASKQTAALGALKEEVGDCHSCCSGTQAQLQTTRAELGEAQAKLMEQESALRELRERVTQGLAEAGRGREDVRTELFRALEAVRLQNNSCEPCPTSWLSFEGSCYFFSVPKTTWAAAQDHCADASAHLVIVGGLDEQGFLTRNTRGRGYWLGLRAVRHLGKVQGYQWVDGVSLSFSHWNQGEPNDAWGRENCVMMLHTGLWNDAPCDSEKDGWICEKRHNC

SEQ ID NO: 5383 - protein, 537 aa, Homo sapiens
NSFTVHPRGLHRGAGARLLSNGHSAPEPRAGPANRLAGSPPGSGQWKPKVESGDPSLHPPPSPGTPSATPASPPASATPSQRQCVSAATSTNDSFEIRPAPKPVMETIPLGDLQARALASLRANSRNSFMVIPKSKASGAPPPEGRQSVELPKGDLGPASPSQELGSQPVPGGDGAPALGKSPLEVEAQWAVEEGACPRTATALADRAIRWQRPSSPPPFLPAASEEAEPAEGLRVPGLAKNSREYVRPGLPVTFIDEVDSEEAPQAAKLPYLPHPARPLHPARPGCVAELQPRGSNTFTVVPKRKPGTLQDQHFSQANREPRPREAEEEEASCLLGPTLKKRYPTVHEIEVIGGYLALQKSCLTKAGSSRKKMKISFNDKSLQTTFEYPSESSLEQEEEVDQQEEEEEEEEEEEEEEEGSGSEEKPFALFLPRATFVSSVRPESSRLPEGSSGLSSYTPKHSVAFSKWQEQALEQAPREAEPPPVEAMVRCGGVERWGESDTRASPCVHILSSHFQLTPASQNDLSDFRSEPALYF

SEQ ID NO: 5384 - protein, 617 aa, Homo sapiens
MAFPHRPDAPELPDFSMLKRLARDQLIYLLEQLPGKKDLFIEADLMSPLDRIANVSILKQHEVDKLYKVENKPALSSNEQLCFLVRPRIKNMRYIASLVNADKLAGRTRKYKVIFSPQKFYACEMVLEEEGIYGDVSCDEWAFSLLPLDVDLLSMELPEFFRDYFLEGDQRWINTVAQALHLLSTLYGPFPNCYGIGRCAKMAYELWRNLEEEEDGETKGRRPEIGHIFLLDRDVDFVTALCSQVVYEGLVDDTFRIKCGSVDFGPEVTSSDKSLKVLLNAEDKVFNEIRNEHFSNVFGFLSQKARNLQAQYDRRRGMDIKQMKNFVSQELKGLKQEHRLLSLHIGACESIMKKKTKQDFQELIKTEHALLEGFNIRESTSYIEEHIDRQVSPIESLRLMCLLSITENGLIPKDYRSLKTQYLQSYGPEHLLTFSNLRRAGLLTEQAPGDTLTAVESKVSKLVTDKAAGKITDAFSSLAKRSNFRAISKKLNLIPRVDGEYDLKVPRDMAYVFGGAYVPLSCRIIEQVLERRSWQGLDEVVRLLNCSDFAFTDMTKEDKASSESLRLILVVFLGGCTFSEISALRFLGREKGYRFIFLTTAVTNSARLMEAMSEVKA

SEQ ID NO: 5385 - protein, 514 aa, Homo sapiens
MDTMRSLRFISAEALVSHPQVARQSLDSVAHNLYPLLFKASYLLEQAEVTRAVLGRWPLEEFRLGALLGPGADHPQDLRDRTCRACLEALVRGLADHVLQDRSRRRLRVADLTGIRDVQVQRCPCGRALGRWGRTQLLARTCCELQAEPLAAGRPVEVLADLFVTEGNFEAVVQALRPAGPAPLRVHCPSFRADSLSPSQLLHVLRLAGPGALRKLEVVHNVRLHAGHVQQLLAQVGFPRLASLTLPTKAFDAPPTYASTPDGEDPLLASIARELSKMAQLTELSVAFSTLTGKIPTLLGPLQTPLRVLDLANCALNHTDMAFLADCAHAAHLEVLDLSGHNLVSLYPSTFFRLLSQASRTLRILTLEECGIVDSHVGMLILGLSPCHRLRQLKFLGNPLSARALRRLFTALCELPELRCIEFPVPKDCYPEGAAYPQDELAMSKFNQQKYDEIAEELRAVLLRADREDIQVSTPLFGSFDPDIQETSNELGAFLLQAFKTALENFSRALKQIE

SEQ ID NO: 5386 - protein, 949 aa, Homo sapiens
MEHGTLLAQPGLWTRDTSWALLYFLCYILPQTAPQVLRIGGIFETVENEPVNVEELAFKFAVTSINRNRTLMPNTTLTYDIQRINLFDSFEASRRACDQLALGVAALFGPSHSSSVSAVQSICNALEVPHIQTRWKHPSVDNKDLFYINLYPDYAAISRAILDLVLYYNWKTVTVVYEDSTGLIRLQELIKAPSRYNIKIKIRQLPSGNKDAKPLLKEMKKGKEFYVIFDCSHETAAEILKQILFMGMMTEYYHYFFTTLDLFALDLELYRYSGVNMTGFRLLNIDNPHVSSIIEKWSMERLQAPPRPETGLLDGMMTTEAALMYDAVYMVAIASHRASQLTVSSLQCHRHKPWRLGPRFMNLIKEARWDGLTGHITFNKTNGLRKDFDLDIISLKEEGTEKAAGEVSKHLYKVWKKIGIWNSNSGLNMTDSNKDKSSNITDSLANRTLIVTTILEEPYVMYRKSDKPLYGNDRFEGYCLDLLKELSNILGFIYDVKLVPDGKYGAQNDKGEWNGMVKELIDHRADLAVAPLTITYVREKVIDFSKPFMTLGISILYRKPNGTNPGVFSFLNPLSPDIWMYVLLACLGVSCVLFVIARFTPYEWYNPHPCNPDSDVVENNFTLLNSFWFGVGALMQQGSELMPKALSTRIVGGIWWFFTLIIISSYTANLAAFLTVERMESPIDSADDLAKQTKIEYGAVRDGSTMTFFKKSKISTYEKMWAFMSSRQQTALVRNSDEGIQRVLTTDYALLMESTSIEYVTQRNCNLTQIGGLIDSKGYGVGTPIGSPYRDKITIAILQLQEEGKLHMMKEKWWRGNGCPEEDNKEASALGVENIGGIFIVLAAGLVLSVFVAIGEFIYKSRKNNDIEQKGKSSRIRFYFRNKVRFHGRKKQSLGVEKCLSFNAIMEELGISLKNQKKIKKKSRTKGKSSFTSILTCHQRRTQRKETVA

SEQ ID NO: 5387 - protein, 940 aa, Homo sapiens
MPAVSKGDGMRGLAVFISDIRNCKSKEAEIKRINKELANIRSKFKGDKALDGYSKKKYVCKLLFIFLLGHDIDFGHMEAVNLLSSNRYTEKQIGYLFISVLVNSNSELIRLINNAIKNDLASRNPTFMGLALHCIASVGSREMAEAFAGEIPKVLVAGDTMDSVKQSAALCLLRLYRTSPDLVPMGDWTSRVVHLLNDQHLGVVTAATSLITTLAQKNPEEFKTSVSLAVSRLSRIVTSASTDLQDYTYYFVPAPWLSVKLLRLLQCYPPPEDPAVRGRLTECLETILNKAQEPPKSKKVQHSNAKNAVLFEAISLIIHHDSEPNLLVRACNQLGQFLQHRETNLRYLALESMCTLASSEFSHEAVKTHIETVINALKTERDVSVRQRAVDLLYAMCDRSNAPQIVAEMLSYLETADYSIREEIVLKVAILAEKYAVDYTWYVDTILNLIRIAGDYVSEEVWYRVIQIVINRDDVQGYAAKTVFEALQAPACHENLVKVGGYILGEFGNLIAGDPRSSPLIQFHLLHSKFHLCSVPTRALLLSTYIKFVNLFPEVKPTIQDVLRSDSQLRNADVELQQRAVEYLRLSTVASTDILATVLEEMPPFPERESSILAKLKKKKGPSTVTDLEDTKRDRSVDVNGGPEPAPASTSAVSTPSPSADLLGLGAAPPAPAGPPPSSGGSGLLVDVFSDSASVVAPLAPGSEDNFARFVCKNNGVLFENQLLQIGLKSEFRQNLGRMFIFYGNKTSTQFLNFTPTLICSDDLQPNLNLQTKPVDPTVEGGAQVQQVVNIECVSDFTEAPVLNIQFRYGGTFQNVSVQLPITLNKFFQPTEMASQDFFQRWKQLSNPQQEVQNIFKAKHPMDTEVTKAKIIGFGSALLEEVDPNPANFVGAGIIHTKTTQIGCLLRLEPNLQAQMYRLTLRTSKEAVSQRLCELLSAQF

SEQ ID NO: 5388 - protein, 271 aa, Homo sapiens
MAGLEVLFASAAPAITCRQDALVCFLHWEVVTHGYFGLGVGDQPGPNDKKSELLPAGWNNNKDLYVLRYEYKDGSRKLLVKAITVESSMILNVLEYGSQQVADLTLNLDDYIDAEHLGDFHRTYKNSEELRSRIVSGIITPIHEQWEKANVSSPHREFPPATAREVDPLRIPPHHPHTSRQPPWCDPLGPFVVGGEDLDPFGPRRGGMIVDPLRSGFPRALIDPSSGLPNRLPPGAVPPGARFDPFGPIGTSPPGPNPDHLPPPGYDDMYL

SEQ ID NO: 5389 - protein, 318 aa, Homo sapiens
MNGDHMVLGSSVTDKKAIILVTILLLLRLVAIAGNGFITAALGVEWVLRRMLLPCDKLLVSLGASRFCLQSVVMGKTIYVFLHPMAFPYNPVLQFLAFQWDFLNAATLWSSTWLSVFYCVKIATFTHPVFFWLKHKLSGWLPWMLFSSVGLSSFTTILFFIGNHRMYQNYLRNHLQPWNVTGDSIRSYCEKFYLFPLKMITWTMPTAVFFICMILLITSLGRHRKKALLTTSGFREPSVQAHIKALLALLSFAMLFISYFLSLVFSAAGIFPPLDFKFWVWESVIYLCAAVHPIILLFSNCRLRAVLKSRRSSRCGTP

SEQ ID NO: 5390 - protein, 468 aa, Homo sapiens
MSTADLMENLREELTCFICLDYFSSPVTTECGHSFCLVCLLRSWEEHNTPLSCPECWRTLEGPHFQSNERLGRLASIARQLRSQVLQSEDEQGSYGRMPTTAKALSDDEQGGSAFVAQSHGANRVHLSSEAEEHHREKLQEILNLLRVRRKEAQAVLTHEKERVKLCQEETKTCKQVVVSEYMKMHQFLKEEEQLQLQLLEQEEKENMRKLRNNEIKLTQQIRSLSKMIAQIESSSQSSAFESLEEVRGALERSEPLLLQCPEATTTELSLCRITGMKEMLRKFSTEITLDPATANAYLVLSEDLKSVKYGGSRQQLPDNPERFDQSATVLGTQIFTSGRHYWEVEVGNKTEWEVGICKDSVSRKGNLPKPPGDLFSLIGLKIGDDYSLWVSSPLKGQHVREPVCKVGVFLDYESGHIAFYNGTDESLIYSFPQASFQEALRPIFSPCLPNEGTNTDPLTICSLNSHV

SEQ ID NO: 5391 - protein, 1785 aa, Homo sapiens
MGISTVILEMCLLWGQVLSTGGWIPRTTDYASLIPSEVPLDPTVAEGSPFPSESTLESTVAEGSPISLESTLESTVAEGSLIPSESTLESTVAEGSDSGLALRLVNGDGRCQGRVEILYRGSWGTVCDDSWDTNDANVVCRQLGCGWAMSAPGNAWFGQGSGPIALDDVRCSGHESYLWSCPHNGWLSHNCGHGEDAGVICSAAQPQSTLRPESWPVRISPPVPTEGSESSLALRLVNGGDRCRGRVEVLYRGSWGTVCDDYWDTNDANVVCRQLGCGWAMSAPGNAQFGQGSGPIVLDDVRCSGHESYLWSCPHNGWLTHNCGHSEDAGVICSAPQSRPTPSPDTWPTSHASTAGPESSLALRLVNGGDRCQGRVEVLYRGSWGTVCDDSWDTSDANVVCRQLGCGWATSAPGNARFGQGSGPIVLDDVRCSGYESYLWSCPHNGWLSHNCQHSEDAGVICSAAHSWSTPSPDTLPTITLPASTVGSESSLALRLVNGGDRCQGRVEVLYQGSWGTVCDDSWDTNDANVVCRQLGCGWAMSAPGNARFGQGSGPIVLDDVRCSGHESYLWSCPHNGWLSHNCGHSEDAGVICSASQSRPTPSPDTWPTSHASTAGSESSLALRLVNGGDRCQGRVEVLYRGSWGTVCDDYWDTNDANVVCRQLGCGWAMSAPGNARFGQGSGPIVLDDVRCSGHESYLWSCPHNGWLSHNCGHHEDAGVICSASQSQPTPSPDTWPTSHASTAGSESSLALRLVNGGDRCQGRVEVLYRGSWGTVCDDYWDTNDANVVCRQLGCGWATSAPGNARFGQGSGPIVLDDVRCSGHESYLWSCPHNGWLSHNCGHHEDAGVICSASQSQPTPSPDTWPTSRASTAGSESTLALRLVNGGDRCRGRVEVLYQGSWGTVCDDYWDTNDANVVCRQLGCGWAMSAPGNAQFGQGSGPIVLDDVRCSGHESYLWSCPHNGWLSHNCGHHEDAGVICSAAQSQSTPRPDTWLTTNLPALTVGSESSLALRLVNGGDRCRGRVEVLYRGSWGTVCDDSWDTNDANVVCRQLGCGWAMSAPGNARFGQGSGPIVLDDVRCSGNESYLWSCPHKGWLTHNCGHHEDAGVICSATQINSTTTDWWHPTTTTTARPSSNCGGFLFYASGTFSSPSYPAYYPNNAKCVWEIEVNSGYRINLGFSNLKLEAHHNCSFDYVEIFDGSLNSSLLLGKICNDTRQIFTSSYNRMTIHFRSDISFQNTGFLAWYNSFPSDATLRLVNLNSSYGLCAGRVEIYHGGTWGTVCDDSWTIQEAEVVCRQLGCGRAVSALGNAYFGSGSGPITLDDVECSGTESTLWQCRNRGWFSHNCNHREDAGVICSGNHLSTPAPFLNITRPNTDYSCGGFLSQPSGDFSSPFYPGNYPNNAKCVWDIEVQNNYRVTVIFRDVQLEGGCNYDYIEVFDGPYRSSPLIARVCDGARGSFTSSSNFMSIRFISDHSITRRGFRAEYYSSPSNDSTNLLCLPNHMQASVSRSYLQSLGFSASDLVISTWNGYYECRPQITPNLVIFTIPYSGCGTFKQADNDTIDYSNFLTAAVSGGIIKRRTDLRIHVSCRMLQNTWVDTMYIANDTIHVANNTIQVEEVQYGNFDVNISFYTSSSFLYPVTSRPYYVDLNQDLYVQAEILHSDAVLTLFVDTCVASPYSNDFTSLTYDLIRSGCVRDDTYGPYSSPSLRIARFRFRAFHFLNRFPSVYLRCKMVVCRAYDPSSRCYRGCVLRSKRDVGSYQEKVDVVLGPIQLQTPPRREEEPR

SEQ ID NO: 5392 - protein, 324 aa, Homo sapiens
MFPSPALTPTPFSVKDILNLEQQQRSLAAAGELSARLEATLAPSSCMLAAFKPEAYAGPEAAAPGLPELRAELGRAPSPAKCASAFPAAPAFYPRAYSDPDPAKDPRAEKKELCALQKAVELEKTEADNAERPRARRRRKPRVLFSQAQVYELERRFKQQRYLSAPERDQLASVLKLTSTQVKIWFQNRRYKCKRQRQDQTLELVGLPPPPPPPARRIAVPVLVRDGKPCLGDSAPYAPAYGVGLNPYGYNAYPAYPGYGGAACSPGYSCTAAYPAGPSPAQPATAAANNNFVNFGVGDLNAVQSPGIPQSNSGVSTLHGIRAW

SEQ ID NO: 5393 - protein, 655 aa, Homo sapiens
MAMAKARKPREALLWALSDLEENDFKKLKFYLRDMTLSEGQPPLARGELEGLIPVDLAELLISKYGEKEAVKVVLKGLKVMNLLELVDQLSHICLHDYREVYREHVRCLEEWQEAGVNGRYNQVLLVAKPSSESPESLACPFPEQELESVTVEALFDSGEKPSLAPSLVVLQGSAGTGKTTLARKMVLDWATGTLYPGRFDYVFYVSCKEVVLLLESKLEQLLFWCCGDNQAPVTEILRQPERLLFILDGFDELQRPFEEKLKKRGLSPKESLLHLLIRRHTLPTCSLLITTRPLALRNLEPLLKQARHVHILGFSEEERARYFSSYFTDEKQADRAFDIVQKNDILYKACQVPGICWVVCSWLQGQMERGKVVLETPRNSTDIFMAYVSTFLPPDDDGGCSELSRHRVLRSLCSLAAEGIQHQRFLFEEAELRKHNLDGPRLAAFLSSNDYQLGLAIKKFYSFRHISFQDFFHAMSYLVKEDQSRLGKESRREVQRLLEVKEQEGNDEMTLTMQFLLDISKKDSFSNLELKFCFRISPCLAQDLKHFKEQMESMKHNRTWDLEFSLYEAKIKNLVKGIQMNNVSFKIKHSNEKKSQSQNLFSVKSSLSHGPKEEQKCPSVHGQKEGKDNIAGTQKEASTGKGRGTEETPKNTYI

SEQ ID NO: 5394 - protein, 470 aa, Homo sapiens
MKVTLSALDTSESSFTPLVVIELAQDVKEETKEWLKNRIIAKKKDGGAQLLFRPLLNKYEQETLENQNLYLVGASKIRMLLGAEAVGLVKECNDNTMRAFTYRTRQNFKGFDDNNDDFLTMAECQFIIKHELENLRAKDEKMIPGYPQAKLYPGKSLLRRLLTSGIVIQVFPLHDSEALKKLEDTWYTRFALKYQPIENHRLESAYQNHLILKVLVFNFLNCFASLFYIAFVLKDMKLLRQSLATLLITSQILNQIMESFLPYWLQRKHGVRVKRKVQALKADIDATLYEQVILEKEMGTYLGTFDDYLELFLQFGYVSLFSCVYPLAAAFAVLNNFTEVNSDALKMCRVFKRPFSEPSANIGVWQLAFETMSVISVVTNCALIGMSPQVNAVFPESKADLILIVVAVEHALLALKFILAFAIPDKPRHIQMKLARLEFESLEALKQQQMKLVTENLKEEPMESGKEKAT

SEQ ID NO: 5395 - protein, 396 aa, Homo sapiens
MEAERLRLLEEEAKLKKVARMGFNASSMLRKSQLGFLNVTSYSRLANELRVSCMERKKVQIRSLDPSSLASDRFNFILASTNSDQLFVVNQVEVEGSKYGIISLRTLKIPSFHVYVLRNLYVPNRKVKSLCWASLNQLDSHVLLCFEGITDAPSCAVLLPASRFLSVHTRVNQPGMLCSFQIPEAWSCAWSLNTRAYHCFSAGLSQQVLLTSVATGHQQSFDTSSDVLAQQFASTAPLLFNGCRSGEIFAIDLRCRNRGKGWRATRLFHDSAVTSVQILQEEQCLMASDMTGKIKLWDLRATKCVRQYEGHVNESAYLPLHVHEEEGIVVAVGQDCYTRIWSLHDAHLLRTIPSPYSASEDDIPSVAFASRLGGIRGAAPGLLMAVRQDLYCFPFS

SEQ ID NO: 5396 - protein, 962 aa, Homo sapiens
MDEQALLGLNPNADSDFRQRALAYFEQLKISPDAWQVCAEALAQRTYSDDHVKFFCFQVLEHQVKYKYSELTTVQQQLIRETLISWLQAQMLNPQPEKTFIRNKAAQVFALLFVTEYLTKWPKFFFDILSVVDLNPRGVDLYLRILMAIDSELVDRDVVHTSEEARRNTLIKDTMREQCIPNLVESWYQILQNYQFTNSEVTCQCLEVVGAYVSWIDLSLIANDRFINMLLGHMSIEVLREEACDCLFEVVNKGMDPVDKMKLVESLCQVLQSAGFFSIDQEEDVDFLARFSKLVNGMGQSLIVSWSKLIKNGDIKNAQEALQAIETKVALMLQLLIHEDDDISSNIIGFCYDYLHILKQLTVLSDQQKANVEAIMLAVMKKLTYDEEYNFENEGEDEAMFVEYRKQLKLLLDRLAQVSPELLLASVRRVFSSTLQNWQTTRFMEVEVAIRLLYMLAEALPVSHGAHFSGDVSKASALQDMMRTLVTSGVSSYQHTSVTLEFFETVVRYEKFFTVEPQHIPCVLMAFLDHRGLRHSSAKVRSRTAYLFSRFVKSLNKQMNPFIEDILNRIQDLLELSPPENGHQSLLSSDDQLFIYETAGVLIVNSEYPAERKQALMRNLLTPLMEKFKILLEKLMLAQDEERQASLADCLNHAVGFASRTSKAFSNKQTVKQCGCSEVYLDCLQTFLPALSCPLQKDILRSGVRTFLHRMIICLEEEVLPFIPSASEHMLKDCEAKDLQEFIPLINQITAKFKIQVSPFLQQMFMPLLHAIFEVLLRPAEENDQSAALEKQMLRRSYFAFLQTVTGSGMSEVIANQGAENVERVLVTVIQGAVEYPDPIAQKTCFIILSKLVELWGGKDGPVGFADFVYKHIVPACFLAPLKQTFDLADAQTVLALSECAVTLKTIHLKRGPECVQYLQQEYLPSLQVAPEIIQEFCQALQQPDAKVFKNYLKVFFQRAKP

SEQ ID NO: 5397 - protein, 520 aa, Homo sapiens
MAGPERWGPLLLCLLQAAPGRPRLAPPQNVTLLSQNFSVYLTWLPGLGNPQDVTYFVAYQSSPTRRRWREVEECAGTKELLCSMMCLKKQDLYNKFKGRVRTVSPSSKSPWVESEYLDYLFEVEPAPPVLVLTQTEEILSANATYQLPPCMPPLDLKYEVAFWKEGAGNKTLFPVTPHGQPVQITLQPAASEHHCLSARTIYTFSVPKYSKFSKPTCFLLEVPEANWAFLVLPSLLILLLVIAAGGVIWKTLMGNPWFQRAKMPRALDFSGHTHPVATFQPSRPESVNDLFLCPQKELTRGVRPTPRVRAPATQQTRWKKDLAEDEEEEDEEDTEDGVSFQPYIEPPSFLGQEHQAPGHSEAGGVDSGRPRAPLVPSEGSSAWDSSDRSWASTVDSSWDRAGSSGYLAEKGPGQGPGGDGHQESLPPPEFSKDSGFLEELPEDNLSSWATWGTLPPEPNLVPGGPPVSLQTLTFCWESSPEEEEEARESEIEDSDAGSWGAESTQRTEDRGRTLGHYMAR

SEQ ID NO: 5398 - protein, 409 aa, Homo sapiens
MWLTWPFCFLTITLREEGVCHLESVDLQQQIMTIIDELGKASAKAQNLSAPITSASRMQSNRHVVYILKDSSARPAGKGAIIGFIKVGYKKLFVLDDREAHNEVEPLCILDFYIHESVQRHGHGRELFQYMLQKERVEPHQLAIDRPSQKLLKFLNKHYNLETTVPQVNNFVIFEGFFAHQHRPPAPSLRATRHSRAAAVDPTPAAPARKLPPKRAEGDIKPYSSSDREFLKVAVEPPWPLNRAPRRATPPAHPPPRSSSLGNSPERGPLRPFVPEQELLRSLRLCPPHPTARLLLAADPGGSPAQRRRTRGTPPGLVAQSCCYSRHGGVNSSSPNTGNQDSKQGEQETKNRSASEEQALSQDGSGEKPMHTAPPQAPAPPAQSWTVGGDILNARFIRNLQERRSTRPW

SEQ ID NO: 5399 - protein, 930 aa, Homo sapiens
MTGLEDQEFDFEFLFEFNQRDEGAAAAAPEHYGYASSNVSPALPLPTAHSTLPAPCHNLQTSTPGIIPPADHPSGYGAALDGGPAGYFLSSGHTRPDGAPALESPRIEITSCLGLYHNNNQFFHDVEVEDVLPSSKRSPSTATLSLPSLEAYRDPSCLSPASSLSSRSCNSEASSYESNYSYPYASPQTSPWQSPCVSPKTTDPEEGFPRGLGACTLLGSPRHSPSTSPRASVTEESWLGARSSRPASPCNKRKYSLNGRQPPYSPHHSPTPSPHGSPRVSVTDDSWLGNTTQYTSSAIVAAINALTTDSSLDLGDGVPVKSRKTTLEQPPSVALKVEPVGEDLGSPPPPADFAPEDYSSFQHIRKGGFCDQYLAVPQHPYQWAKPKPLSPTSYMSPTLPALDWQLPSHSGPYELRIEVQPKSHHRAHYETEGSRGAVKASAGGHPIVQLHGYLENEPLMLQLFIGTADDRLLRPHAFYQVHRITGKTVSTTSHEAILSNTKVLEIPLLPENSMRAVIDCAGILKLRNSDIELRKGETDIGRKNTRVRLVFRVHVPQPSGRTLSLQVASNPIECSQRSAQELPLVEKQSTDSYPVVGGKKMVLSGHNFLQDSKVIFVEKAPDGHHVWEMEAKTDRDLCKPNSLVVEIPPFRNQRITSPVHVSFYVCNGKRKRSQYQRFTYLPANVPIIKTEPTDDYEPAPTCGPVSQGLSPLPRPYYSQQLAMPPDPSSCLVAGFPPCPQRSTLMPAAPGVSPKLHDLSPAAYTKGVASPGHCHLGLPQPAGEAPAVQDVPRPVATHPGSPGQPPPALLPQQVSAPPSSSCPPGLEHSLCPSSPSPPLPPATQEPTCLQPCSPACPPATGRPQHLPSTVRRDESPTAGPRLLPEVHEDGSPNLAPIPVTVKREPEELDQLYLDDVNEIIRNDLSSTSTHS

SEQ ID NO: 5400 - protein, 519 aa, Homo sapiens
MGHLENTSVVFPRAIFSLCEKETRKLTLCLFSRSSSAEHPGASKPPISSSSMTSRILLRQQLMREQMQEQERREQQQKLQAAQFMQQRVPVSQTPAINVSVPTTLPSATQVPMEVLKVQTHLENPTKYHIQQAQRQQVKQYLSTTLANKHANQVLSLPCPNQPGDHVMPPVPGSSAPNSPMAMLTLNSNCEKEGFYKFEEQNRAESECPGMNTHSRASCMQMDDVIDDIISLESSYNEEILGLMDPALQMANTLPVSGNLIDLYGNQGLPPPGLTISNSCPANLPNIKRELTESEARALAKERQKKDNHNLIERRRRFNINDRIKELGTLIPKSNDPDMRWNKGTILKASVDYIRKLQREQQRAKELENRQKKLEHANRHLLLRIQELEMQARAHGLSLIPSTGLCSPDLVNRIIKQEPVLENCSQDLLQHHADLTCTTTLDLTDGTITFNNNLGTGTEANQAYSVPTKMGSKLEDILMDDTLSPVGVTDPLLSSVSPGASKTSSRRSSMSMEETEHTC

SEQ ID NO: 5401 - protein, 372 aa, Homo sapiens [sequence omitted]

SEQ ID NO: 5402 - protein, 1133 aa, Homo sapiens
MRSRGSDTEGSAQKKFPRHTKGHSFQGPKNMKHRQQDKDSPSESDVILPCPKAEKPHSGNGHQAEDLSRDDLLFLLSILEGELQARDEVIGILKAEKMDLALLEAQYGFVTPKKVLEALQRDAFQAKSTPWQEDIYEKPMNELDKVVEKHKESYRRILGQLLVAEKSRRQTILELEEEKRKHKEYMEKSDEFICLLEQECERLKKLIDQEIKSQEEKEQEKEKRVTTLKEELTKLKSFALMVVDEQQRLTAQLTLQRQKIQELTTNAKETHTKLALAEARVQEEEQKATRLEKELQTQTTKFHQDQDTIMAKLTNEDSQNRQLQQKLAALSRQIDELEETNRSLRKAEEELQDIKEKISKGEYGNAGIMAEVEELRKRVLDMEGKDEELIKMEEQCRDLNKRLERETLQSKDFKLEVEKLSKRIMALEKLEDAFNKSKQECYSLKCNLEKERMTTKQLSQELESLKVRIKELEAIESRLEKTEFTLKEDLTKLKTLTVMFVDERKTMSEKLKKTEDKLQAASSQLQVEQNKVTTVTEKLIEETKRALKSKTDVEEKMYSVTKERDDLKNKLKAEEEKGNDLLSRVNMLKNRLQSLEAIEKDFLKNKLNQDSGKSTTALHQENNKIKELSQEVERLKLKLKDMKAIEDDLMKTEDEYETLERRYANERDKAQFLSKELEHVKMELAKYKLAEKTETSHEQWLFKRLQEEEAKSGHLSREVDALKEKIHEYMATEDLICHLQGDHSVLQKKLNQQENRNRDLGREIENLTKELERYRHFSKSLRPSLNGRRISDPQVFSKEVQTEAVDNEPPDYKSLIPLERAVINGQLYEESENQDEDPNDEGSVLSFKCSQSTPCPVNRKLWIPWMKSKEGHLQNGKMQTKPNANFVQPGDLVLSHTPGQPLHIKVTPDHVQNTATLEITSPTTESPHSYTSTAVIPNCGTPKQRITILQNASITPVKSKTSTEDLMNLEQGMSPITMATFARAQTPESCGSLTPERTMSPIQVLAVTGSASSPEQGRSPEPTEISAKHAIFRVSPDRQSSWQFQRSNSNSSSVITTEDNKIHIHLGSPYMQAVASPVRPASPSAPLQDNRTQGLINGALNKTTNKVTSSITITPTATPLPRQSQITVSNIYN

SEQ ID NO: 5403 - protein, 525 aa, Homo sapiens
MECCRRATPGTLLLFLAFLLLSSRTARSEEDRDGLWDAWGPWSECSRTCGGGASYSLRRCLSSKSCEGRNIRYRTCSNVDCPPEAGDFRAQQCSAHNDVKHHGQFYEWLPVSNDPDNPCSLKCQAKGTTLVVELAPKVLDGTRCYTESLDMCISGLCQIVGCDHQLGSTVKEDNCGVCNGDGSTCRLVRGQYKSQLSATKSDDTVVAIPYGSRHIRLVLKGPDHLYLETKTLQGTKGENSLSSTGTFLVDNSSVDFQKFPDKEILRMAGPLTADFIVKIRNSGSADSTVQFIFYQPIIHRWRETDFFPCSATCGGGYQLTSAECYDLRSNRVVADQYCHYYPENIKPKPKLQECNLDPCPASDGYKQIMPYDLYHPLPRWEATPWTACSSSCGGGIQSRAVSCVEEDIQGHVTSVEEWKCMYTPKMPIAQPCNIFDCPKWLAQEWSPCTVTCGQGLRYRVVLCIDHRGMHTGGCSPKTKPHIKEECIVPTPCYKPKEKLPVEAKLPWFKQAQELEEGAAVSEEPS

SEQ ID NO: 5404 - protein, 1019 aa, Homo sapiens
MSALCDPPGAPGPPGPAPATHGPAPLSAQELSQEIKAFLTGVDPILGHQLSAREHARCGLLLLRSLPPARAAVLDHLRGVFDESVRAHLAALDETPVAGPPHLRPPPPSHVPAGGPGLEDVVQEVQQVLSEFIRANPKAWAPVISAWSIDLMGQLSSTYSGQHQRVPHATGALNELLQLWMGCRATRTLMDIYVQCLSALIGSCPDACVDALLDTSVQHSPHFDWVVAHIGSSFPGTIISRVLSCGLKDFCVHGGAGGGAGSSGGSSSQTPSTDPFPGSPAIPAEKRVPKIASVVGILGHLASRHGDSIRRELLRMFHDSLAGGSGGRSGDPSLQATVPFLLQLAVMSPALLGTVSGELVDCLKPPAVLSQLQQHLQGFPREELDNMLNLAVHLVSQASGAGAYRLLQFLVDTAMPASVITTQGLAVPDTVREACDRLIQLLLLHLQKLVHHRGGSPGEGVLGPPPPPRLVPFLDALKNHVGELCGETLRLERKRFLWQHQLLGLLSVYTRPSCGPEALGHLLSRARSPEELSLATQLYAGLVVSLSGLLPLAFRSCLARVHAGTLQPPFTARFLRNLALLVGWEQQGGEGPAALGAHFGESASAHLSDLAPLLLHPEEEVAEAAASLLAICPFPSEALSPSQLLGLVRAGVHRFFASLRLHGPPGVASACQLLTRLSQTSPAGLKAVLQLLVEGALHRGNTELFGGQVDGDNETLSVVSASLASASLLDTNRRHTAAVPGPGGIWSVFHAGVIGRGLKPPKFVQSRNQQEVIYNTQSLLSLLVHCCSAPGGTECGECWGAPILSPEAAKAVAVTLVESVCPDAAGAELAWPPEEHARATVERDLRIGRRFREQPLLFELLKLVAAAPPALCYCSVLLRGLLAALLGHWEASRHPDTTHSPWHLEASCTLVAVMAEGSLLPPALGNMHEVFSQLAPFEVRLLLLSVWGFLREHGPLPQKFIFQSERGRFIRDFSREGGGEGGPHLAVLHSVLHRNIDRLGLFSGRFQAPSPSTLLRQGT

SEQ ID NO: 5405 - protein, 378 aa, Homo sapiens
MVLLWLTLLLIALPCLLQTKEDPNPPITNLRMKAKAQQLTWDLNRNVTDIECVKDADYSMPAVNNSYCQFGAISLCEVTNYTVRVANPPFSTWILFPENSGKPWAGAENLTCWIHDVDFLSCSWAVGPGAPADVQYDLYLNVANRRQQYECLHYKTDAQGTRIGCRFDDISRLSSGSQSSHILVRGRSAAFGIPCTDKFVVFSQIEILTPPNMTAKCNKTHSFMHWKMRSHFNRKFRYELQIQKRMQPVITEQVRDRTSFQLLNPGTYTVQIRARERVYEFLSAWSTPQRFECDQEEGANTRAWRTSLLIALGTLLALVCVFVICRRYLVMQRLFPRIPHMKDPIGDSFQNDKLVVWEAGKAGLEECLVTEVQVVQKT

SEQ ID NO: 5406 - protein, 579 aa, Homo sapiens
MRPWLRHLVLQALRNSRAFCGSHGKPAPLPVPQKIVATWEAISLGRQLVPEYFNFAHDVLDVWSRLEEAGHRPPNPAFWWVNGTGAEIKWSFEELGKQSRKAANVLGGACGLQPGDRMMLVLPRLPEWWLVSVACMRTGTVMIPGVTQLTEKDLKYRLQASRAKSIITSDSLAPRVDAISAECPSLQTKLLVSDSSRPGWLNFRELLREASTEHNCMRTKSRDPLAIYFTSGTTGAPKMVEHSQSSYGLGFVASGRRWVALTESDIFWNTTDTGWVKAAWTLFSAWPNGSCIFVHELPRVDAKVILNTLSKFPITTLCCVPTIFRLLVQEDLTRYQFQSLRHCLTGGEALNPDVREKWKHQTGVELYEGYGQSETVVICANPKGMKIKSGSMGKASPPYDVQIVDDEGNVLPPGEEGNVAVRIRPTRPFCFFNCYLDNPEKTAASEQGDFYITGDRARMDKDGYFWFMGRNDDVINSSSYRIGPVEVESALAEHPAVLESAVVSSPDPIRGEVVKAFIVLTPAYSSHDPEALTRELQEHVKRVTAPYKYPRKVAFVSELPKTVSGKIQRSKLRSQEWGK

SEQ ID NO: 5407 - protein, 672 aa, Homo sapiens
MEEHTEAGSAPEMGAQKALIDNPADILVIAAYFLLVIGVGLWSMCRTNRGTVGGYFLAGRSMVWWPVGASLFASNIGSGHFVGLAGTGAASGLAVAGFEWNALFVVLLLGWLFAPVYLTAGVITMPQYLRKRFGGRRIRLYLSVLSLFLYIFTKISVDMFSGAVFIQQALGWNIYASVIALLGITMIYTVTGGLAALMYTDTVQTFVILGGACILMGYAFHEVGGYSGLFDKYLGAATSLTVSEDPAVGNISSFCYRPRPDSYHLLRHPVTGDLPWPALLLGLTIVSGWYWCSDQVIVQRCLAGKSLTHIKAGCILCGYLKLTPMFLMVMPGMISRILYPDEVACVVPEVCRRVCGTEVGCSNIAYPRLVVKLMPNGLRGLMLAVMLAALMSSLASIFNSSSTLFTMDIYTRLRPRAGDRELLLVGRLWVVFIVVVSVAWLPVVQAAQGGQLFDYIQAVSSYLAPPVSAVFVLALFVPRVNEQGAFWGLIGGLLMGLARLIPEFSFGSGSCVQPSACPAFLCGVHYLYFAIVLFFCSGLLTLTVSLCTAPIPRKHLHRLVFSLRHSKEEREDLDADEQQGSSLPVQNGCPESAMEMNEPQAPAPSLFRQCLLWFCGMSRGGVGSPPPLTQEEAAAAARRLEDISEDPSWARVVNLNALLMMAVAVFLWGFYA

SEQ ID NO: 5408 - protein, 401 aa, Homo sapiens
MVLAQSRVSAGVGSPHCSGSGGGGSDSFPWPASHPGNPQCSFSTAFLASPRLSRGTLAYLPPAPWSSLATPSALLGSSCAPPPPPARCPQPRALSPELGTKAGPRRPHRWELPRSPSQGAQGPAPRRRLLETMKGIVAASGSETEDEDSMDIPLDLSSSAGSGKRRRRGNLPKESVQILRDWLYEHRYNAYPSEQEKALLSQQTHLSTLQVCNWFINARRRLLPDMLRKDGKDPNQFTISRRGAKISETSSVESVMGIKNFMPALEETPFHSCTAGPNPTLGRPLSPKPSSPGSVLARPSVICHTTVTALKDVPFSLCQSVGVGQNTDIQQIAAKNFTDTSLMYPEDTCKSGPSTNTQSGLFNTPPPTPPDLNQDFSGFQLLVDVALKRAAEMELQAKLTA

SEQ ID NO: 5409 - protein, 839 aa, Homo sapiens
MSIRRLLILILKIGRRWTELIRTMESRVLLRTFCLIFGLGAVWGLGVDPSLQIDVLTELELGESTTGVRQVPGLHNGTKAFLFQDTPRSIKASTATAEQFFQKLRNKHEFTILVTLKQTHLNSGVILSIHHLDHRYLELESSGHRNEVRLHYRSGSHRPHTEVFPYILADDKWHKLSLAISASHLILHIDCNKIYERVVEKPSTDLPLGTTFWLGQRNNAHGYFKGIMQDVQLLVMPQGFIAQCPDLNRTCPTCNDFHGLVQKIMELQDILAKTSAKLSRAEQRMNRLDQCYCERTCTMKGTTYREFESWIDGCKNCTCLNGTIQCETLICPNPDCPLKSALAYVDGKCCKECKSICQFQGRTYFEGERNTVYSSSGVCVLYECKDQTMKLVESSGCPALDCPESHQITLSHSCCKVCKGYDFCSERHNCMENSICRNLNDRAVCSCRDGFRALREDNAYCEDIDECAEGRHYCRENTMCVNTPGSFMCICKTGYIRIDDYSCTEHDECITNQHNCDENALCFNTVGGHNCVCKPGYTGNGTTCKAFCKDGCRNGGACIAANVCACPQGFTGPSCETDIDECSDGFVQCDSRANCINLPGWYHCECRDGYHDNGMFSPSGESCEDIDECGTGRHSCANDTICFNLDGGYDCRCPHGKNCTGDCIHDGKVKHNGQIWVLENDRCSVCSCQNGFVMCRRMVCDCENPTVDLFCCPECDPRLSSQCLHQNGETLYNSGDTWVQNCQQCRCLQGEVDCWPLPCPDVECEFSILPENECCPRCVTDPCQADTIRNDITKTCLDEMNVVRFTGSSWIKHGTECTLCQCKNGHICCSVDPQCLQEL

SEQ ID NO: 5410 - protein, 543 aa, Homo sapiens
MESSKKMDSPGALQTNPPLKLHTDRSAGTPVFVPEQGGYKEKFVKTVEDKYKCEKCHLVLCSPKQTECGHRFCESCMAALLSSSSPKCTACQESIVKDKVFKDNCCKREILALQIYCRNESRGCAEQLMLGHLLVHLKNDCHFEELPCVRPDCKEKVLRKDLRDHVEKACKYREATCSHCKSQVPMIALQKHEDTDCPCVVVSCPHKCSVQTLLRSEGTNQQIKAHEASSAVQHVNLLKEWSNSLEKKVSLLQNESVEKNKSIQSLHNQICSFEIEIERQKEMLRNNESKILHLQRVIDSQAEKLKELDKEIRPFRQNWEEADSMKSSVESLQNRVTELESVDKSAGQVARNTGLLESQLSRHDQMLSVHDIRLADMDLRFQVLETASYNGVLIWKIRDYKRRKQEAVMGKTLSLYSQPFYTGYFGYKMCARVYLNGDGMGKGTHLSLFFVIMRGEYDALLPWPFKQKVTLMLMDQGSSRRHLGDAFKPDPNSSSFKKPTGEMNIASGCPVFVAQTVLENGTYIKDDTIFIKVIVDTSDLPDP

SEQ ID NO: 5411 - protein, 638 aa, Homo sapiens
MLDFFTIFSKGGLVLWCFQGVSDSCTGPVNALIRSVLLQERGGNNSFTHEALTLKYKLDNQFELVFVVGFQKILTLTYVDKLIDDVHRLFRDKYRTEIQQQSALSLLNGTFDFQNDFLRLLREAEESSKIRAPTTMKKFEDSEKAKKPVRSMIETRGEKPKEKAKNSKKKGAKKEGSDGPLATSKPVPAEKSGLPVGPENGVELSKEELIRRKREEFIQKHGRGMEKSNKSTKSDAPKEKGKKAPRVWELGGCANKEVLDYSTPTTNGTPEAALSEDINLIRGTGSGGQLQDLDCSSSDDEGAAQNSTKPSATKGTLGGMFGMLKGLVGSKSLSREDMESVLDKMRDHLIAKNVAADIAVQLCESVANKLEGKVMGTFSTVTSTVKQALQESLVQILQPQRRVDMLRDIMDAQRRQRPYVVTFCGVNGVGKSTNLAKISFWLLENGFSVLIAACDTFRAGAVEQLRTHTRRLSALHPPEKHGGRTMVQLFEKGYGKDAAGIAMEAIAFARNQGFDVVLVDTAGRMQDNAPLMTALAKLITVNTPDLVLFVGEALVGNEAVDQLVKFNRALADHSMAQTPRLIDGIVLTKFDTIDDKVGAAISMTYITSKPIVFVGTGQTYCDLRSLNAKAVVAALMKA

SEQ ID NO: 5412 - protein, 252 aa, Homo sapiens
MLHQSGKFLIPDIKEEEKSYQVIRWFSPEDHQKRIKKHFDSYIETALDGRKESEALVKLMEIFGTQCSYLLSRKDIMDSLKNENYDLVFVEAFDFCSFLIAEKLVKPFVAILPTTFGSLDFGLPSPLSYVPVFPSLLTDHMDFWGRVKNFLMFFSFSRSQWDMQSTFDNTIKEHFPEGSRPVLSHLLLKAELWFVNSDFAFDFARPLLPNTVYIGGLMEKPIKPVPQNGQPALFTTPSLFSSGVYPEPLRWL

SEQ ID NO: 5413 - protein, 501 aa, Homo sapiens
MENQLWHNTVRCCNQYQESPHDAEDILLLLLGLIVLVNIGINVATMMWHGLQNALDKMIDWATQKNEIQASESPPSGPPDKAQDVHIHCILDPVQVKMSRPTQYSSFSCHHFSNHHSSSLLRCVRRRRRRHRRCRRRCCNHQQRPQNYRQIPHSHSVFRNPHRSQKMSQLHRVPFFDQEDPDSYLEEEDNLPFPYPKYPRRGWGGFYQRAGLPSNVGLWGHQGGILASLPPPSLYLSPELRCMPKRVEARSELRLQSYGRHGSQSRLWGNVEAEQWASSPPPPHRLPPNPSWVPVGHSPYPSVGWMLYDSWDQRRRGTEGFERPPASVSRNARPEAQGCREHHSPQSHQQSLLGHAYGQSHRSPHPSTEPLGYSSQDPREVRRRAADWAEALPAWRPLTTSASLTVLDEASHQRTPAPSSVLVPHSSQPWPKVQAADPAPPPTMFVPLSRNPGGNANYQVYDSLELKRQVQKSRARSSSLPPASTSTLRPSLHRSQTEKLN

SEQ ID NO: 5414 - protein, 1173 aa, Homo sapiens
MAVETLSPDWEFDRVDDGSQKIHAEVQLKNYGKFLEEYTSQLRRIEDALDDSIGDVWDFNLDPIALKLLPYEQSSLLELIKTENKVLNKVITVYAALCCEIKKLKYEAETKFYNGLLFYGEGATDASMVEGDCQIQMGRFISFLQELSCFVTRCYEVVMNVVHQLAALYISNKIAPKIIETTGVHFQTMYEHLGELLTVLLTLDEIIDNHITLKDHWTMYKRLLKSVHHNPSKFGIQEEKLKPFEKFLLKLEGQLLDGMIFQACIEQQFDSLNGGVSVSKNSTFAEEFAHSIRSIFANVEAKLGEPSEIDQRDKYVGICGLFVLHFQIFRTIDKKFYKSLLDICKKVPAITLTANIIWFPDNFLIQKIPAAAKLLDRKSLQAIKIHRDTFLQQKAQSLTKDVQSYYVFVSSWMMKMESILSKEQRMDKFAEDLTNRCNVFIQGFLYAYSISTIIKTTMNLYMSMQKPMTKTSVKALCRLVELLKAIEHMFYRRSMVVADSVSHITQHLQHQALHSISVAKKRVISDKKYSEQRLDVLSALVLAENTLNGPSTKQRRLIVSLALSVGTQMKTFKDEELFPLQVVMKKLDLISELRERVQTQCDCCFLYWHRAVFPIYLDDVYENAVDAARLHYMFSALRDCVPAMMHARHLESYEILLDCYDKEIMEILNEHLLDKLCKEIEKDLRLSVHTHLKLDDRNPFKVGMKDLALFFSLNPIRFFNRFIDIRAYVTHYLDKTFYNLTTVALHDWATYSEMRNLATQRYGLVMTEAHLPSQTLEQGLDVLEIMRNIHIFVSRYLYNLNNQIFIERTSNNKHLNTINIRHIANSIRTHGTGIMNTTVNFTYQFLKKKFYIFSQFMYDEHIKSRLIKDIRFFREIKDQNDHKYPFDRAEKFNRGIRKLGVTPEGQSYLDQFRQLISQIGNAMGYVRMIRSGGLHCSSNAIRFVPDLEDIVNFEELVKEEGLAEETLKAARHLDSVLSDHTRNSAEGTEYFKMLVDVFAPEFRRPKNIHLRNFYIIVPPLTLNFVEHSISCKEKLNKKNKIGAAFTDDGFAMGVAYILKLLDQYREFDSLHWFQSVREKYLKEIRAVAKQQNVQSASQDEKLLQTMNLTQKRLDVYLQEFELLYFSLSSARIFFRADKTAAEENQEKKEKEEETKTSNGDLSDSTVSADPVVK

SEQ ID NO: 5415 - protein, 330 aa, Homo sapiens
MAFLPSWVCVLVGSFSASLAGTSNLSETEPPLWKESPGQLSDYRVENSMYIINPWVYLERMGMYKIILNQTARYFAKFAPDNEQNILWGLPLQYGWQYRTGRLADPTRRTNCGYESGDHMCISVDSWWADLNYFLSSLPFLAAVDSGVMGISSDQVRLLPPPKNERKFCYDVSSCRSSFPETMNKWNTFYQYLQSPFSKFDDLLKYLWAAHTSTLADNIKSFEDRYDYYSKAEAHFERSWVLAVDHLAAVLFPTTLIRSYKFQKGMPPRILLNTDVAPFISDFTAFQNVVLVLLNMLDNVDKSIGYLCTEKSNVYRDHSESSSRSYGNNS

SEQ ID NO: 5416 - protein, 340 aa, Homo sapiens
MATGGYRTSSGLGGSTTDFLEEWKAKREKMRAKQNPPGPAPPGGGSSDAAGKPPAGALGTPAAAAANELNNNLPGGAPAAPAVPGPGGVNCAVGSAMLTRAAPGPRRSEDEPPAASASAAPPPQRDEEEPDGVPEKGKSSGPSARKGKGQIEKRKLREKRRSTGVVNIPAAECLDEYEDDEAGQKERKREDAITQQNTIQNEAVNLLDPGSSYLLQEPPRTVSGRYKSTTSVSEEDVSSRYSRTDRSGFPRYNRDANVSGTLVSSSTLEKKIEDLEKEVVRERQENLRLVRLMQDKEEMIGKLKEEIDLLNRDLDDIEDENEQLKQENKTLLKVVGQLTR

SEQ ID NO: 5417 - protein, 578 aa, Homo sapiens
MPLPASAPAEATPMPSSEAQETEAAPEKENRVDVGAEERAAATRPRQKSWLVRHFSLLLRRDRQAQKAGQLFSGLLALNVVFLGGAFICSMIFNKVAVTLGDVWILLATLKVLSLLWLLYYVASTTRRPHAVLYQDPHAGPLWVRGSLVLFGSCTFCLNIFRVGYDVSHIRCKSQLDLVFSVIEMVFIGVQTWVLWKHCKDCVRVQTNFTRCGLMLTLATNLLLWVLAVTNDSMHREIEAELGILMEKSTGNETNTCLCLNATACEAFRRGFLMLYPFSTEYCLICCAVLFVMWKNVGRHVAPHMGAHPATAPFHLHGAIFGPLLGLLVLLAGVCVFVLFQIEASGPAIACQYFTLYYAFYVAVLPTMSLACLAGTAIHGLEERELDTVKNPTRSLDVVLLMGAALGQMGIAYFSIVAIVAKRPHELLNRLILAYSLLLILQHIAQNLFIIEGLHRRPLWETVPEGLAGKQEAEPPRRGSLLELGQGLQRASLAYIHSYSHLNWKRRALKEISLFLILCNITLWMMPAFGIHPEFENGLEKDFYGYQIWFAIVNFGLPLGVFYRMHSVGGLVEVYLGA

SEQ ID NO: 5418 - protein, 985 aa, Homo sapiens
MDRRSMGETESGDAFLDLKKPPASKCPHRYTKEELLDIKELPHSKQRPSCLSEKYDSDGVWDPEKWHASLYPASGRSSPVESLKKELDTDRPSLVRRIVDPRERVKEDDLDVVLSPQRRSFGGGCHVTAAVSSRRSGSPLEKDSDGLRLLGGRRIGSGRIISARTFEKDHRLSDKDLRDLRDRDRERDFKDKRFRREFGDSKRVFGERRRNDSYTEEEPEWFSAGPTSQSETIELTGFDDKILEEDHKGRKRTRRRTASVKEGIVECNGGVAEEDEVEVILAQEPAADQEVPRDAVLPEQSPGDFDFNEFFNLDKVPCLASMIEDVLGEGSVSASRFSRWFSNPSRSGSRSSSLGSTPHEELERLAGLEQAILSPGQNSGNYFAPIPLEDHAENKVDILEMLQKAKVDLKPLLSSLSANKEKLKESSHSGVVLSVEEVEAGLKGLKVDQQVKNSTPFMAEHLEETLSAVTNNRQLKKDGDMTAFNKLVSTMKASGTLPSQPKVSRNLESHLMSPAEIPGQPVPKNILQELLGQPVQRPASSNLLSGLMGSLEPTTSLLGQRAPSPPLSQVFQTRAASADYLRPRIPSPIGFTPGPQQLLGDPFQGMRKPMSPITAQMSQLELQQAALEGLALPHDLAVQAANFYQPGFGKPQVDRTRDGFRNRQQRVTKSPAPVHRGNSSSPAPAASITSMLSPSFTPTSVIRKMYESKEKSKEEPASGKAALGDSKEDTQKASEENLLSSSSVPSADRDSSPTTNSKLSALQRSSCSTPLSQANRYTKEQDYRPKATGRKTPTLASPVPTTPFLRPVHQVPLVPHVPMVRPAHQLHPGLVQRMLAQGVHPQHLPSLLQTGVLPPGMDLSHLQGISGPILGQPFYPLPAASHPLLNPRPGTPLHLAMVQQQLQRSVLHPPGSGSHAAAVSVQTTPQNVPSRSGLPHMHSQLEHRPSQRSSSPVGLAKWFGSDVLQQPLPSMPAKVISVDELEYRQ

SEQ ID NO: 5419 - protein, 1114 aa, Homo sapiens
MLSCLKEEMPPQELTRRLATVITHVDEIMQQEVRPLMAVEIIEQLHRQFAILSGGRGEDGAPIITFPEFSGFKHIPDEDFLNVMTYLTSIPSVEAASIGFIVVIDRRRDKWSSVKASLTRIAVAFPGNLQLIFILRPSRFIQRTFTDIGIKYYRNEFKTKVPIIMVNSVSDLHGYIDKSQLTRELGGTLEYRHGQWVNHRTAIENFALTLKTTAQMLQTFGSCLATAELPRSMLSTEDLLMSHTRQRDKLQDELKLLGKQGTTLLSCIQEPATKCPNSKLNLNQLENVTTMERLLVQLDETEKAFSHFWSEHHLKLNQCLQLQHFEHDFCKAKLALDNLLEEQAEFTGIGDSVMHVEQILKEHKKLEEKSQEPLEKAQLLALVGDQLIQSHHYAADAIRPRCVELRHLCDDFINGNKKKWDILGKSLEFHRQLDKVSQWCEAGIYLLASQAVDKCQSREGVDIALNDIATFLGTVKEYPLLSPKEFYNEFELLLTLDAKAKAQKVLQRLDDVQEIFHKRQVSLMKLAAKQTRPVQPVAPHPESSPKWVSSKTSQPSTSVPLARPLRTSEEPYTETELNSRGKEDDETKFEVKSEEIFESHHERGNPELEQQARLGDLSPRRRIIRDLLETEEIYIKEIKSIIDGYITPMDFIWLKHLIPDVLQNNKDFLFGNIRELYEFHNRTFLKELEKCAENPELLAHCFLKRKEDLQIYFKYHKNLPRARAIWQECQDCAYFGVCQRQLDHNLPLFKYLKGPSQRLIKYQMLLKGLLDFESPEDMEIDPGELGGSAKDGPKRTKDSAFSTELQQALAVIEDLIKSCELAVDLAAVTECPDDIGKLGKLLLHGPFSVWTIHKDRYKMKDLIRFKPSQRQIYLFERGIVFCKIRMEPGDQGLSPHYSFKKTMKLMTLSIRQLGRGSHRKFEIASRNGLEKYILQAASKEIRDCWFSEISKLLMEQQNNIKDQGNPQFEMSTSKGSGAGSGPWIKNMERATTSKEDPASSTGGIKGCSSREFSSMDTFEDCEGAEDMEKESSALSLAGLFQSDDSHETCSSKSAFLERGESSQGEKEERDEEETATRSTEEERAGASTGRLAPAGATAGFQARALRPRTSAQES

SEQ ID NO: 5420 - protein, 433 aa, Homo sapiens
MTAASRANPYSIVSSEEDGLHLVTMSGANGFGNGKVHTRRRCRNRFVKKNGQCNIEFANMDEKSQRYLADMFTTCVDIRWRYMLLIFSLAFLASWLLFGIIFWVIAVAHGDLEPAEGRGRTPCVMQVHGFMAAFLFSIETQTTIGYGLRCVTEECPVAVFMVVAQSIVGCIIDSFMIGAIMAKMARPKKRAQTLLFSHNAVVALRDGKLCLMWRVGNLRKSHIVEAHVRAQLIKPRVTEEGEYIPLDQIDIDVGFDKGLDRIFLVSPITILHEIDEASPLFGISRQDLETDDFEIVVILEGMVEATAMTTQARSSYLANEILWGHRFEPVLFEEKNQYKIDYSHFHKTYEVPSTPRCSAKDLVENKFLLPSANSFCYENELAFLSRDEEDEADGDQDGRSRDGLSPQARHDFDRLQAGGGVLEQRPYRRESEI

SEQ ID NO: 5421 - protein, 1035 aa, Homo sapiens
TSSRRPLLSSPSWGGPEPEGRAGGGIPGSSSPHPGTGSRRLKVAPPPPAPKPCKTVTTSGAKAGGGKGAGSRLSWPESEGKPRVKGSKSSAGTGASVSAAATAAAAGGGGSTASTSGGVGAGAGARGKLSPRKGKSKTLDNSDLHPGPPAGSPPPLTLPPTPSPATAVTAASAQPPGPAPPITLEPPAPGLKRGREGGRASTRDRKMLKFISGIFTKSTGGPPGSGPLPGPPSLSSGSGSRELLGAELRASPKAVINSQEWTLSRSIPELRLGVLGDARSGKSSLIHRFLTGSYQVLEKTESEQYKKEMLVDGQTHLVLIREEAGAPDAKFSGWADAVIFVFSLEDENSFQAVSRLHGQLSSLRGEGRGGLALALVGTQDRISASSPRVVGDARARALCADMKRCSYYETCATYGLNVDRVFQEVAQKVVTLRKQQQLLAACKSLPSSPSHSAASTPVAGQASNGGHTSDYSSSLPSSPNVGHRELRAEAAAVAGLSTPGSLHRAAKRRTSLFANRRGSDSEKRSLDSRGETTGSGRAIPIKQSFLLKRSGNSLNKEWKKKYVTLSSNGFLLYHPSINDYIHSTHGKEMDLLRTTVKVPGKRPPRAISAFGPSASINGLVKDMSTVQMGEGLEATTPMPSPSPSPSSLQPPPDQTSKHLLKPDRNLARALSTDCTPSGDLSPLSREPPPSPMVKKQRRKKLTTPSKTEGSAGQAEEENFEFLIVSSTGQTWHFEAASFEERDAWVQAIESQILASLQCCESSKVKLRTDSQSEAVAIQAIRNAKGNSICVDCGAPNPTWASLNLGALICIECSGIHRNLGTHLSRVRSLDLDDWPRELTLVLTAIGNDTANRVWESDTRGRAKPSRDSSREERESWIRAKYEQLLFLAPLSTSEEPLGRQLWAAVQAQDVATVLLLLAHARHGPLDTSVEDPQLRSPLHLAAELAHVVITQLLLWYGADVAARDAQGRTALFYARQAGSQLCADILLQHGCPGEGGSAATTPSAATTPSITATPSPRRRSSAASVGRADAPVALV

SEQ ID NO: 5422 - protein, 1238 aa, Homo sapiens
MRAQGRGRLPRRLLLLLALWVQAARPMGYFELQLSALRNVNGELLSGACCDGDGRTTRAGGCGHDECDTYVRVCLKEYQAKVTPTGPCSYGHGATPVLGGNSFYLPPAGAAGDRARARARAGGDQDPGLVVIPFQFAWPRSFTLIVEAWDWDNDTTPNEELLIERVSHAGMINPEDRWKSLHFSGHVAHLELQIRVRCDENYYSATCNKFCRPRNDFFGHYTCDQYGNKACMDGWMGKECKEAVCKQGCNLLHGGCTVPGECRCSYGWQGRFCDECVPYPGCVHGSCVEPWQCNCETNWGGLLCDKDLNYCGSHHPCTNGGTCINAEPDQYRCTCPDGYSGRNCEKAEHACTSNPCANGGSCHEVPSGFECHCPSGWSGPTCALDIDECASNPCAAGGTCVDQVDGFECICPEQWVGATCQLDANECEGKPCLNAFSCKNLIGGYYCDCIPGWKGINCHINVNDCRGQCQHGGTCKDLVNGYQCVCPRGFGGRHCELERDECASSPCHSGGLCEDLADGFHCHCPQGFSGPLCEVDVDLCEPSPCRNGARCYNLEGDYYCACPDDFGGKNCSVPREPCPGGACRVIDGCGSDAGPGMPGTAASGVCGPHGRCVSQPGGNFSCICDSGFTGTYCHENIDDCLGQPCRNGGTCIDEVDAFRCFCPSGWEGELCDTNPNDCLPDPCHSRGRCYDLVNDFYCACDDGWKGKTCHSREFQCDAYTCSNGGTCYDSGDTFRCACPPGWKGSTCAVAKNSSCLPNPCVNGGTCVGSGASFSCICRDGWEGRTCTHNTNDCNPLPCYNGGICVDGVNWFRCECAPGFAGPDCRINIDECQSSPCAYGATCVDEINGYRCSCPPGRAGPRCQEVIGFGRSCWSRGTPFPHGSSWVEDCNSCRCLDGRRDCSKVWCGWKPCLLAGQPEALSAQCPLGQRCLEKAPGQCLRPPCEAWGECGAEEPPSTPCLPRSGHLDNNCARLTLHFNRDHVPQGTTVGAICSGIRSLPATRAVARDRLLVLLCDRASSGASAVEVAVSFSPARDLPDSSLIQGAAHAIVAAITQRGNSSLLLAVTEVKVETVVTGGSSTGLLVPVLCGAFSVLWLACVVLCVWWTRKRRKERERSRLPREESANNQWAPLNPIRNPIERPGGHKDVLYQCKNFTPPPRRADEALPGPAGHAAVREDEEDEDLGRGEEDSLEAEKFLSHKFTKDPGRSPGRPAHWASGPKVDNRAVRSINEARYAGKE

SEQ ID NO: 5423 - protein, 688 aa, Homo sapiens
MWCIVLFSLLAWVYAEPTMYGEILSPNYPQAYPSEVEKSWDIEVPEGYGIHLYFTHLDIELSENCAYDSVQIISGDTEEGRLCGQRSSNNPHSPIVEEFQVPYNKLQVIFKSDFSNEERFTGFAAYYVATDINECTDFVDVPCSHFCNNFIGGYFCSCPPEYFLHDDMKNCGVNCSGDVFTALIGEIASPNYPKPYPENSRCEYQIRLEKGFQVVVTLRREDFDVEAADSAGNCLDSLVFVAGDRQFGPYCGHGFPGPLNIETKSNALDIIFQTDLTGQKKGWKLRYHGDPMPCPKEDTPNSVWEPAKAKYVFRDVVQITCLDGFEVVEGRVGATSFYSTCQSNGKWSNSKLKCQPVDCGIPESIENGKVEDPESTLFGSVIRYTCEEPYYYMENGGGGEYHCAGNGSWVNEVLGPELPKCVPVCGVPREPFEEKQRIIGGSDADIKNFPWQVFFDNPWAGGALINEYWVLTAAHVVEGNREPTMYVGSTSVQTSRLAKSKMLTPEHVFIHPGWKLLEVPEGRTNFDNDIALVRLKDPVKMGPTVSPICLPGTSSDYNLMDGDLGLISGWGRTEKRDRAVRLKAARLPVAPLRKCKEVKVEKPTADAEAYVFTPNMICAGGEKGMDSCKGDSGGAFAVQDPNDKTKFYAAGLVSWGPQCGTYGLYTRVKNYVDWIMKTMQENSTPRED

SEQ ID NO: 5424 - protein, 400 aa, Homo sapiens
MSKVSTMFSEDDFQSTERAPYGPQLQWSQDLPRVQVFREQANLEDRSPRRTQRITGGEQVLWGPITQIFPTVRPADLTRVIMPLEQRSQHCKPEEGLQAQEEDLGLVGAQALQAEEQEAAFFSSTLNVGTLEELPAAESPSPPQSPQEESFSPTAMDAIFGSLSDEGSGSQEKEGPSTSPDLIDPESFSQDILHDKIIDLVHLLLRKYRVKGLITKAEMLGSVIKNYEDYFPEIFREASVCMQLLFGIDVKEVDPTSHSYVLVTSLNLSYDGIQCNEQSMPKSGLLIIVLGVIFMEGNCIPEEVMWEVLSIMGVYAGREHFLFGEPKRLLTQNWVQEKYLVYRQVPGTDPACYEFLWGPRAHAETSKMKVLEYIANANGRDPTSYPSLYEDALREEGEGV

SEQ ID NO: 5425 - protein, 469 aa, Homo sapiens
MPIRALCTICSDFFDHSRDVAAIHCGHTFHLQCLIQWFETAPSRTCPQCRIQVGKRTIINKLFFDLAQEEENVLDAEFLKNELDNVRAQLSQKDKEKRDSQVIIDTLRDTLEERNATVVSLQQALGKAEMLCSTLKKQMKYLEQQQDETKQAQEEARRLRSKMKTMEQIELLLQSQRPEVEEMIRDMGVGQSAVEQLAVYCVSLKKEYENLKEARKASGEVADKLRKDLFSSRSKLQTVYSELDQAKLELKSAQKDLQSADKEIMSLKKKLTMLQETLNLPPVASETVDRLVLESPAPVEVNLKLRRPSFRDDIDLNATFDVDTPPARPSSSQHGYYEKLCLEKSHSPIQDVPKKICKGPRKESQLSLGGQSCAGEPDEELVGAFPIFVRNAILGQKQPKRPRSESSCSKDVVRTGFDGLGGRTKFIQPTDTVMIRPLPVKPKTKVKQRVRVKTVPSLFQAKLDTFLWS

SEQ ID NO: 5426 - protein, 365 aa, Homo sapiens
MMTVILKTLLGQIQGLSGNPHSTTSRMYFLCFCTSLLRFKVHWVSRLIRKLYMASPSNDSTAPVSEFLLICFPNFQSWQHWLSLPLSLLFLLAMGANTTLLITIQLEASLHQPLYYLLSLLSLLDIVLCLTVIPKVLAIFWFDLRSISFPACFLQMFIMNSFLTMESCTFMVMAYDRYVAICHPLRYPSIITDQFVARAVVFVIARNAFVSLPVPMLSARLRYCAGNIIKNCICSNLSVSKLSCDDITFNQLYQFVAGWTLLGSDLILIVISYSFILKVVLRIKAEGAVAKALSTCGSHFILILFFSTVLLVLVITNLARKRIPPDVPILLNILHHLIPPALNPIVYGVRTKEIKQGIQNLLKRL

SEQ ID NO: 5427 - protein, 803 aa, Homo sapiens
MTTAKEPSASGKSVQQQEQELVGSNPPQRNWKGIAIALLVILVICSLIVTSVILLTPAEDNSLSQKKKVTVEDLFSEDFKIHDPEAKWISDTEFIYREQKGTVRLWNVETNTSTVLIEGKKIESLRAIRYEISPDREYALFSYNVEPIYQHSYTGYYVLSKIPHGDPQSLDPPEVSNAKLQYAGWGPKGQQLIFIFENNIYYCAHVGKQAIRVVSTGKEGVIYNGLSDWLYEEEILKTHIAHWWSPDGTRLAYAAINDSRVPIMELPTYTGSIYPTVKPYHYPKAGSENPSISLHVIGLNGPTHDLEMMPPDDPRMREYYITMVKWATSTKVAVTWLNRAQNVSILTLCDATTGVCTKKHEDESEAWLHRQNEEPVFSKDGRKFFFIRAIPQGGRGKFYHITVSSSQPNSSNDNIQSITSGDWDVTKILAYDEKGNKIYFLSTEDLPRRRQLYSANTVGNFNRQCLSCDLVENCTYFSASFSHSMDFFLLKCEGPGVPMVTVHNTTDKKKMFDLETNEHVKKAINDRQMPKVEYRDIEIDDYNLPMQILKPATFTDTTHYPLLLVVDGTPGSQSVAEKFEVSWETVMVSSHGAVVVKCDGRGSGFQGTKLLHEVRRRLGLLEEKDQMEAVRTMLKEQYIDRTRVAVFGKDYGGYLSTYILPAKGENQGQTFTCGSALSPITDFKLYASAFSERYLGLHGLDNRAYEMTKVAHRVSALEEQQFLIIHPTADEKIHFQHTAELITQLIRGKANYSLQIYPDESHYFTSSSLKQHLYRSIINFFVECFRIQDKLLTVTAKEDEEED

SEQ ID NO: 5428 - protein, 1023 aa, Homo sapiens
MDANSKDKPPETKESAMNNAGNASFILGTGKIVTPQKHAELPPNPCTPDTFKSPLNFSTVTVEQLGITPESFVRNSAGKSSSYLKKCRRRSAVGARGSPETNHLIRFIARQQNIKNARKSPLAQDSPSQGSPALYRNVNTLRERISAFQSAFHSIKENEKMTGCLEFSEAGKESEMTDLTRKEGLSACQQSGFPAVLSSKRRRISYQRDSDENLTDAEGKVIGLQIFNIDTDRACAVETSVDLSEISSKLGSTQSGFLVEESLPLSELTETSNALKVADCVVGKGSSDAVSPDTFTAEVSSDAVPDVRSPATPACRRDLPTPKTFVLRSVLKKPSVKMCLESLQEHCNNLYDDDGTHPSLISNLPNCCKEKEAEDEENFEAPAFLNMRKRKRVTFGEDLSPEVFDESLPANTPLRKGGTPVCKKDFSGLSSLLLEQSPVPEPLPQPDFDDKGENLENIEPLQVSFAVLSSPNKSSISETLSGTDTFSSSNNHEKISSPKVGRITRTSNRRNQLVSVVEESVCNLLNTEVQPCKEKKINRRKSQETKCTKRALPKKSQVLKSCRKKKGKGKKSVQKSLYGERDIASKKPLLSPIPELPEVPEMTPSIPSIRRLGSGYFSSNGKLEEVKTPKNPVKRKDLLRHDPDLHMHQGYDKYDVSEFCSYIKSSSSLGNATSDEDPNTNIMNINENKNIPKAKNKSESENEPKAGTDSPVSCASVTEERVASDSPKPALTLQQGQEFSAGGQNAENLCQFFKISPDLNIKCERKDDFLGAAEGKLQCNRLMPNSQKDCHCLGDVLIENTKESKSQSEDLGRKPMESSSVVSCRDRKDRRRSMCYSDGRSLHLEKNGNHTPSSSVGSSVEISLENSELFKDLSDAIEQTFQRRNSETKVRRSTRLQKDLENEGLVWISLPLPSTSQKAKRRTICTFDSSGFESMSPIKETVSSRQKPQMAPPVSDPENSQGPAAGSSDEPGKRRKSFCISTLANTKATSQFKGYRRRSSLNGKGESSLTALERIEHNGERKQ

SEQ ID NO: 5429 - protein, 2209 aa, Homo sapiens
MWNDIELLTNDDTGSGYLSVGSRKEHGTALYQVDLLVKISSEKASLNPKIQACSLSDGFIIVADQSVILLDSICRSLQLHLVFDTEVDVVGLCQEGKFLLVGERSGNLHLIHVTSKQTLLTNAFVQKANDENRRTYQNLVIEKDGSNEGTYYMLLLTYSGFFCITNLQLLKIQQAIENVDFSTAKKLQGQIKSSFISTENYHTLGCLSLVAGDLASEVPVIIGGTGNCAFSKWEPDSSKKGMTVKNLIDAEIIKGAKKFQLIDNLLFVLDTDNVLSLWDIYTLTPVWNWPSLHVEEFLLTTEADSPSSVTWQGITNLKLIALTASANKKMKNLMVYSLPTMEILYSLEVSSVSSLVQTGISTDTIYLLEGVCKNDPKLSEDSVSVLVLRCLTEALPENRLSRLLHKHRFAEAESFAIQFGLDVELVYKVKSNHILEKLALSSVDASEQTEWQQLVDDAKENLHKIQDDEFVVNYCLKAQWITYETTQEMLNYAKTRLLKKEDKTALIYSDGLKEVLRAHAKLTTFYGAFGPEKFSGSSWIEFLNNEDDLKDIFLQLKEGNLVCAQYLWLRHRANFESRFDVKMLESLLNSMSASVSLQKLCPWFKNDVIPFVRRTVPEGQIILAKWLEQAARNLELTDKANWPENGLQLAEIFFTAEKTDELGLASSWHWISLKDYQNTEEVCQLRTLVNNLRELITLHRKYNCKLALSDFEKENTTTIVFRMFDKVLAPELIPSILEKFIRVYMREHDLQEEELLLLYIEDLLNRCSSKSTSLFETAWEAKAMAVIACLSDTDLIFDAVLKIMYAAVVPWSAAVEQLVKQHLEMDHPKVKLLQESYKLMEMKKLLRGYGIREVNLLNKEIMRVVRYILKQDVPSSLEDALKVAQAFMLSDDEIYSLRIIDLIDREQGEDCLLLLKSLPPAEAEKTAERVIIWARLALQEEPDHSKEGKAWRMSVAKTSVDILKILCDIQKDNLQKKDECEEMLKLFKEVASLQENFEVFLSFEDYSNSSLVADLREQHIKAHEVAQAKHKPGSTPEPIAAEVRSPSMESKLHRQALALQMSKQELEAELTLRALKDGNIKTALKKCSDLFKYHCNADTGKLLFLTCQKLCQMLADNVPVTVPVGLNLPSMIHDLASQAATICSPDFLLDALELCKHTLMAVELSRQCQMDDCGILMKASFGTHKDPYEEWSYSDFFSEDGIVLESQMVLPVIYELISSLVPLAESKRYPLESTSLPYCSLNEGDGLVLPVINSISALLQNLQESSQWELALRFVVGSFGTCLQHSVSNFMNATLSEKLFGETTLVKSRHVVMELKEKAVIFIRENATTLLHKVFNCRLVDLDLALGYCTLLPQKDVFENLWKLIDKAWQNYDKILAISLVGSELASLYQEIEMGLKFRELSTDAQWGIRLGKLGISFQPVFRQHFLTKKDLIKALVENIDMDTSLILEYCSTFQLDCDAVLQLFIETLLHNTNAGQGQGDASMDSAKRRHPKLLAKALEMVPLLTSTKDLVISLSGILHKLDPYDYEMIEVVLKVIERADEKITNININQALSILKHLKSYRRISPPVDLEYQYMLEHVITLPSAAQTRLPFHLIFFGTAQNFWKILSTELSEESFPTLLLISKLMKFSLDTLYVSTAKHVFEKKLKPKLLKLTQAKSSTLINKEITKITQTIESCLLSIVNPEWAVAIAISLAQDIPEGSFKISALKFCLYLAERWLQNIPSQDEKREKAEALLKKLHIQYRRSGTEAVLIAHKLNTEEYLRVIGKPAHLIVSLYEHPSINQRIQNSSGTDYPDIHAAAKEIAEVNEINLEKVWDMLLEKWLCPSTKPGEKPSELFELQEDEALRRVQYLLLSRPIDYSSRMLFVFATSTTTTLGMHQLTFAHRTRALQCLFYLADKETIESLFKKPIEEVKSYLRCITFLASFETLNIPITYELFCSSPKEGMIKGLWKNHSHESMAVRLVTELCLEYKIYDLQLWNGLLQKLLGFNMIPYLRKVLKAISSIHSLWQVPYFSKAWQRVIQIPLLSASCPLSPDQLSDCSESLIAVLECPVSGDLDLIGVARQYIQLELPAFALACLMLMPHSEKRHQQIKNFLGSCDPQVILKQLEEHMNTGQLAGFSHQIRSLILNNIINKKEFGILAKTKYFQMLKMHAMNTNNITELVNYLANDLSLDEASVLITEYSKHCGKPVPPDTAPCEILKMFLSGLS

SEQ ID NO: 5430 - protein, 489 aa, Homo sapiens
MKELDPKNDISEDKLSVVGEATGGPTRNGARGPGSEGVWEPGSWPERPRGDAGAEWEPLGIPQGNKLLGGSVPACHELKAFANQGCVLVPPRLDDPTEKGACPPVRRGKNFSSTSDLSKPPMPCEEKKTYDCSECGKAFSRSSSLIKHQRIHTGEKPFECDTCGKHFIERSSLTIHQRVHTGEKPYACGDCGKAFSQRMNLTVHQRTHTGEKPYVCDVCGKAFRKTSSLTQHERIHTGEKPYACGDCGKAFSQNMHLIVHQRTHTGEKPYVCPECGRAFSQNMHLTEHQRTHTGEKPYACKECGKAFNKSSSLTLHQRNHTGEKPYVCGECGKAFSQSSYLIQHQRFHIGVKPFECSECGKAFSKNSSLTQHQRIHTGEKPYECYICKKHFTGRSSLIVHQIVHTGEKPYVCGECGKAFSQSAYLIEHQRIHTGEKPYRCGQCGKSFIKNSSLTVHQRIHTGEKPYRCGECGKTFSRNTNLTRHLRIHT

SEQ ID NO: 5431 - protein, 400 aa, Homo sapiens
MDSSAAPTNASNCTDALAYSSCSPAPSPGSWVNLSHLDGNLSDPCGPNRTDLGGRDSLCPPTGSPSMITAITIMALYSIVCVVGLFGNFLVMYVIVRYTKMKTATNIYIFNLALADALATSTLPFQSVNYLMGTWPFGTILCKIVISIDYYNMFTSIFTLCTMSVDRYIAVCHPVKALDFRTPRNAKIINVCNWILSSAIGLPVMFMATTKYRQGSIDCTLTFSHPTWYWENLLKICVFIFAFIMPVLIITVCYGLMILRLKSVRMLSGSKEKDRNLRRITRMVLVVVAVFIVCWTPIHIYVIIKALVTIPETTFQTVSWHFCIALGYTNSCLNPVLYAFLDENFKRCFREFCIPTSSNIEQQNSTRIRQNTRDHPSTANTVDRTNHQLENLEAETAPLP

SEQ ID NO: 5432 - protein, 1039 aa, Homo sapiens
MPRLPVKKIRKQMKLLLLLLLLSCAAWLTYVHLGLVRQGRALRQRLGYGRDGEKLTSETDGRGVHAAPSTQRAEDSSESREEEQAPEGRDLDMLFPGGAGRLPLNFTHQTPPWREEYKGQVNLHVFEDWCGGAVGHLRRNLHFPLFPHTRTTVKKLAVSPKWKNYGLRIFGFIHPARDGDVQFSVASDDNSEFWLSLDESPAAAQLVAFVGKTGSEWTAPGEFTKFSSQVSKPRRLMASRRYYFELLHKQDDRGSDHVEVGWRAFLPGLKFEVISSAHISLYTDESALKMDHVAHVPQSPASHVGGRPPQEETSADMLRPDPRDTFFLTPRMESSSLENVLEPCAYAPTYVVKDFPIARYQGLQFVYLSFVYPNDYTRLTHMETDNKCFYRESPLYLERFGFYKYMKMDKEEGDEDEEDEVQRRAFLFLNPDDFLDDEDEGELLDSLEPTEAAPPRSGPQSPAPAAPAQPGATLAPPTPPRPRDGGTPRHSRALSWAARAARPLPLFLGRAPPPRPAVEQPPPKVYVTRVRPGQRASPRAPAPRAPWPPFPGVFLHPRPLPRVQLRAPPRPPRPHGRRTGGPQATQPRPPARAQATQGGREGQARTLGPAAPTVDSNLSSEARPVTSFLSLSQVSGPQLPGEGEEEEEGEDDGAPGDEAASEDSEEAAGPALGRWREDAIDWQRTFSVGAVDFELLRSDWNDLRCNVSGNLQLPEAEAVDVTAQYMERLNARHGGRFALLRIVNVEKRRDSARGSRFLLELELQERGGGRLRLSEYVFLRLPGARVGDADGESPEPAPAASVRPDGRPELCRPLRLAWRQDVMVHFIVPVKNQARWVAQFLADMAALHARTGDSRFSVVLVDFESEDMDVERALRAARLPRYQYLRRTGNFERSAGLQAGVDAVEDASSIVFLCDLHIHFPPNILDGIRKHCVEGRLAFAPVVMRLSCGSSPRDPHGYWEVNGFGLFGIYKSDFDRVGGMNTEEFRDQWGGEDWELLDRVLQAGLEVERLRLRNFYHHYHSKRGMWSVRSRKGSRTGAS

SEQ ID NO: 5433 - protein, 1314 aa, Homo sapiens
MASKGAGMSFSRKSYRLTSDAEKSRVTGIVQEKLLNDYLNRIFSSSEHAPPAATSRKPLNFQNLPEHLDQLLQVDNEEEESQGQVEGRLGPSTVVLDHTGGFEGLLLVDDDLLGVIGHSNFGTIRSTTCVYKGKWLYEVLISSQGLMQIGWCTISCRFNQEEGVGDTHNSYAYDGNRVRKWNVTTTNYGKAWAAGDIVSCLIDLDDGTLSFCLNGVSLGTAFENLSRGLGMAYFPAISLSFKESVAFNFGSRPLRYPVAGYRPLQDPPSADLVRAQRLLGCFRAVLSVELDPVEGRLLDKESSKWRLRGQPTVLLTLAHIFHHFAPLLRKVYLVEAVLMSFLLGIVEKGTPTQAQSVVHQVLDLLWLFMEDYEVQDCLKQLMMSLLRLYRFSPIVPDLGLQIHYLRLTIAILRHEKSRKFLLSNVLFDVLRSVVFFYIKSPLRVEEAGLQELIPTTWWPHCSSREGKESTEMKEETAEERLRRRAYERGCQRLRKRIEVVEELQVQILKLLLDNKDDNGGEASRYIFLTKFRKFLQENASGRGNMPMLCPPEYMVCFLHRLISALRYYWDEYKASNPHASFSEEAYIPPQVFYNGKVDYFDLQRLGGLLSHLRKTLKDDLASKANIVIDPLELQSTAMDDLDEDEEPAPAMAQRPMQALAVGGPLPLPRPGWLSSPTLGRANRFLSTAAVSLMTPRRPLSTSEKVKVRTLSVEQRTREDIEGSHWNEGLLLGRPPEEPEQPLTENSLLEVLDGAVMMYNLSVHQQLGKMVGVSDDVNEYAMALRDTEDKLRRCPKRRKDILAELTKSQKVFSEKLDHLSRRLAWVHATVYSQEKMLDIYWLLRVCLRTIEHGDRTGSLFAFMPEFYLSVAINSYSALKNYFGPVHSMEELPGYEETLTRLAAILAKHFADARIVGTDIRDSLMQALASYVCYPHSLRAVERIPEEQRIAMVRNLLAPYEQRPWAQTNWILVRLWRGCGFGYRYTRLPHLLKTKLEDANLPSLQKPCPSTLLQQHMADLLQQGPDVAPSFLNSVLNQLNWAFSEFIGMIQEIQQAAERLERNFVDSRQLKVCATCFDLSVSLLRVLEMTITLVPEIFLDWTRPTSEMLLRRLAQLLNQVLNRVTAERNLFDRVVTLRLPGLESVDHYPILVAVTGILVQLLVRGPASEREQATSVLLADPCFQLRSICYLLGQPEPPAPGTALPAPDRKRFSLQSYADYISADELAQVEQMLAHLTSASAQAAAASLPTSEEDLCPICYAHPISAVFQPCGHKSCKACINQHLMNNKDCFFCKTTIVSVEDWEKGANTSTTSSAA

SEQ ID NO: 5434 - protein, 645 aa, Homo sapiens
MGDRRPQDRPRSQGMDSKPWYCDKPPSKYFAKRKHRRLRFPPVDTQNWVFVTEGMDDFRYACQSPEDTLVCRRDEFLLPKISLRGPQADRKSRKKKLLKKAALFSELSPVQPARKAFVEEVEAQLMTKHPLAMYPNLGKDMPPDLLLQVLKQLDPERKLEDAWARCEAREKTTEVPTESGKYPCGESCPRPPETPVSRLRPQLPKTPVSSRRPEPPKTRVSSLRPEPPKTRVSSLHPEPPETRASHLRVDPPETGVSHLCPEPPKTLVSSVHPEPPDTGASHLCPEPPETRVSHLHPEPPETGVSHLRPEPSKTQVSSLCPEPPEAGVSHLCLEPPNTHRVSSFLLQVLKLDSEKKLEDARARCEGQEMTTEELTKPGKYHFWESCPRPFESRMPHLRLVLPITRRMASLCLKPPKTRRVSSLCPEPTKTGASHLKELFQEDTPSTMECVSDSLQRRHTSRKLRDFKWAGDLGVNEESISSLFDFTPECRTTDQDQKIKKANECASRLMYGMELDDMDEVEFLRIKYWDRRRRAAPHSYSAQRGRIRYGPWYFEPKLGKKLRSDEPLIDPKPVLEKPDEPDILDGLYGPIAFKDFILSKGYRMPGVIEKLFAKKGWTYDSVKTPIQRAVQVYKYKEDVTDASKED

SEQ ID NO: 5435 - protein, 650 aa, Homo sapiens
MAAKSDGRLKMKKSSDVAFTPLQNSDHSGSVQGLAPGLPSGSGAEDEEAAGGGCCPDGGGCSRCCCCCAGSGGSAGSGGSGGVAGPGGGGAGSAALCLRLGREQRRYSLWDCLWILAAVAVYFADVGTDVWLAVDYYLRGQRWWFGLTLFFVVLGSLSVQVFSFRWFVHDFSTEDSATAAAASSCPQPGADCKTVVGGGSAAGEGEARPSTPQRQASNASKSNIAAANSGSNSSGATRASGKHRSASCSFCIWLLQSLIHILQLGQIWRYFHTIYLGIRSRQSGENDRWRFYWKMVYEYADVSMLHLLATFLESAPQLVLQLCIIVQTHSLQALQGFTAAASLVSLAWALASYQKALRDSRDDKKPISYMAVIIQFCWHFFTIAARVITFALFASVFQLYFGIFIVLHWCIMTFWIVHCETEFCITKWEEIVFDMVVGIIYIFSWFNVKEGRTRCRLFIYYFVILLENTALSALWYLYKAPQIADAFAIPALCVVFSSFLTGVVFMLMYYAFFHPNGPRFGQSPSCACEDPAAAFTLPPDVATSTLRSISNNRSVVSDRDQKFAERDGCVPVFQVRPTAPSTPSSRPPRIEESVIKIDLFRNRYPAWERHVLDRSLRKAILAFECSPSPPRLQYKDDALIQERLEYETTL

SEQ ID NO: 5436 - protein, 1860 aa, Homo sapiens
MATGGGPFEDGMNDQDLPNWSNENVDDRLNNMDWGAQQKKANRSSEKNKKKFGVESDKRVTNDISPESSPGVGRRRTKTPHTFPHSRYMSQMSVPEQAELEKLKQRINFSDLDQRSIGSDSQGRATAANNKRQLSENRKPFNFLPMQINTNKSKDASTNPPNRETIGSAQCKELFASALSNDLLQNCQVSEEDGRGEPAMESSQIVSRLVQIRDYITKASSMREDLVEKNERSANVERLTHLIDHLKEQEKSYMKFLKKILARDPQQEPMEEIENLKKQHDLLKRMLQQQEQLRALQGRQAALLALQHKAEQAIAVMDDSVVAETAGSLSGVSITSELNEELNDLIQRFHNQLRDSQPPAVPDNRRQAESLSLTREVSQSRKPSASERLPDEKVELFSKMRVLQEKKQKMDKLLGELHTLRDQHLNNSSSSPQRSVDQRSTSAPSASVGLAPVVNGESNSLTSSVPYPTASLVSQNESENEGHLNPSEKLQKLNEVRKRLNELRELVHYYEQTSDMMTDAVNENRKDEETEESEYDSEHENSEPVTNIRNPQVASTWNEVNSHSNAQCVSNNRDGRTVNSNCEINNRSAANIRALNMPPSLADCRYNREGEQEIHVAQGEDDEEEEEEAEEEGVSGASLSSHRSSLVDEHPEDAEFEQKINRLMAAKQKLRQLQDLVAMVQDDDAAQGVISASASNLDDFYPAEEDTKQNSNNTRGNANKTQKDTGVNEKAREKFYEAKLQQQQRELKQLQEERKKLIDIQEKIQALQTACPDLQLSAASVGNCPTKKYMPAVTSTPTVNQHETSTSKSVFEPEDSSIVDNELWSEMRRHEMLREELRQRRKQLEALMAEHQRRQGLAETASPVAVSLRSDGSENLCTPQQSRTEKTMATWGGSTQCALDEEGDEDGYLSEGIVRTDEEEEEEQDASSNDNFSVCPSNSVNHNSYNGKETKNRWKNNCPFSADENYRPLAKTRQQNISMQRQENLRWVSELSYVEEKEQWQEQINQLKKQLDFSVSICQTLMQDQQTLSCLLQTLLTGPYSVMPSNVASPQVHFIMHQLNQCYTQLTWQQNNVQRLKQMLNELMRQQNQHPEKPGGKERGSSASHPPSPSLFCPFSFPTQPVNLFNIPGFTNFSSFAPGMNFSPLFPSNFGDFSQNISTPSEQQQPLAQNSSGKTEYMAFPKPFESSSSIGAEKPRNKKLPEEEVESSRTPWLYEQEGEVEKPFIKTGFSVSVEKSTSSNRKNQLDTNGRRRQFDEESLESFSSMPDPVDPTTVTKTFKTRKASAQASLASKDKTPKSKSKKRNSTQLKSRVKNIKTGSDFSMFEALRDTIYSEVATLISQNESRPHFLIELFHELQLLNTDYLRQRALYALQDIVSRHISESHEKGENVKSVNSGTWIASNSELTPSESLATTDDETFEKNFERETHKISEQNDADNASVLSVSSNFEPFATDDLGNTVIHLDQALARMREYERMKTEAESNSNMRCTCRIIEDGDGAGAGTTVNNLEETPVIENRSSQQPVSEVSTIPCPRIDTQQLDRQIKAIMKEVIPFLKEHMDEVCSSQLLTSVRRMVLTLTQQNDESKEFVKFFHKQLGSILQDSLAKFAGRKLKDCGEDLLVEISEVLFNELAFFKLMQDLDNNSITVKQRCKRKIEATGVIQSCAKEAKRILEDHGSPAGEIDDEDKDKDETETVKQTQTSEVYDGPKNVRSDISDQEEDEESEGCPVSINLSKAETQALTNYGSGEDENEDEEMEEFEEGPVDVQTSLQANTEATEENEHDEQEAESGNISQKSDEEDFVKVEDLPLKLTIYSEADLRKKMVEEEQKNHLSGEICEMQTEELAGNSETLKEPETVGAQSI

SEQ ID NO: 5437 - protein, 535 aa, Homo sapiens
MRSSVSRQTYSTKGGFSSNSASGGSGSQARTSFSSVTVSRSSGSGGGAHCGPGTGGFGSRSLYNLGGHKSISVSVAGGALLGRALGGFGFGSRAFMGQGAGRQTFGPACPPGGIQEVTVNQSLLTPLHVEIDPEIQRVRTQEREQIKTLNNKFASFIDKVRFLEQQNKVLETKWALLQEQGQNLGVTRNNLEPLFEAYLGSMRSTLDRLQSERGRLDSELRNVQDLVEDFKNKYEDEINKHTAAENEFVVLKKDVDAAYMGRMDLHGKVGTLTQEIDFLQQLYEMELSQVQTHVSNTNVVLSMDNNRNLDLDSIIAEVKAQYELIAQRSRAEAEAWYQTKYEELQVTAGKHGDNLRDTKNEIAELTRTIQRLQGEADAAKKQCQQLQTAIAEAEQRGELALKDAQKKLGDLDVALHQAKEDLTRLLRDYQELMNVKLALDVEIATYRKLLESEESRMSGECPSAVSISVTGNSTTVCGGGAASFGGGISLGGSGGATKGGFSTNVGYSTVKGGPVSAGTSILRKTTTVKTSSQRY

SEQ ID NO: 5438 - protein, 735 aa, Homo sapiens
MAKERGLISPSDFAQLQKYMEYSTKKVSDVLKLFEDGEMAKYVQGDAIGYEGFQQFLKIYLEVDNVPRHLSLALFQSFETGHCLNETNVTKDVVCLNDVSCYFSLLEGGRPEDKLEFTFKLYDTDRNGILDSSEVDKIILQMMRVAEYLDWDVSELRPILQEMMKEIDYDGSGSVSQAEWVRAGATTVPLLVLLGLEMTLKDDGQHMWRPKRFPRPVYCNLCESSIGLGKQGLSCNLCKYTVHDQCAMKALPCEVSTYAKSRKDIGVQSHVWVRGGCESGRCDRCQKKIRIYHSLTGLHCVWCHLEIHDDCLQAVGHECDCGLLRDHILPPSSIYPSVLASGPDRKNSKTSQKTMDDLNLSTSEALRIDPVPNTHPLLVFVNPKSGGKQGQRVLWKFQYILNPRQVFNLLKDGPEIGLRLFKDVPDSRILVCGGDGTVGWILETIDKANLPVLPPVAVLPLGTGNDLARCLRWGGGYEGQNLAKILKDLEMSKVVHMDRWSVEVIPQQTEEKSDPVPFQIINNYFSIGVDASIAHRFHIMREKYPEKFNSRMKNKLWYFEFATSESIFSTCKKLEESLTVEICGKPLDLSNLSLEGIAVLNIPSMHGGSNLWGDTRRPHGDIYGINQALGATAKVITDPDILKTCVPDLSDKRLEVVGLEGAIEMGQIYTKLKNAGRRLAKCSEITFHTTKTLPMQIDGEPWMQTPCTIKITHKNQMPMLMGPPPRSTNFFGFLS

SEQ ID NO: 5439 - protein, 852 aa, Homo sapiens
MLITERKHFRSGRIAQSMSEANLIDMEAGKLSKSCNITECQDPDLLHNWPDAFTLRGNNASKVANPFWNQLSASNPFLDDITQLRNNRKRNNISILKEDPFLFCREIENGNSFDSSGDELDVHQLLRQTSSRNSGRSKSVSELLDILDDTAHAHQSIHNSDQILLHDLEWLKNDREAYKMAWLSQRQLARSCLDLNTISQSPGWAQTQLAEVTIACKVNHQGGSVQLPESDITVHVPQGHVAVGEFQEVSLRAFLDPPHMLNHDLSCTVSPLLEIMLGNLNTMEALLLEMKIGAEVRKDPFSQVMTEMVCLHSLGKEGPFKVLSNCYIYKDTIQVKLIDLSQVMYLVVAAQAKALPSPAATIWDYIHKTTSIGIYGPKYIHPSFTVVLTVCGHNYMPGQLTISDIKKGGKNISPVVFQLWGKQSFLLDKPQDLSISIFSCDPDFEVKTEGERKEIKQKQLEAGEVVHQQFLFSLVEHREMHLFDFCVQVEPPNGEPVAQFSITTPDPTPNLKRLSNLPGYLQKKEEIKSAPLSPKILVKYPTFQDKTLNFSNYGVTLKAVLRQSKIDYFLEYFKGDTIALLGEGKVKAIGQSKVKEWYVGVLRGKIGLVHCKNVKVISKEQVMFMSDSVFTTRNLLEQIVLPLKKLTYIYSVVLTLVSEKVYDWKVLADVLGYSHLSLEDFDQIQADKESEKVSYVIKKLKEDCHTERNTRKFLYELIVALLKMDCQELVARLIQEAAVLTSAVKLGKGWRELAEKLVRLTKQQMEAYEIPHRGNTGDVAVEMMWKPAYDFLYTWSAHYGNNYRDVLQDLQSALDRMKNPVTKHWRELTGVLILVNSLEVLRVTAFSTSEEV

SEQ ID NO: 5440 - protein, 157 aa, Homo sapiens
MNPQREAAPKSYAIRDSRQMVWVLSGNSLIAAPLSRSIKPVTLHLIACRDTEFSDKEKGNMVYLGIKGKDLCLFCAEIQGKPTLQLKEKNIMDLYVEKKAQKPFLFFHNKEGSTSVFQSVSYPGWFIATSTTSGQPIFLTKERGITNNTNFYLDSVE

SEQ ID NO: 5441 - protein, 2430 aa, Homo sapiens
MAPPAHKSILERSENVLMSPWKGKLIVQDRMLCDIALWSTYGAMIPTQLPQELDFKYVMKVSSLKKRLPEAAFRKQNYLEEKVCFQDLCFNLYEVELSNRQGENIDKLTECIKNKQLAIIKCLEDRGFFILLTSSALLSEPDFGGKQMGLHGLHLFRSPLSTGVKDLKVEDDISMKVIPILSTLNCALLETKKSLPEERIHPNTLVKRHFQELYKADRSPSLSVAPQDRMKDPTFLGKLPSGFDLIPPAEKCPSESLTQLNSYFSDPSAYILEVSTALDLLAEHPQSPCVSDGICDAGFSLVMTPDPEFLVSEAEVRKETETKKDSEEMLKAKKRVFPLSPASNLRVQPKRKASMPHMVQSKKVNLCRPFPKRTASRADNSSDSPTTLKLVKGQFPQKRKRGAEVLTAQFVQKTKLDRKNQEAPISKDVPVPTNAKRARKQEKSPVKTVPRAKPPVKKSPQKQRVNIVKGNENPRNRKQLQPVKGETASKLQSEISRGCQEDGISINSVQPENTTAAHNDLPENSIVNYDSQALNMLADLALSSATSSTPVSEARNLHCSSELPQNDVLLSKENSLRGTSDHEYHRGVKTQKGELLPNPSSDRKSNSGSDLTVSQDEESLVPCSQAPAKAQSALTEEMLESSDASQSSSVSVEHSYALLLTEHSKKHLQEREILSPLFPRNGTKSPEAATPVGKVMPFRHQPGLLLQQKPPDDPVVKPKDRPPSARVKKSSCSRIVLSCDDSVKITFKCETEYAFSLDSKYTNNPLEKTVVRALHGPWNTDLPDNVEEVKLLLHMWVALFYSNQNKIIRSSRKVVEHSNPAKYVSINSTLESCELREIEESLGLEKCSADSLLETNEISRAHAAEVSFRDPNCLLPFIKTPLTQGLELCVQNEQKKTFARECDPDTQEDQNFICSYNNEVTGEEAKQESLETSNLVLSGIGSTQTNGPSVPSEEEIVQPLDSTRVASYSGTVTQATFTRTYDGPGSQPVICQSSVYGTLENKVDILDAAVQTKTGTLQDLIQHGSPINNECHPSLERKDDNMGCAVINPEPITLTFEKNAHVPIQTEGVNTADERTTFKKELIKQVSPAASLRHPVSTSENARTQGLRDIPSLVVAGQKGTKYLCASSVGGETLDKAVCSLQKETPLPVSLPSDKTMVMEALSLAKSSSHLSPSEEVRCTQDFLSQTQSLLGLSSEGLLELTQVEVDSSSASTTLGRQCSLNCISSGCHTSGDSLELRKNHKNGPNTENMNLEAFDSVFIKQTSLSVSREVSLELSEEDSDIDLALTISPPTSPREEMPAGEIEQFEEAPFSNLELQDVAEEIGEPEEVALTESREVSSADNVSVYPSVSEEPVENKERKGDNLQPVTLILSKENCTLEIAEEINVTSDFPFDSVIEEVSPASSPEPPVPVKETRPYQAVTPCILKLHGTQCEKSNQISQCESEDLGITEKENVFVGPTHPVGQDNFTQVQQMQVSAEMPLILTDHPGRTGRPTLPGKVTEEIVSSEHDEGLSFSGKVQCYGRELNQPASAAKCTGDFSPSPEKLVKSGNPLQPVSIENRNLDLKHLVLESSEPPFGPRNVIENKSLSDTLVSTTAPSGIVNVSVKQQTSPKSSQNHLFPGDLKTDEGIYLQVKSLTAASVDGAYSTQGCMCSVVPTLCSSSDNATLTHYVRPINAEPVFQAQEIPAGRMASLLKNGEPEAELHKETTGPGTAGPQSNTTSSLKGERKAIHTLQDVSTCETKELLNVGVSSLCAGPYQNTADTKENLSKEPLASFVSESFDTSVCGIATEHVEIENSGEGLRAEAGSETLGRDGEVGVNSDMHYELSGDSDLDLLGDCRNPRLDLEDSYTLRGSYTRKKDVPTDGYESSLNFHNNNQEDWGCSSWVPGMETSLPPGHWTAAVKKEEKCVPPYVQIRDLHGILRTYANFSITKELKDTMRTSHGLRRHPSFSANCGLPSSWTSTWQVADDLTQNTLDLEYLRFAHKLKQTIKNGDSQHSASSANVFPKESPTQISIGAFPSTKISEAPFLHPAPRSRSPLLVTVVESDPRPQGQPRRGYTASSLDSSSSWRERCSHNRDLRNSQRNHTVSFHLNKLKYNSTVKESRNDISLILNEYAEFNKVMKNSNQFIFQDKELNDVSGEATAQEMYLPFPGRSASYEDIIIDVCTNLHVKLRSVVKEACKSTFLFYLVETEDKSFFVRTKNLLRKGGHTEIEPQHFCQAFHRENDTLIIIIRNEDISSHLHQIPSLLKLKHFPSVIFAGVDSPGDVLDHTYQELFRAGGFVISDDKILEAVTLVQLKEIIKILEKLNGNGRWKWLLHYRENKKLKEDERVDSTAHKKNIMLKSFQSANIIELLHYHQCDSRSSTKAEILKCLLNLQIQHIDARFAVLLTDKPTIPREVFENSGILVTDVNNFIENIEKIAAPFRSSYW

SEQ ID NO: 5442 - protein, 664 aa, Homo sapiens
MTEKTNGVKSSPANNHNHHAPPAIKANGKDDHRTSSRPHSAADDDTSSELQRLADVDAPQQGRSGFRRIVRLVGIIREWANKNFREEEPRPDSFLERFRGPELQTVTTQEGDGKGDKDGEDKGTKKKFELFVLDPAGDWYYCWLFVIAMPVLYNWCLLVARACFSDLQKGYYLVWLVLDYVSDVVYIADLFIRLRTGFLEQGLLVKDTKKLRDNYIHTLQFKLDVASIIPTDLIYFAVDIHSPEVRFNRLLHFARMFEFFDRTETRTNYPNIFRISNLVLYILVIIHWNACIYYAISKSIGFGVDTWVYPNITDPEYGYLAREYIYCLYWSTLTLTTIGETPPPVKDEEYLFVIFDFLIGVLIFATIVGNVGSMISNMNATRAEFQAKIDAVKHYMQFRKVSKGMEAKVIRWFDYLWTNKKTVDEREILKNLPAKLRAEIAINVHLSTLKKVRIFHDCEAGLLVELVLKLRPQVFSPGDYICRKGDIGKEMYIIKEGKLAVVADDGVTQYALLSAGSCFGEISILNIKGSKMGNRRTANIRSLGYSDLFCLSKDDLMEAVTEYPDAKKVLEERGREILMKEGLLDENEVATSMEVDVQEKLGQLETNMETLYTRFGRLLAEYTGAQQKLKQRITVLETKMKQNNEDDYLSDGMNSPELAAADEP

SEQ ID NO: 5443 - protein, 849 aa, Homo sapiens
MMEPPKPEPELQRFYHRLLRPLSLFPTRTTSPEPQKRPPQEGRILQSFPLAKLTVASLCSQVAKLLAGSGIAAGVPPEARLRLIKVILDELKCSWREPPAELSLSHKNNQKLRKRLEAYVLLSSEQLFLRYLHLLVTMSTPRGVFTESATLTRLAASLARDCTLFLTSPNVYRGLLADFQALLRAEQASGDVDKLHPVCPAGTFKLCPIPWPHSTGFAQVQCSNLNLNYLIQLSRPPEFLNEPGRMDPVKELKSIPRLKRKKPFHWLPSIGKKREIDISSSQMVSLPSYPVAPTSRASPSPFCPELRRGQSMPSLREGWRLADELGLPPLPSRPLTPLVLATESKPELTGLIVAEDLKQLIKKMKLEGTRYPPLDSGLPPLLGVVTRHPAAGHRLEELEKMLRNLQEEEASGQWDPQPPKSFPLHPQPVTITLKLRNEVVVQAAAVRVSDRNFLDSFHIEGAGALYNHLAGELDPKAIEKMDIDNFVGSTTREVYKELMSHVSSDHLHFDQGPLVEPAADKDWSTFLSSAFLRQEKQPQIINPELVGLYSQRANTLQSNTKKMPSLPSLQATKSWEKWSNKASLMNSWKTTLSVDDYFKYLTNHETDFLHVIFQMHEEEVPVEIVAPARESLEIQHPPPLLEDEEPDFVPGEWDWNTVLEHRLGAGKTPHLGEPHKILSLQKHLEQLWSVLEVPDKDQVDMTIKYSSKARLRQLPSLVNAWERALKPIQLREALLARLEWFEGQASNPNRFFKKTNLSSSHFLEENQVRSHLHRKLNLMESSLVSLLEEIELIFGEPVIFKGRPYLDKMKSDKVEMLYWLQQQRRVRHLVSALKDPHQSTLFRSSAASL

SEQ ID NO: 5444 - protein, 1624 aa, Homo sapiens
MAGQGDCCVKVAVRIRPQLSKEKIEGCHICTSVTPGEPQVLLGKDKAFTYDFVFDLDTWQEQIYSTCVSKLIEGCFEGYNATVLAYGQTGAGKTYTMGTGFDMATSEEEQGIIPRAIAHLFGGIAERKRRAQEQGVAGPEFKVSAQFLELYNEEILDLFDSTRDPDTRHRRSNIKIHEDANGGIYTTGVTSRLIHSQEELIQCLKQGALSRTTASTQMNVQSSRSHAIFTIHLCQMRMCTQPDLVNEAVTGLPDGTPPSSEYETLTAKFHFVDLAGSERLKRTGATGERAKEGISINCGLLALGNVISALGDQSKKVVHVPYRDSKLTRLLQDSLGGNSQTIMIACVSPSDRDFMETLNTLKYANRARNIKNKVVVNQDKTSQQISALRAEIARLQMELMEYKAGKRVIGEDGAEGYSDLFRENAMLQKENGALRLRVKAMQEAIDAINNRVTQLMSQEANLLLAKAGDGNEAIGALIQNYIREIEELRTKLLESEAMNESLRRSLSRASARSPYSLGASPAAPAFGGSPASSMEDASEVIRRAKQDLERLKKKEVRQRRKSPEKEAFKKRAKLQQENSEETDENEAEEEEEERDESGCEEEEGREDEDEDSGSEESLVDSDSDPEEKEVNFQADLADLTCEIEIKQKLIDELENSQRRLQTLKHQYEEKLILLQNKIRDTQLERDRVLQNLSTMECYTEEKANKIKADYEKRLREMNRDLQKLQAAQKEHARLLKNQSRYERELKKLQAEVAEMKKAKVALMKQMREEQQRRRLVETKRNREIAQLKKEQRRQEFQIRALESQKRQQEMVLRRKTQEVSALRRLAKPMSERVAGRAGLKPPMLDSGAEVSASTTSSEAESGARSVSSIVRQWNRKINHFLGDHPAPTVNGTRPARKKFQKKGASQSFSKAARLKWQSLERRIIDIVMQRMTIVNLEADMERLIKKREELFLLQEALRRKRERLQAESPEEEKGLQELAEEIEVLAANIDYINDGITDCQATIVQLEETKEELDSTDTSVVISSCSLAEARLLLDNFLKASIDKGLQVAQKEAQIRLLEGRLRQTDMAGSSQNHLLLDALREKAEAHPELQALIYNVQQENGYASTDEEISEFSEGSFSQSFTMKGSTSHDDFKFKSEPKLSAQMKAVSAECLGPPLDISTKNITKSLASLVEIKEDGVGFSVRDPYYRDRVSRTVSLPTRGSTFPRQSRATETSPLTRRKSYDRGQPIRSTDVGFTPPSSPPTRPRNDRNVFSRLTSNQSQGSALDKGIISPVGGAKGARTAPLQCVSMAEGHTKPILCLDATDELLFTGSKDRSCKMWNLVTGQEIAALKGHPNNVVSIKYCSHSGLVFSVSTSYIKVWDIRDSAKCIRTLTSSGQVISGDACAATSTRAITSAQGEHQINQIALSPSGTMLYAASGNAVRIWELSRFQPVGKLTGHIGPVMCLTVTQTASQHDLVVTGSKDHYVKMFELGECVTGTIGPTHNFEPPHYDGIECLAIQGDILFSGSRDNGIKKWDLDQQELIQQIPNAHKDWVCALAFIPGRPMLLSACRAGVIKVWNVDNFTPIGEIKGHDSPINAICTNAKHIFTASSDCRVKLWNYVPGLTPCLPRRVLAIKGRATTLP

SEQ ID NO: 5445 - protein, 653 aa, Homo sapiens
MEVAMVSAESSGCNSHMPYGYAAQARARERERLAHSRAAAAAAVAAATAAVEGSGGSGGGSHHHHQSRGACTSHDPQSSRGSRRRRRQRSEKKKAHYRQSSFPHCSDLMPSGSEEKILRELSEEEEDEEEEEEEEEEGRFYYSEDDHGDECSYTDLLPQDEGGGGYSSVRYSDCCERVVINVSGLRFETQMKTLAQFPETLLGDPEKRTQYFDPLRNEYFFDRNRPSFDAILYYYQSGGRLKRPVNVPFDIFTEEVKFYQLGEEALLKFREDEGFVREEEDRALPENEFKKQIWLLFEYPESSSPARGIAIVSVLVILISIVIFCLETLPEFRDDRDLVMALSAGGHGGLLNDTSAPHLENSGHTIFNDPFFIVETVCIVWFSFEFVVRCFACPSQALFFKNIMNIIDIVSILPYFITLGTDLAQQQGGGNGQQQQAMSFAILRIIRLVRVFRIFKLSRHSKGLQILGHTLRASMRELGLLIFFLFIGVILFSSAVYFAEADEPTTHFQSIPDAFWWAVVTMTTVGYGDMKPITVGGKIVGSLCAIAGVLTIALPVPVIVSNFNYFYHRETENEEQTQLTQNAVSCPYLPSNLLKKFRSSTSSSLGDKSEYLEMEEGVKESLCAKEEKCQGKGDDSETDKNNCSNAKAVETDV

SEQ ID NO: 5446 - protein, 819 aa, Homo sapiens
MAAPAGKASRTGALRPRAQKGRVRRAVRISSLVAQEVLSLGADVLPEYKLQAPRIHRWTILHYSPFKAVWDWLILLLVIYTAVFTPYSAAFLLKETEEGPPATECGYACQPLAVVDLIVDIMFIVDILINFRTTYVNANEEVVSHPGRIAVHYFKGWFLIDMVAAIPFDLLIFGSGSEELIGLLKTARLLRLVRVARKLDRYSEYGAAVLFLLMCTFALIAHWLACIWYAIGNMEQPHMDSRIGWLHNLGDQIGKPYNSSGLGGPSIKDKYVTALYFTFSSLTSVGFGNVSPNTNSEKIFSICVMLIGSLMYASIFGNVSAIIQRLYSGTARYHTQMLRVREFIRFHQIPNPLRQRLEEYFQHAWSYTNGIDMNAVLKGFPECLQADICLHLNRSLLQHCKPFRGATKGCLRALAMKFKTTHAPPGDTLVHAGDLLTALYFISRGSIEILRGDVVVAILGKNDIFGEPLNLYARPGKSNGDVRALTYCDLHKIHRDDLLEVLDMYPEFSDHFWSSLEITFNLRDTNMIPGSPGSTELEGGFSRQRKRKLSFRRRTDKDTEQPGEVSALGPGRAGAGPSSRGRPGGPWGESPSSGPSSPESSEDEGPGRSSSPLRLVPFSSPRPPGEPPGGEPLMEDCEKSSDTCNPLSGAFSGVSNIFSFWGDSRGRQYQELPRCPAPTPSLLNIPLSSPGRRPRGDVESRLDALQRQLNRLETRLSADMATVLQLLQRQMTLVPPAYSAVTTPGPGPTSTSPLLPVSPLPTLTLDSLSQVSQFMACEELPPGAPELPQEGPTRRLSLPGQLGALTSQPLHRHGSDPGS

SEQ ID NO: 5447 - protein, 853 aa, Homo sapiens
MKGDTRHLNGEEDAGGREDSILVNGACSDQSSDSPPILEAIRTPEIRGRRSSSRLSKREVSSLLSYTQDLTGDGDGEDGDGSDTPVMPKLFRETRTRSESPAVRTRNNNSVSSRERHRPSPRSTRGRQGRNHVDESPVEFPATRSLRRRATASAGTPWPSPPSSYLTIDLTDDTEDTHGTPQSSSTPYARLAQDSQQGGMESPQVEADSGDGDSSEYQDGKEFGIGDLVWGKIKGFSWWPAMVVSWKATSKRQAMSGMRWVQWFGDGKFSEVSADKLVALGLFSQHFNLATFNKLVSYRKAMYHALEKARVRAGKTFPSSPGDSLEDQLKPMLEWAHGGFKPTGIEGLKPNNTQPVVNKSKVRRAGSRKLESRKYENKTRRRTADDSATSDYCPAPKRLKTNCYNNGKDRGDEDQSREQMASDVANNKSSLEDGCLSCGRKNPVSFHPLFEGGLCQTCRDRFLELFYMYDDDGYQSYCTVCCEGRELLLCSNTSCCRCFCVECLEVLVGTGTAAEAKLQEPWSCYMCLPQRCHGVLRRRKDWNVRLQAFFTSDTGLEYEAPKLYPAIPAARRRPIRVLSLFDGIATGYLVLKELGIKVGKYVASEVCEESIAVGTVKHEGNIKYVNDVRNITKKNIEEWGPFDLVIGGSPCNDLSNVNPARKGLYEGTGRLFFEFYHLLNYSRPKEGDDRPFFWMFENVVAMKVGDKRDISRFLECNPVMIDAIKVSAAHRARYFWGNLPGMNRPVIASKNDKLELQDCLEYNRIAKLKKVQTITTKSNSIKQGKNQLFPVVMNGKEDVLWCTELERIFGFPVHYTDVSNMGRGARQKLLGRSWSVPVIRHLFAPLKDYFACE

SEQ ID NO: 5448 - protein, 314 aa, Homo sapiens
MDQRNYTRVKEFTFLGITQSRELSQVLFTFLFLVYMTTLMGNFLIMVTVTCESHLHTPMYFLLRNLSILDICFSSITAPKVLIDLLSETKTISFSGCVTQMFFFHLLGGADVFSLSVMAFDRYIAISKPLHYMTIMSRGRCTGLIVASWVGGFVHSIAQISLLLPLPFCGPNVLDTFYCDVPQVLKLACTDTFTLELLMISNNGLVSWFVFFFLLISYTVILMMLRSHTGEGRRKAISTCTSHITVVTLHFVPCIYVYARPFTALPTDTAISVTFTVISPLLNPIIYTLRNQEMKLAMRKLKRRLGQSERILIQ

SEQ ID NO: 5449 - protein, 1200 aa, Homo sapiens
MRAQGRGRLPRRLLLLLALWVQAARPMGYFELQLSALRNVNGELLSGACCDGDGRTTRAGGCGHDECDTYVRVCLKEYQAKVTPTGPCSYGHGATPVLGGNSFYLPPAGAAGDRARARARAGGDQDPGLVVIPFQFAWPRSFTLIVEAWDWDNDTTPNEELLIERVSHAGMINPEDRWKSLHFSGHVAHLELQIRVRCDENYYSATCNKFCRPRNDFFGHYTCDQYGNKACMDGWMGKECKEAVCKQGCNLLHGGCTVPGECRCSYGWQGRFCDECVPYPGCVHGSCVEPWQCNCETNWGGLLCDKDLNYCGSHHPCTNGGTCINAEPDQYRCTCPDGYSGRNCEKAEHACTSNPCANGGSCHEVPSGFECHCPSGWSGPTCALDIDECASNPCAAGGTCVDQVDGFECICPEQWVGATCQLDVNDCRGQCQHGGTCKDLVNGYQCVCPRGFGGRHCELERDECASSPCHSGGLCEDLADGFHCHCPQGFSGPLCEVDVDLCEPSPCRNGARCYNLEGDYYCACPDDFGGKNCSVPREPCPGGACRVIDGCGSDAGPGMPGTAASGVCGPHGRCVSQPGGNFSCICDSGFTGTYCHENIDDCLGQPCRNGGTCIDEVDAFRCFCPSGWEGELCDTNPNDCLPDPCHSRGRCYDLVNDFYCACDDGWKGKTCHSREFQCDAYTCSNGGTCYDSGDTFRCACPPGWKGSTCAVAKNSSCLPNPCVNGGTCVGSGASFSCICRDGWEGRTCTHNTNDCNPLPCYNGGICVDGVNWFRCECAPGFAGPDCRINIDECQSSPCAYGATCVDEINGYRCSCPPGRAGPRCQEVIGFGRSCWSRGTPFPHGSSWVEDCNSCRCLDGRRDCSKVWCGWKPCLLAGQPEALSAQCPLGQRCLEKAPGQCLRPPCEAWGECGAEEPPSTPCLPRSGHLDNNCARLTLHFNRDHVPQGTTVGAICSGIRSLPATRAVARDRLLVLLCDRASSGASAVEVAVSFSPARDLPDSSLIQGAAHAIVAAITQRGNSSLLLAVTEVKVETVVTGGSSTGLLVPVLCGAFSVLWLACVVLCVWWTRKRRKERERSRLPREESANNQWAPLNPIRNPIERPGGHKDVLYQCKNFTPPPRRADEALPGPAGHAAVREDEEDEDLGRGEEDSLEAEKFLSHKFTKDPGRSPGRPAHWASGPKVDNRAVRSINEARYAGKE

SEQ ID NO: 5450 - protein, 543 aa, Homo sapiens
MRTLHAVSHPYSNSMRFQRVLYFICAFQNISCGIHYLASVFMGVTPHHVCRPPGNLQNGEIWELSRCSRNKRENTSSLGYEYTGSKKEFPCVDGYIYDQNTWKSTAVTQWNLVCDRKWLAMLIQPLFMFGVLLGSVTFGYFSDRLGRRVVLWATSSSMFLFGIAAAFAVDYYTFMAARFFLAMVASGYLVVGFVYVMEFIGMKSRTWASVHLHSFFAVGTLLVALTGYLVRTWWLYQMILSTVTVPFILCCWVLPETPFWLLSEGRYEEAQKIVDIMAKWNRASSCKLSELLSLDLQGPVSNSPTEVQKHNLSYLFYNWSITKRTLTVWLIWFTGSLGFYSFSLNSVNLGGNEYLNLFLLGVVEIPAYTFVCIAMDKVGRRTVLAYSLFCSALACGVVMVIPQKHYILGVVTAMVGKFAIGAAFGLIYLYTAELYPTIVRSLAVGSGSMVCRLASILAPFSVDLSSIWIFIPQLFVGTMALLSGVLTLKLPETLGKRLATTWEEAAKLESENESKSSKLLLTTNNSGLEKTEAITPRDSGLGE

SEQ ID NO: 5451 - protein, 246 aa, Homo sapiens
MFQLPILNFSPQQVAGVCETLEESGDVERLGRFLWSLPVAPAACEALNKNESVLRARAIVAFHGGNYRELYHILENHKFTKESHAKLQALWLEAHYQEAEKLRGRPLGPVDKYRVRKKFPLPRTIWDGEQKTHCFKERTRHLLREWYLQDPYPNPSKKRELAQATGLTPTQVGNWFKNRRQRDRAAAAKNRLQQQVLSQGSGRALRAEGDGTPEVLGVATSPAASLSSKAATSAISITSSDSECDI

SEQ ID NO: 5452 - protein, 328 aa, Homo sapiens
MSSYLEYVSCSSSGGVGGDVLSLAPKFCRSDARPVALQPAFPLGNGDGAFVSCLPLAAARPSPSPPAAPARPSVPPPAAPQYAQCTLEGAYEPGAAPAAAAGGADYGFLGSGPAYDFPGVLGRAADDGGSHVHYATSAVFSGGGSFLLSGQVDYAAFGEPGPFPACLKASADGHPGAFQTASPAPGTYPKSVSPASGLPAAFSTFEWMKVKRNASKKGKLAEYGAASPSSAIRTNFSTKQLTELEKEFHFNKYLTRARRIEIANCLHLNDTQVKIWFQNRRMKQKKREREGLLATAIPVAPLQLPLSGTTPTKFIKNPGSPSQSQEPS

SEQ ID NO: 5453 - protein, 603 aa, Homo sapiens
MGRRSGLLGLRPGPEPVALERVINKVHLKANHVVKRDVDEHLRIKTVYDKSVEELLPEKKNLVKNKLFPQAISYLEKTFQVRRPAGTILLSRQCATNQYLRKENDPHRYCTGECAAHTKCGPVIVPEEHLQQCRVYRGGKWPHGAVGVPDQEGISDADFVLYVGALATERCSHENIISYAAYCQQEANMDRPIAGYANLCPNMISTQPQEFVGMLSTVKHEVIHALGFSAGLFAFYHDKDGNPLTSRFADGLPPFNYSLGLYQWSDKVVRKVERLWDVRDNKIVRHTVYLLVTPRVVEEARKHFDCPVLEGMELENQGGVGTELNHWEKRLLENEAMTGSHTQNRVLSRITLALMEDTGRQMLSPYCDTLRSNPLQLTCRQDQRAVAVCNLQKFPKPLPQEYQYFDELSGIPAEDLPYYGGSVEIADYCPFSQEFSWHLSGEYQRSSDCRILENQPEIFKNYGAEKYGPHSVCLIQKSAFVMEKCERKLSYPDWGSGCYQVSCSPQGLKVWVQDTSYLCSRAGQVLPVSIQMNGWIHDGNLLCPSCWDFCELCPPETDPPATNLTRALPLDLCSCSSSLVVTLWLLLGNLFPLLAGFLLCIWH

SEQ ID NO: 5454 - protein, 692 aa, Homo sapiens
MELLPLWLCLGFHFLTVGWRNRSGTATAASQGVCKLVGGAADCRGQSLASVPSSLPPHARMLTLDANPLKTLWNHSLQPYPLLESLSLHSCHLERISRGAFQEQGHLRSLVLGDNCLSENYEETAAALHALPGLRRLDLSGNALTEDMAALMLQNLSSLRSVSLAGNTIMRLDDSVFEGLERLRELDLQRNYIFEIEGGAFDGLAELRHLNLAFNNLPCIVDFGLTRLRVLNVSYNVLEWFLATGGEAAFELETLDLSHNQLLFFPLLPQYSKLRTLLLRDNNMGFYRDLYNTSSPREMVAQFLLVDGNVTNITTVSLWEEFSSSDLADLRFLDMSQNQFQYLPDGFLRKMPSLSHLNLHQNCLMTLHIREHEPPGALTELDLSHNQLSELHLAPGLASCLGSLRLFNLSSNQLLGVPPGLFANARNITTLDMSHNQISLCPLPAASDRVGPPSCVDFRNMASLRSLSLEGCGLGALPDCPFQGTSLTYLDLSSNWGVLNGSLAPLQDVAPMLQVLSLRNMGLHSSFMALDFSGFGNLRDLDLSGNCLTTFPRFGGSLALETLDLRRNSLTALPQKAVSEQLSRGLRTIYLSQNPYDCCGVDGWGALQHGQTVADWAMVTCNLSSKIIRVTELPGGVPRDCKWERLDLGLLYLVLILPSCLTLLVACTVIVLTFKKPLLQVIKSRCHWSSVY

SEQ ID NO: 5455 - protein, 917 aa, Homo sapiens
MADEALAGLDEGALRKLLEVTADLAERRRIRSAIRELQRQELEREEEALASKRFRAERQDNKENWLHSQQREAEQRAALARLAGQLESMNDVEELTALLRSAGEYEERKLIRAAIRRVRAQEIEAATLAGRLYSGRPNSGSREDSKGLAAHRLEQCEVPEREEQEQQAEVSKPTPTPEGTSQDVTTVTLLLRAPPGSTSSSPASPSSSPTPASPEPPLEPAEAQCLTAEVPGSPEPPPSPPKTTSPEPQESPTLPSTEGQVVNKLLSGPKETPAAQSPTRGPSDTKRADVAGPRPCQRSLSVLSPRQPAQNRESTPLASGPSSFQRAGSVRDRVHKFTSDSPMAARLQDGTPQAALSPLTPARLLGPSLTSTTPASSSSGSSSRGPSDTSSRFSKEQRGVAQPLAQLRSCPQEEGPRGRGLAARPLENRAGGPVARSEEPGAPLPVAVGTAEPGGSMKTTFTIEIKDGRGQASTGRVLLPTGNQRAELTLGLRAPPTLLSTSSGGKSTITRVNSPGTLARLGSVTHVTSFSHAPPSSRGGCSIKMEAEPAEPLAAAVEAANGAEQTRVNKAPEGRSPLSAEELMTIEDEGVLDKMLDQSTDFEERKLIRAALRELRQRKRDQRDKERERRLQEARGRPGEGRGNTATETTTRHSQRAADGSAVSTVTKTERLVHSNDGTRTARTTTVESSFVRRSENGSGSTMMQTKTFSSSSSSKKMGSIFDREDQASPRAGSLAALEKRQAEKKKELMKAQSLPKTSASQARKAMIEKLEKEGAAGSPGGPRAAVQRSTSFGVPNANSIKQMLLDWCRAKTRGYEHVDIQNFSSSWSDGMAFCALVHNFFPEAFDYGQLSPQNRRQNFEVAFSSAEMLVDCVPLVEVDDMMIMGKKPDPKCVFTYVQSLYNHLRRHELRLRGKNV

SEQ ID NO: 5456 - protein, 412 aa, Homo sapiens
MAGSVGLALCGQTLVVRGGSRFLATSIASSDDDSLFIYDCSAAEKKSQENKGEDAPLDQGSGAILASTFSKSGSYFALTDDSKRLILFRTKPWQCLSVRTVARRCTALTFIASEEKVLVADKSGDVYSFSVLEPHGCGRLELGHLSMLLDVAVSPDDRFILTADRDEKIRVSWAAAPHSIESFCLGHTEFVSRISVVPTQPGLLLSSSGDGTLRLWEYRSGRQLHCCHLASLQELVDPQAPQKFAASRIAFWCQENCVALLCDGTPVVYIFQLDARRQQLVYRQQLAFQHQVWDVAFEETQGLWVLQDCQEAPLVLYRPVGDQWQSVPESTVLKKVSGVLRGNWAMLEGSAGADASFSSLYKATFDNVTSYLKKKEERLQQQLEKKQRRRSPPPGPDGHAKKMRPGEATLSC

SEQ ID NO: 5457 - protein, 776 aa, Homo sapiens
MGTVPDPLRSAKTSLIAASGKEDDLGEPQAASPRHRPALLCKNANGFSGAPAEPDLSPRAAAEALMQVCEHETTQPDMSSPGVFNEVQKAPATFNSPGNPQLPGSSQPAASAPSSAAGRDLIHTPLTMPANQHTCQSIPGDQPNAITSSMPEDSLMRSQRTSNREQPEKPSCPVGGVLSSSKDQVSCEFPSPETIQGTVQTPVTAARVVSHSSSPVGGPEGERQGAICDSEMRSCKPLTRESGCSENKQPSVTASGPQGTTSVTPQPTPLTSEPSACPPGPEKVPLPAQRQMSRFKEASTMTNQAESEIKEVPSRAWQDAEVQAVASVESRSVSTSPSILTAFLKESRAPEHFEQEQLRVICHSSGSHTLELSDSTLAPQESSQCPGIMPQVHIQAAAAESTAFQRENKLASLPGGVLKTSSINLVSSNAQHTCKEDGRLAGMTPVREESTAKKLAGTNSSSLKATAIDQISISACSQAETSYGLGKFETRPSEFAEKTTNGHKTDPDCKLSDSCGSISKADHSGSLDPTNKGDAREKKPASPQVVKEKESTGTDTSDAKTLLLNPKSQESGGTESAANPTPSPIRKNQESTLEENRQTKTATSLSLPSDPMGDSSPGSGKKTPSRSVKASPRRPSRVSEFLKEQKLNVTAAAAQVGLTPGDKKKQLGADSKLQLKQSKRVRDVVWDEQGMTWEVYGASLDAESLGIAIQNHLQRQIREHEKLIKTQNSQTRRSISSDTSSNKKLRGRQHSVFQSMLQNFRRPNCCVRPAPSSVLD

SEQ ID NO: 5458 - protein, 804 aa, Homo sapiens
MKLKDTKSRPKQSSCGKFQTKGIKVVGKWKEVKIDPNMFADGQMDDLVCFEELTDYQLVSPAKNPSSLFSKEAPKRKAQAVSEEEEEEEGKSSSPKKKIKLKKSKNVATEGTSTQKEFEVKDPELEAQGDDMVCDDPEAGEMTSENLVQTAPKKKKNKGKKGLEPSQSTAAIRDKLDILGAAETGSGKTLAFAIPMIHAVLQWQKRNAAPPPSNTEAPPGETRTEAGAETRSPGKAEAESDALPDDTVIESEALPSDIAAEARAKTGGTVSDQALLFGDDDAGEGPSSLIREKPVPKQNENEEENLDKEQTGNLKQELDDKSATCKAYPKRPLLGLVLTPTRELAVQVKQHIDAVARFTGIKTAILVGGMSTQKQQRMLNRRPEIVVATPGRLWELIKEKHYHLRNLRQLRCLVVDEADRMVEKGHFAELSQLLEMLNDSQYNPKRQTLVFSATLTLVHQAPARILHKKHTKKMDKTAKLDLLMQKIGMRGKPKVIDLTRNEATVETLTETKIHCETDEKDFYLYYFLMQYPGRSLVFANSISCIKRLSGLLKVLDIMPLTLHACMHQKQRLRNLEQFARLEDCVLLATDVAARGLDIPKVQHVIHYQVPRTSEIYVHRSGRTARATNEGLSLMLIGPEDVINFKKIYKTLKKDEDIPLFPVQTKYMDVVKERIRLARQIEKSEYRNFQACLHNSWIEQAAAALEIELEEDMYKGGKADQQEERRRQKQMKVLKKELRHLLSQPLFTESQKTKYPTQSGKPPLLVSAPSKSESALSCLSKQKKKKTKKPKEPQPEQPQPSTSAN

SEQ ID NO: 5459 - protein, 208 aa, Homo sapiens
MDFSIIQYSKFMTLLAMSLQNLKTLHMSLEESIKWLGEVMAEIGPTHSQKSEDWNIFDVKQANAIIDYLKISLFQHYKLYEFMFYSAREEIVIGTEQVIEVVKSACGPFPNPLEEGISFDIYSTFIEPPTILDTEMKRLDQEQGPEESQPETDTSDMDPLVGFTIEDVKSVLDQVTDDILIGIQTEINEKLQIQEEAFNARIEKLKKA

SEQ ID NO: 5460 - protein, 567 aa, Homo sapiens
MGSGSSSYRPKAIYLDIDGRIQKVIFSKYCNSSDIMDLFCIATGLPRTPYKVRPVAIKQLSAGVEDKRTTSRGQSAERPLRDRRVVGLEQPRREGAFESGQVEPRPREPQGCYQEGQRIPPEREELIQSVLAQVAEQFSRAFKINELKAEVANHLAVLEKRVELEGLKVVEIEKCKSDIKKMREELAARSSRTNCPCKYSFLDNHKKLTPRRDVPTYPKYLLSPETIEALRKPTFDVWLWEPNEMLSCLEHMYHDLGLVRDFSINPVTLRRWLFCVHDNYRNNPFHNFRHCFCVAQMMYSMVWLCSLQEKFSQTDILILMTAAICHDLDHPGYNNTYQINARTELAVRYNDISPLENHHCAVAFQILAEPECNIFSNIPPDGFKQIRQGMITLILATDMARHAEIMDSFKEKMENFDYSNEEHMTLLKMILIKCCDISNEVRPMEVAEPWVDCLLEEYFMQSDREKSEGLPVAPFMDRDKVTKATAQIGFIKFVLIPMFETVTKLFPMVEEIMLQPLWESRDRYEELKRIDDAMKELQKKTDSLTSGATEKSRERSRDVKNSEGDCA

SEQ ID NO: 5461 - protein, 469 aa, Homo sapiens
MQMADAATIATMNKAAGGDKLAELFSLVPDLLEAANTSGNASLQLPDLWWELGLELPDGAPPGHPPGSGGAESADTEARVRILISVVYWVVCALGLAGNLLVLYLMKSMQGWRKSSINLFVTNLALTDFQFVLTLPFWAVENALDFKWPFGKAMCKIVSMVTSMNMYASVFFLTAMSVTRYHSVASALKSHRTRGHGRGDCCGRSLGDSCCFSAKALCVWIWALAALASLPSAIFSTTVKVMGEELCLVRFPDKLLGRDRQFWLGLYHSQKVLLGFVLPLGIIILCYLLLVRFIADRRAAGTKGGAAVAGGRPTGASARRLSKVTKSVTIVVLSFFLCWLPNQALTTWSILIKFNAVPFSQEYFLCQVYAFPVSVCLAHSNSCLNPVLYCLVRREFRKALKSLLWRIASPSITSMRPFTATTKPEHEDQGLQAPAPPHAAAEPDLLYYPPGVVVYSGGRYDLLPSSSAY

SEQ ID NO: 5462 - protein, 733 aa, Homo sapiens
MAEVGEDSGARALLALRSAPCSPVLCAAAAAAAFPAAAPPPAPAQPQPPPGPPPPPPPPLPPGAIAGAGSSGGSSGVSGDSAVAGAAPALVAAAAASVRQSPGPALARLEGREFEFLMRQPSVTIGRNSSQGSVDLSMGLSSFISRRHLQLSFQEPHFYLRCLGKNGVFVDGAFQRRGAPALQLPKQCTFRFPSTAIKIQFTSLYHKEEAPASPLRPLYPQISPLKIHIPEPDLRSMVSPVPSPTGTISVPNSCPASPRGAGSSSYRFVQNVTSDLQLAAEFAAKAASEQQADTSGGDSPKDESKPPFSYAQLIVQAISSAQDRQLTLSGIYAHITKHYPYYRTADKGWQNSIRHNLSLNRYFIKVPRSQEEPGKGSFWRIDPASEAKLVEQAFRKRRQRGVSCFRTPFGPLSSRSAPASPTHPGLMSPRSGGLQTPECLSREGSPIPHDPEFGSKLASVPEYRYSQSAPGSPVSAQPVIMAVPPRPSSLVAKPVAYMPASIVTSQQPAGHAIHVVQQAPTVTMVRVVTTSANSANGYILTSQGAAGGSHDAAGAAVLDLGSEARGLEEKPTIAFATIPAAGGVIQTVASQMAPGVPGHTVTILQPATPVTLGQHHLPVRAVTQNGKHAVPTNSLAGNAYALTSPLQLLATQASSSAPVVVTRVCEVGPKEPAAAVAATATTTPATATTASASASSTGEPEVKRSRVEEPSGAVTTPAGVIAAAGPQGPGTGE

SEQ ID NO: 5463 - protein, 74 aa, Homo sapiens
MATQGHLTFKDVAIEFSQEEWKCLEPVQKALYKDVMLENYRNLVFLGWRIMARSHLTATSVSQVQAILLPQPPE

SEQ ID NO: 5464 - protein, 257 aa, Homo sapiens
MSILFYVIFLAYLRGIQGNNMDQRSLPEDSLNSLIIKLIQADILKNKLSKQMVDVKENYQSTLPKAEAPREPERGGPAKSAFQPVIAMDTELLRQQRRYNSPRVLLSDSTPLEPPPLYLMEDYVGSPVVANRTSRRKRYAEHKSHRGEYSVCDSESLWVTDKSSAIDIRGHQVTVLGEIKTGNSPVKQYFYETRCKEARPVKNGCRGIDDKHWNSQCKTSQTYVRALTSENNKLVGWRWIRIDTSCVCALSRKIGRT

SEQ ID NO: 5465 - protein, 265 aa, Homo sapiens
MVSRPRSPSAFPAPWWGQQPGGPGPAKRLRLEEPAGPEPRAAPSLEDPAGDPAVDALTSIVVLAAGCALRVPLDDVDLVLEPAPTSILRVSLGGHTLILIPEVLLSSVDERSGAQHDSSAGLEVDVFLGAVREDVVVELEFCASVPEIAAQEEAYEEDADPEFPELRMDSPTGSAAGLYPSSRSMFIPYREGPIPEPCALAPNPSSERRSPRPIFDLEFRLLEPVPSSPLQPLPPSPCVGSPGPHARSPLPERPPCKARRRLFQA

SEQ ID NO: 5466 - protein, 1107 aa, Homo sapiens
MPVMKGLLAPQNTFLDTIATRFDGTHSNFILANAQVAKGFPIVYCSDGFCELAGFARTEVMQKSCSCKFLFGVETNEQLMLQIEKSLEEKTEFKGEIMFYKKNGSPFWCLLDIVPIKNEKGDVVLFLASFKDITDTKVKITPEDKKEDKVKGRSRAGTHFDSARRRSRAVLYHISGHLQRREKNKLKINNNVFVDKPAFPEYKVSDAKKSKFILLHFSTFKAGWDWLILLATFYVAVTVPYNVCFIGNDDLSTTRSTTVSDIAVEILFIIDIILNFRTTYVSKSGQVIFEARSICIHYVTTWFIIDLIAALPFDLLYAFNVTVVSLVHLLKTVRLLRLLRLLQKLDRYSQHSTIVLTLLMSMFALLAHWMACIWYVIGKMEREDNSLLKWEVGWLHELGKRLESPYYGNNTLGGPSIRSAYIAALYFTLSSLTSVGFGNVSANTDAEKIFSICTMLIGALMHALVFGNVTAIIQRMYSRWSLYHTRTKDLKDFIRVHHLPQQLKQRMLEYFQTTWSVNNGIDSNELLKDFPDELRSDITMHLNKEILQLSLFECASRGCLRSLSLHIKTSFCAPGEYLLRQGDALQAIYFVCSGSMEVLKDSMVLAILGKGDLIGANLSIKDQVIKTNADVKALTYCDLQCIILKGLFEVLDLYPEYAHKFVEDIQHDLTYNLREGHESDVISRLSNKSMVSQSEPKGNGNINKRLPSIVEDEEEEEEGEEEEAVSLSPICTRGSSSRNKKVGSNKAYLGLSLKQLASGTVPFHSPIRVSRSNSPKTKQEIDPPNHNKRKEKNLKLQLSTLNNAGPPDLSPRIVDGIEDGNSSEESQTFDFGSERIRSEPRISPPLGDPEIGAAVLFIKAEETKQQINKLNSEVTTLTQEVSQLGKDMRNVIQLLENVLSPQQPSRFCSLHSTSVCPSRESLQTRTSWSAHQPCLHLQTGGAAYTQAQLCSSNITSDIWSVDPSSVGSSPQRTGAHEQNPADSELYHSPSLDYSPSHYQVVQEGHLQFLRCISPHSDSTLTPLQSISATLSSSVCSSSETSLHLVLPSRSEEGSFSQGTVSSFSLENLPGSWNQEGMASASTKPLENLPLEVVTSTAEVKDNKAINV

SEQ ID NO: 5467 - protein, 655 aa, Homo sapiens
MVTTLGPKMAAEWGGGVGYSGSGPGRSRWRWSGSVWVRSVLLLLGGLRASATSTPVSLGSSPPCRHHVPSDTEVINKVHLKANHVVKRDVDEHLRIKTVYDKSVEELLPEKKNLVKNKLFPQAISYLEKTFQVRRPAGTILLSRQCATNQYLRKENDPHRYCTGECAAHTKCGPVIVPEEHLQQCRVYRGGKWPHGAVGVPDQEGISDADFVLYVGALATERCSHENIISYAAYCQQEANMDRPIAGYANLCPNMISTQPQEFVGMLSTVKHEVIHALGFSAGLFAFYHDKDGNPLTSRFADGLPPFNYSLGLYQWSDKVVRKVERLWDVRDNKIVRHTVYLLVTPRVVEEARKHFDCPVLEGMELENQGGVGTELNHWEKRLLENEAMTGSHTQNRVLSRITLALMEDTGRQMLSPYCDTLRSNPLQLTCRQDQRAVAVCNLQKFPKPLPQEYQYFDELSGIPAEDLPYYGGSVEIADYCPFSQEFSWHLSGEYQRSSDCRILENQPEIFKNYGAEKYGPHSVCLIQKSAFVMEKCERKLSYPDWGSGCYQVSCSPQGLKVWVQDTSYLCSRAGQVLPVSIQMNGWIHDGNLLCPSCWDFCELCPPETDPPATNLTRALPLDLCSCSSSLVVTLWLLLGNLFPLLAGFLLCIWH

SEQ ID NO: 5468 - protein, 601 aa, Homo sapiens
MRVVRLLRLRAALTLLGEVPRRPASRGVPGSRRTQKGSGARWEKEKHEDGVKWRQLEHKGPYFAPPYEPLPDGVRFFYEGRPVRLSVAAEEVATFYGRMLDHEYTTKEVFRKNFFNDWRKEMAVEEREVIKSLDKCDFTEIHRYFVDKAAARKVLSREEKQKLKEEAEKLQQEFGYCILDGHQEKIGNFKIEPPGLFRGRGDHPKMGMLKRRITPEDVVINCSRDSKIPEPPAGHQWKEVRSDNTVTWLAAWTESVQNSIKYIMLNPCSKLKGETAWQKFETARRLRGFVDEIRSQYRADWKSREMKTRQRAVALYFIDKLALRAGNEKEDGEAADTVGCCSLRVEHVQLHPEADGCQHVVEFDFLGKDCIRYYNRVPVEKPVYKNLQLFMENKDPRDDLFDRLTTTSLNKHLQELMDGLTAKVFRTYNASITLQEQLRALTRAEDSIAAKILSYNRANRVVAILCNHQRATPSTFEKSMQNLQTKIQAKKEQVAEARAELRRARAEHKAQGDGKSRSVLEKKRRLLEKLQEQLAQLSVQATDKEENKQVALGTSKLNYLDPRISIAWCKRFRVPVEKIYSKTQRERFAWALAMAGEDFEF

SEQ ID NO: 5469 - protein, 995 aa, Homo sapiens
MSGSPSLTARAEKVSVDAGRGGGESLQEASPRLADHGSSSGGGWEVKRSQRLRRGPSSPRRPYQDMEYERRGGRGDRTGRYGATDRSQDDGGENRSRDHDYRDMDYRSYPREYGSQEGKHDYDDSSEEQSAEDSYEASPGSETQRRRRRRHRHSPTGPPGFPRDGDYRDQDYRTEQGEEEEEEEDEEEEEKASNIVMLRMLPQAATEDDIRGQLQSHGVQAREVRLMRNKSSGQSRGFAFVEFSHLQDATRWMEANQHSLNILGQKVSMHYSDPKPKINEDWLCNKCGVQNFKRREKCFKCGVPKSEAEQKLPLGTRLDQQTLPLGGRELSQGLLPLPQPYQAQGVLASQALSQGSEPSSENANDTIILRNLNPHSTMDSILGALAPYAVLSSSNVRVIKDKQTQLNRGFAFIQLSTIVEAAQLLQILQALHPPLTIDGKTINVEFAKGSKRDMASNEGSRISAASVASTAIAAAQWAISQASQGGEGTWATSEEPPVDYSYYQQDEGYGNSQGTESSLYAHGYLKGTKGPGITGTKGDPTGAGPEASLEPGADSVSMQAFSRAQPGAAPGIYQQSAEASSSQGTAANSQSYTIMSPAVLKSELQSPTHPSSALPPATSPTAQESYSQYPVPDVSTYQYDETSGYYYDPQTGLYYDPNSQYYYNAQSQQYLYWDGERRTYVPALEQSADGHKETGAPSKEGKEKKEKHKTKTAQQIAKDMERWARSLNKQKENFKNSFQPISSLRDDERRESATADAGYAILEKKGALAERQHTSMDLPKLASDDRPSPPRGLVAAYSGESDSEEEQERGGPEREEKLTDWQKLACLLCRRQFPSKEALIRHQQLSGLHKQNLEIHRRAHLSENELEALEKNDMEQMKYRDRAAERREKYGIPEPPEPKRRKYGGISTASVDFEQPTRDGLGSDNIGSRMLQAMGWKEGSGLGRKKQGIVTPIEAQTRVRGSGLGARGSSYGVTSTESYKETLHKTMVTRFNEAQ

SEQ ID NO: 5470 - protein, 914 aa, Homo sapiens
MSQSQNAIFTSPTGEENLMNSNHRDSESITDVCSNEDLPEVELVSLLEEQLPQYRLKVDTLFLYENQDWTQSPHQRQHASDALSPVLAEETFRYMILGTDRVEQMTKTYNDIDMVTHLLAERDRDLELAARIGQALLKRNHVLSEQNESLEEQLGQAFDQVNQLQHELCKKDELLRIVSIASEESETDSSCSTPLRFNESFSLSQGLLQLEMLQEKLKELEEENMALRSKACHIKTETVTYEEKEQQLVSDCVKELRETNAQMSRMTEELSGKSDELIRYQEELSSLLSQIVDLQHKLKEHVIEKEELKLHLQASKDAQRQLTMELHELQDRNMECLGMLHESQEEIKELRSRSGPTAHLYFSQSYGAFTGESLAAEIEGTMRKKLSLDEESSLFKQKAQQKRVFDTVRIANDTRGRSISFPALLPIPGSNRSSVIMTAKPFESGLQQTEDKSLLNQGSSSEEVAGSSQKMGQPGPSGDSDLATALHRLSLRRQNYLSEKQFFAEEWQRKIQVLADQKEGVSGCVTPTESLASLCTTQSEITDLSSASCLRGFMPEKLQIVKPLEGSQTLYHWQQLAQPNLGTILDPRPGVITKGFTQLPGDAIYHISDLEEDEEEGITFQVQQPLEVEEKLSTSKPVTGIFLPPITSAGGPVTVATANPGKCLSCTNSTFTFTTCRILHPSDITQVTPSSGFPSLSCGSSGSSSSNTAVNSPALSYRLSIGESITNRRDSTTTFSSTMSLAKLLQERGISAKVYHSPISENPLQPLPKSLAIPSTPPNSPSHSPCPSPLPFEPRVHLSENFLASRPAETFLQEMYGLRPSRNPPDVGQLKMNLVDRLKRLGIARVVKNPGAQENGRCQEAEIGPQKPDSAVYLNSGSSLLGGLRRNQSLPVIMGSFAAPVCTSSPKMGVLKED

SEQ ID NO: 5471 - protein, 515 aa, Homo sapiens
MAPEMDQFYRSTMAIYKSIMEQFNPALENLVYLGNNYLRAFHALSEAAEVYFSAIQKIGERALQSPTSQILGEILVQMSDTQRHLNSDLEVVVQTFHGGLLQHMEKNTKLDMQFIKDSRQHYELEYRHRAANLEKCMSELWRMERKRDKNVREMKESVNRLHAQMQAFVSESQRAAELEEKRRYRFLAEKHLLLSNTFLQFFGRARGMLQNRVLLWKEQSEASRSPSRAHSPGLLGPALGPPYPSGRLTPTCLDMPPRPLGEFSSPRSRHGSGSYGTEPDARPASQLEPDRRSLPRTPSASSLYSGSAQSSRSNSFGERPGGGGGARRVRALVSHSEGANHTLLRFSAGDVVEVLVPEAQNGWLYGKLEGSSASGWFPEAYVKALEEGPVNPMTPVTPMTSMTSMSPMTPMNPGNELPSRSYPLRGSHSLDDLLDRPGNSTPSRVPSRAPSPAPPPLPSSRRSSMGSTAVATDVKKLMSSEQYPPQELFPRGTNPFATVKLRPTITNDRSAPLIR

SEQ ID NO: 5472 - protein, 313 aa, Homo sapiens
MPIANDTQFHTSSFLLLGIPGLEDVHIWIGFPFFSVYLIALLGNAAIFFVIQTEQSLHEPMYYCLAMLDSIDLSLSTATIPKMLGIFWFNIKEISFGGYLSQMFFIHFFTVMESIVLVAMAFDRYIAICKPLWYTMILTSKIISLIAGIAVLRSLYMVIPLVFLLLRLPFCGHRIIPHTYCEHMGIARLACASIKVNIMFGLGSISLLLLDVLLIILSHIRILYAVFCLPSWEARLKALNTCGSHIGVILAFSTPAFFSFFTHCFGHDIPQYIHIFLANLYVVVPPTLNPVIYGVRTKHIRETVLRIFFKTDH

SEQ ID NO: 5473 - protein, 821 aa, Homo sapiens
MAKFALNQNLPDLGGPRLCPVPAAGGARSPSSPYSVETPYGFHLDLDFLKYIEELERGPAARRAPGPPTSRRPRAPRPGLAGARSPGAWTSSESLASDDGGAPGILSQGAPSGLLMQPLSPRAPVRNPRVEHTLRETSRRLELAQTHERAPSPGRGVPRSPRGSGRSSPAPNLAPASPGPAQLQLVREQMAAALRRLRELEDQARTLPELQEQVRALRAEKARLLAGRAQPEPDGEAETRPDKLAQLRRLTERLATSERGGRARASPRADSPDGLAAGRSEGALQVLDGEVGSLDGTPQTREVAAEAVPETREAGAQAVPETREAGVEAAPETVEADAWVTEALLGLPAAAERELELLRASLEHQRGVSELLRGRLRELEEAREAAEEAAAGARAQLREATTQTPWSCAEKAAQTESPAEAPSLTQESSPGSMDGDRAVAPAGILKSIMKKRDGTPGAQPSSGPKSLQFVGVLNGEYESSSSEDASDSDGDSENGGAEPPGSSSGSGDDSGGGSDSGTPGPPSGGDIRDPEPEAEAEPQQVAQGRCELSPRLREACVALQRQLSRPRGVASDGGAVRLVAQEWFRVSSQRRSQAEPVARMLEGVRRLGPELLAHVVNLADGNGNTALHYSVSHGNLAIASLLLDTGACEVNRQNRAGYSALMLAALTSVRQEEEDMAVVQRLFCMGDVNAKASQTGQTALMLAISHGRQDMVATLLACGADVNAQDADGATALMCASEYGRLDTVRLLLTQPGCDPAILDNEGTSALAIALEAEQDEVAALLHAHLSSGQPDTQSESPPGSQTATPGEGECGDNGENPQVQ

SEQ ID NO: 5474 - protein, 251 aa, Homo sapiens
MAMSSFLINSNYVDPKFPPCEEYSQSDYLPSDHSPGYYAGGQRRESSFQPEAGFGRRAACTVQRYAACRDPGPPPPPPPPPPPPPPPGLSPRAPAPPPAGALLPEPGQRCEAVSSSPPPPPCAQNPLHPSPSHSACKEPVVYPWMRKVHVSTVNPNYAGGEPKRSRTAYTRQQVLELEKEFHYNRYLTRRRRVEIAHALCLSERQIKIWFQNRRMKWKKDHKLPNTKIRSGGAAGSAGGPPGRPNGGPRAL

SEQ ID NO: 5475 - protein, 2016 aa, Homo sapiens [sequence omitted]

SEQ ID NO: 5476 - protein, 1480 aa, Homo sapiens
ELFGNSSQVGINLPTGECSIFGYFVDIEQCEFIPWSDLVPNDQTLIQRGTSLLTNLQRSGGNFLKITECGECINYTATRDTTCLSFLMSLLLKNSCPVLLTGESGVGKTAAINQMLEKLEGPGAFDIKHGSILGDTLLYSEIKKSSSLKQNITILIPETHKTATGSSDNPTKKPEVRTNKKLLKNNDHKGVVVSTINFSTNVTAAKTKEMILKKLIRRTKDTLGAPKNNRILIFIDDMNMPVSDMYGAQPPLELIRQLLDLGGVYDTEKNTWKNIQDLSIVAACVPVVNDISPRLLKHFSMLVLPHPSQDILCTIFQLLLGLLQADRTVVNSKEMAALLFVHEATRVFHDRLIDFTDKSLFYRLLSRELENCFQIQWTQENLMNHSTVFLDFLDINKTHRKKIYQNTSDYNKLASVLDEFQMKLGSISLELSHSMVFFKEAIEHIIRATRVLRQPGSHMLLIGIDGCGKKTCATLACYLTDNKLYRVPISHKCAYIEFKEVFKKVFIHAGLKGKPTVLMVPNLNIEQDSFLEDLNYIISSGRIPDLFENVELDSIAMKIRYLTEQSGHMDNRQSLLSFFQKRIYKNLHIFVIMSPEGPSFRQNCRVYPSMISSCTIDWYERWPEEALLIVANSFLKEKVNFENRENLKEKLAPTCVQIHKSMKDLNRKYFEETGRFYYTTPNSYLQFMETFAHILRAREEEMQTKRDRFHMGLSTILEATTLVTEMQEELLILGPQVEQKTKETETLMEKLRKDSQVVEKVQMLVKQDEEIVAEEVRIVEDYAQKTANELKSVLPAFDKAIVALNALDKADVAELRVYTRPPFLVLTVMNAVCILLQKKPNWATAKLLLSETGFLKKLINLDKDSIPDKVFVKLKKIVTLPDFNPHKISLVSVACCSLCQWVIALNNYHEVQKVVGPKQIQVAEAQNVLKIARQRLAEKQRGLQLVEEHLLFLQAAYKDTVAEKQLLANRKTMASRRFQCASVLLTVLEDEKISRWHNQGLPHGQYSVENAILIKNGQQWPLLIDPHRQAHKWIRQMEGSRLQKLSIEDSNYTKKIENAMKTGGSVLLQNLLETLAPGLKAILKKDIYQKKGHYFIRVGDAEFEYNSNFRLYLSTEIDNPHFLPSVYNFVTMINFTVTFQGLQDQLLSTVVTHEVPHLEDQRSKLLESISLDAITLEELEEKTLNLLQKALGSILDDDKIVDTLRKSKMTSNEISKRIEATKKAESEIQAIRKNYLPIATRGALLYFLVADLTQINYMYQFSLDWFHQVFVSSVVSKSKEQEHSFKREKVSPKEVHEFISISKEPNLENEKNLLDKHIKSAIDMLTKSIFKVVSSALFNEDKLCFSFRLCTVIMQNNANGNLIQDDIGFLPEEEWNIFLYSGILINIKSALSQSRLTSTFEIGESQHLQWLSDSRWRQCQYVSTHLEPFSLLCKSLLSNVSQWDTFKNSKAVYSLISTPFSSENASLEENTKPPEESKSS

SEQ ID NO: 5477 - protein, 778 aa, Homo sapiens
MVSKLEREKTQEAKRIRELEQRKHTVLVTELKAKLHEEKMKELQAVRENLIKQHEQEMSRTVKVRDGEIQRLKSALCALRDGSSDKVRTALTIEAREEARKLFDTERLKLLQEIADLKTAKKQVDEALSNMIQADKIKAGDLRSEHQSHQEAISKIKWESERDIRRLMDEIKAKDRIIFSLEKELETQTGYVQKLQLQKEALDEQLFLVKEAECNMSSPKREIPGRAGDGSEHCSSPDLRRNQKRIAELNATIRKLEDRNTLLGDERNELLKRVRETEKQCKPLLERNKCLAKRNDELMVSLQRMEEKLKAVTKENSEMREKITSHPPLKKLKSLNDLDQANEEQETEFLKLQVIEQQNIIDELTRDREKLIRRRKHRRSSKPIKRPVLDPFIGYDEDSMDSETSSMASFRTDRTPATPDDDLDESLAAEESELRFRQLTKEYQALQRAYALLQEQTGGIIDAEREAKAQEQLQAEVLRYKAKIEDLEATLAQKGQDSHWVEDKQLFIKRNQELLEKIEKQEAENHRLQQELQDARDQNELLEFRNLELEERERRSPPFNLQIHPFSDGVSALQIYCMKEGVKDVNIPDLIKQLDILGDNGNLRNEEQVAIIQASTVLSLAEKWIQQIEGAEAALHQKMMELESDMEQFCKIKGYLEEELDYRKQALDQAYMRIQELEATLYNALQQETVIKFGELLSEKQQEELRTAVEKLRRQMLRKSREYDCQILQERMELLQQAHQRIRDLEDKTDIQKRQIKDLEEKFLFLFLFFSLAFILWP

SEQ ID NO: 5478 - protein, 917 aa, Homo sapiens
MFRKARRVNVRKRNDSEEEERERDEEQEPPPLLPPPGTGEEAGPGGGDRAPGGESLLGPGPSPPSALTPGLGAEAGGGFPGGAEPGNGLKPRKRPRENKEVPRASLLSFQDEEEENEEVFKVKKSSYSKKIVKLLKKEYKEDLEKSKIKTELNSSAESEQPLDKTGHVKDTNQEDGVIISEHGEDEMDMESEKEEEKPKTGGAFSNALSSLNVLRPGEIPDAAFIHAARKKRQMARELGDFTPHDNEPGKGRLVREDENDASDDEDDDEKRRIVFSVKEKSQRQKIAEEIGIEGSDDDALVTGEQDEELSRWEQEQIRKGINIPQVQASQPAEVNMYYQNTYQTMPYGSSYGIPYSYTAYGSSDAKSQKTDNTVPFKTPSNEMTPVTIDLVKKQLKDRLDSMKELHKTNRQQHEKHLQSRVDSTRAIERLEGSSGGIGERYKFLQEMRGYVQDLLECFSEKVPLINELESAIHQLYKQRASRLVQRRQDDIKDESSEFSSHSNKALMAPNLDSFGRDRALYQEHAKRRIAEREARRTRRRQAREQTGKMADHLEGLSSDDEETSTDITNFNLEKDRISKESGKVFEDVLESFYSIDCIKSQFEAWRSKYYTSYKDAYIGLCLPKLFNPLIRLQLLTWTPLEAKCRDFENMLWFESLLFYGCEEREQEKDDVDVALLPTIVEKVILPKLTVIAENMWDPFSTTQTSRMVGITLKLINGYPSVVNAENKNTQVYLKALLLRMRRTLDDDVFMPLYPKNVLENKNSGPYLFFQRQFWSSVKLLGNFLQWYGIFSNKTLQELSIDGLLNRYILMAFQNSEYGDDSIKKAQNVINCFPKQWFMNLKGERTISQLENFCRYLVHLADTIYRNSIGCSDVEKRNARENIKQIVKLLASVRALDHAMSVASDHNVKEFKSLIEGK

SEQ ID NO: 5479 - protein, 953 aa, Homo sapiens
MALVFQFGQPVRAQPLPGLCHGKLIRTNACDVCNSTDLPEVEIISLLEEQLPHYKLRADTIYGYDHDDWLHTPLISPDANIDLTTEQIEETLKYFLLCAERVGQMTKTYNDIDAVTRLLEEKERDLELAARIGQSLLKKNKTLTERNELLEEQVEHIREEVSQLRHELSMKDELLQFYTSAAEESEPESVCSTPLKRNESSSSVQNYFHLDSLQKKLKDLEEENVVLRSEASQLKTETITYEEKEQQLVNDCVKELRDANVQIASISEELAKKTEDAARQQEEITHLLSQIVDLQKKAKACAVENEELVQHLGAAKDAQRQLTAELRELEDKYAECMEMLHEAQEELKNLRNKTMPNTTSRRYHSLGLFPMDSLAAEIEGTMRKELQLEEAESPDITHQKRVFETVRNINQVVKQRSLTPSPMNIPGSNQSSAMNSLLSSCVSTPRSSFYGSDIGNVVLDNKTNSIILETEAADLGNDERSKKPGTPGTPGSHDLETALRRLSLRRENYLSERRFFEEEQERKLQELAEKGELRSGSLTPTESIMSLGTHSRFSEFTGFSGMSFSSRSYLPEKLQIVKPLEGSATLHHWQQLAQPHLGGILDPRPGVVTKGFRTLDVDLDEVYCLNDFEEDDTGDHISLPRLATSTPVQHPETSAHHPGKCMSQTNSTFTFTTCRILHPSDELTRVTPSLNSAPTPACGSTSHLKSTPVATPCTPRRLSLAESFTNTRESTTTMSTSLGLVWLLKERGISAAVYDPQSWDRAGRGSLLHSYTPKMAVIPSTPPNSPMQTPTSSPPSFEFKCTSPPYDNFLASKPASSILREVREKNVRSSESQTDVSVSNLNLVDKVRRFGVAKVVNSGRAHVPTLTEEQGPLLCGPPGPAPALVPRGLVPEGLPLRCPTVTSAIGGLQLNSGIRRNRSFPTMVGSSMQMKAPVTLTSGILMGAKLSKQTSLR

SEQ ID NO: 5480 - protein, 540 aa, Homo sapiens
MPNKNKKEKESPKAGKSGKSSKEGQDTVESEQISVRKNSLVAVPSTVSAKIKVPVSQPIVKKDKRQNSSRFSASNNRELQKLPSLKDVPPADQEKLFIQKLRQCCVLFDFVSDPLSDLKWKEVKRAALSEMVEYITHNRNVITEPIYPEVVHMFAVNMFRTLPPSSNPTGAEFDPEEDEPTLEAAWPHLQLVYEFFLRFLESPDFQPNIAKKYIDQKFVLQLLELFDSEDPRERDFLKTTLHRIYGKFLGLRAYIRKQINNIFYRFIYETEHHNGIAELLEILGSIINGFALPLKEEHKIFLLKVLLPLHKVKSLSVYHPQLAYCVVQFLEKDSTLTEPVVMALLKYWPKTHSPKEVMFLNELEEILDVIEPSEFVKIMEPLFRQLAKCVSSPHFQVAERALYYWNNEYIMSLISDNAAKILPIMFPSLYRNSKTHWNKTIHGLIYNALKLFMEMNQKLFDDCTQQFKAEKLKEKLKMKEREEAWVKIENLAKANPQAQKDPKKDRPLARRKSELPQDPHTKKALEAHCRADELASQDGR

SEQ ID NO: 5481 - protein, 514 aa, Homo sapiens
MSRESDVEAQQSHGSSACSQPHGSVTQSQGSSSQSQGISSSSTSTMPNSSQSSHSSSGTLSSLETVSTQELYSIPEDQEPEDQEPEEPTPAPWARLWALQDGFANLECVNDNYWFGRDKSCEYCFDEPLLKRTDKYRTYSKKHFRIFREVGPKNSYIAYIEDHSGNGTFVNTELVGKGKRRPLNNNSEIALSLSRNKVFVFFDLTVDDQSVYPKALRDEYIMSKTLGSGACGEVKLAFERKTCKKVAIKIISKRKFAIGSAREADPALNVETEIEILKKLNHPCIIKIKNFFDAEDYYIVLELMEGGELFDKVVGNKRLKEATCKLYFYQMLLAVQITDFGHSKILGETSLMRTLCGTPTYLAPEVLVSVGTAGYNRAVDCWSLGVILFICLSGYPPFSEHRTQVSLKDQITSGKYNFIPEVWAEVSEKALDLVKKLLVVDPKARFTTEEALRHPWLQDEDMKRKFQDLLSEENESTALPQVLAQPSTSRKRPREGEAEGAETTKRPAVCAAVL

SEQ ID NO: 5482 - protein, 315 aa, Homo sapiens
MTHQDLSITAKLINGGVAGLVGVTCVFPIDLAKTRLQNQHGKAMYKGMIDCLMKTARAEGFFGMYRGAAVNLTLVTPEKAIKLAANDFFRRLLMEDGMQRNLKMEMLAGCGAGMCQVVVTCPMEMLKIQLQDAGRLAVHHQGSASAPSTSRSYTTGSASTHRRPSATLIAWELLRTQGLAGLYRGLGATLLRDIPFSIIYFPLFANLNNLGFNELAGKASFAHSFVSGCVAGSIAAVAVTPLDVLKTRIQTLKKGLGEDMYSGITDCARKLWIQEGPSAFMKGAGCRALVIAPLFGIAQGVYFIGIGERILKCFD

SEQ ID NO: 5483 - protein, 309 aa, Homo sapiens
MENRNNMTEFVLLGLTENPKMQKIIFVVFFVIYIITVVGYVLIVVTITASPSLGSPMYLSLAYLSFIDACYSSVNTPNLITHSLYGKKAILFNGCMTQVFGEHFFGGAEGILLTVMAYDHYVAICKPLHYMTIMNQCVCALLMGVVWMGGFLHATIQILFIFQLPFCGPNVIDHFMCDLNPLLNLACTDTHMLELFIAANSGFICLLNFALLLVSYVVILCSLRTHSLEARHKALSTCVSHITVVILFFVPCIFVYMRPAATLPIDKAVAIFYTMITPMLNPLIYTLKNAQMKNAIRKLCSRKDISGDK

SEQ ID NO: 5484 - protein, 398 aa, Homo sapiens
MTVTYSSKVANATFFGFHRLLLKWRGSIYKLLYREFIVFAVLYTAISLVYRLLLTGVQKRYFEKLSIYCDRYAEQIPVTFVLGFYVTLVVNRWWNQFVNLPWPDRLMFLISSSVHGSDEHGRLLRRTLMRYVNLTSLLIFRSVSTAVYKRFPTMDHVVEAGFMTTDERKLFNHLKSPHLKYWVPFIWFGNLATKARNEGRIRDSVDLQSLMTEMNRYRSWCSLLFGYDWVGIPLVYTQVVTLAVYTFFFACLIGRQFLDPTKGYAGHDLDLYIPIFTLLQFFFYAGWLKVAEQLINPFGEDDDDFETNWCIDRNLQVSLLAVDEMHMSLPKMKKDIYWDDSAARPPYTLAAADYCIPSFLGSTVQMGKQMPKNEWKMEDIKIPLPQPQFQCAKSDPGG

SEQ ID NO: 5485 - protein, 365 aa, Homo sapiens
MSSSVEQKKGPTRQRKCGFCKSNRDKECGQLLISENQKVAAHHKCMLFSSALVSSHSDNESLGGFSIEDVQKEIKRGTKLMCSLCHCPGATIGCDVKTCHRTYHYHCALHDKAQIREKPSQGIYMVYCRKHKKTAHNSEADLEESFNEHELEPSSPKSKKKSRKGRPRKTNFKGLSEDTRSTSSHGTDEMESSSYRDRSPHRSSPSDTRPKCGFCHVGEEENEARGKLHIFNAKKAAAHYKCMLFSSGTVQLTTTSRAEFGDFDIKTVLQEIKRGKRMKCTLCSQPGATIGCEIKACVKTYHYHCGVQDKAKYIENMSRGIYKLYCKNHSGNDERDEEDEERESKSRGKVEIDQQQLTQQQLNGN

SEQ ID NO: 5486 - protein, 558 aa, Homo sapiens
MHRGGQPLKKRRGSFKMAELDQLPDESSSAKALVSLKEGSLSNTWNEKYSSLQKTPVWKGRNTSSAVEMPFRNSKRSRLFSDEDDRQINTRSPKRNQRVAMVPQKFTATMSTPDKKASQKIGFRLRNLLKLPKAHKWCIYEWFYSNIDKPLFEGDNDFCVCLKESFPNLKTRKLTRVEWGKIRRLMGKPRRCSSAFFEEERSALKQKRQKIRLLQQRKVADVSQFKDLPDEIPLPLVIGTKVTARLRGVHDGLFTGQIDAVDTLNATYRVTFDRTGLGTHTIPDYEVLSNEPHETMPIAAFGQKQRPSRFFMTPPRLHYTPPLQSPIIDNDPLLGQSPWRSKISGSDTETLGGFPVEFLIQVTRLSKILMIKKEHIKKLREMNTEAEKLKSYSMPISIEFQRRYATIVLELEQLNKDLNKVLHKVQQYCYELAPDQGLQPADQPTDMRRRCEEEAQEIVRHANSSTGQPCVENENLTDLISRLTAILLQIKCLAEGGDLNSFEFKSLTDSLNDIKSTIDASNISCFQNNVEIHVAHIQSGLSQMGNLHAFAANNTNRD

SEQ ID NO: 5487 - protein, 204 aa, Homo sapiens
MSTETELQVAVKTSAKKDSRKKGQDRSEATLIKRFKGEGVRYKAKLIGIDEVSAARGDKLCQDSMMKLKGVVAGARSKGEHKQKIFLTISFGGIKIFDEKTGALQHHHAVHEISYIAKDITDHRAFGYVCGKEGNHRFVAIKTAQAAEPVILDLRDLFQLIYELKQREELEKKAQKDKQCEQAVYQVPTSQKKEGVYDVPKSQP

SEQ ID NO: 5488 - protein, 987 aa, Homo sapiens
MGKVLESSLWRSSDFGTSYTKLTLQPGVTTVIDNFYICPTNKRKVILVSSSLSDRDQSLFLSADEGATFQKQPIPFFVETLIFHPKEEDKVLAYTKESKLYVSSDLGKKWTLLQERVTKDHVFWSVSGVDADPDLVHVEAQDLGGDFRYVTCAIHNCSEKMLTAPFAGPIDHGSLTVQDDYIFFKATSANQTKYYVSYRRNEFVLMKLPKYALPKDLQIISTDESQVFVAVQEWYQMDTYNLYQSDPRGVRYALVLQDVRSSRQAEESVLIDILEVRGVKGVFLANQKIDGKVMTLITYNKGRDWDYLRPPSMDMNGKPTNCKPPDCHLHLHLRWADNPYVSGTVHTKDTAPGLIMGAGNLGSQLVEYKEEMYITSDCGHTWRQVFEEEHHILYLDHGGVIVAIKDTSIPLKILKFSVDEGLTWSTHNFTSTSVFVDGLLSEPGDETLVMTVFGHISFRSDWELVKVDFRPSFSRQCGEEDYSSWELSNLQGDRCIMGQQRSFRKRKSTSWCIKGRSFTSALTSRVCECRDSDFLCDYGFERSSSSESSTNKCSANFWFNPLSPPDDCALGQTYTSSLGYRKVVSNVCEGGVDMQQSQVQLQCPLTPPRGLQVSIQGEAVAVRPGEDVLFVVRQEQGDVLTTKYQVDLGDGFKAMYVNLTLTGEPIRHRYESPGIYRVSVRAENTAGHDEAVLFVQVNSPLQALYLEVVPVIGLNQEVNLTAVLLPLNPNLTVFYWWIGHSLQPLLSLDNSVTTRFSDTGDVRVTVQAACGNSVLQDSRVLRVLDQFQVMPLQFSKELDAYNPNTPEWREDVGLVVTRLLSKETSVPQELLVTVVKPGLPTLADLYVLLPPPRPTRKRSLSSDKRLAAIQQVLNAQKISFLLRGGVRVLVALRDTGTGAEQLGGGGGYWAVVVLFVIGLFAAGAFILYNFIRKRPGRTVYAQMHNEKEQEMTSPVSHSEDVQGAVQGNHSGVVLSINSREMHSYLVS

SEQ ID NO: 5489 - protein, 683 aa, Homo sapiens
MSSGTMKFNGYLRVRIGEAVGLQPTRWSLRHSLFKKGHQLLDPYLTVSVDQVRVGQTSTKQKTNKPTYNEEFCANVTDGGHLELAVFHETPLGYDHFVANCTLQFQELLRTTGASDTFEGWVDLEPEGKVFVVITLTGSFTEATLQRDRIFKHFTRKRQRAMRRRVHQINGHKFMATYLRQPTYCSHCREFIWGVFGKQGYQCQVCTCVVHKRCHHLIVTACTCQNNINKVDSKIAEQRFGINIPHKFSIHNYKVPTFCDHCGSLLWGIMRQGLQCKICKMNVHIRCQANVAPNCGVNAVELAKTLAGMGLQPGNISPTSKLVSRSTLRRQGKESSKEGNGIGVNSSNRLGIDNFEFIRVLGKGSFGKVMLARVKETGDLYAVKVLKKDVILQDDDVECTMTEKRILSLARNHPFLTQLFCCFQTPDRLFFVMEFVNGGDLMFHIQKSRRFDEARARFYAAEIISALMFLHDKGIIYRDLKLDNVLLDHEGHCKLADFGMCKEGICNGVTTATFCGTPDYIAPEILQEMLYGPAVDWWAMGVLLYEMLCGHAPFEAENEDDLFEAILNDEVVYPTWLHEDATGILKSFMTKNPTMRLGSLTQGGEHAILRHPFFKEIDWAQLNHRQIEPPFRPRIKSREDVSNFDPDFIKEEPVLTPIDEGHLPMINQDEFRNFSYVSPELQP

SEQ ID NO: 5490 - protein, 302 aa, Homo sapiens
MRRWAWAAVVVLLGPQLVLLGGVGARREAQRTQQPGQRADPPNATASASSREGLPEAPKPSQASGPEFSDAHMTWLNFVRRPDDGALRKRCGSRDKKPRDLFGPPGPPGAEVTAETLLHEFQELLKEATERRFSGLLDPLLPQGAGLRLVGEAFHCRLQGPRRVDKRTLVELHGFQAPAAQGAFLRGSGLSLASGRFTAPVSGIFQFSASLHVDHSELQGKARLRARDVVCVLICIESLCQRHTCLEAVSGLESNSRVFTLQVQGLLQLQAGQYASVFVDNGSGAVLTIQAGSSFSGLLLGT

SEQ ID NO: 5491 - protein, 520 aa, Homo sapiens
MEVLESGEQGVLQWDRKLSELSEPGDGEALMYHTHFSELLDEFSQNVLGQLLNDPFLSEKSVSMEVEPSPTSPAPLIQAEHSYSLCEEPRAQSPFTHITTSDSFNDDEVESEKWYLSTDFPSTSIKTEPVTDEPPPGLVPSVTLTITAISTPLEKEEPPLEMNTGVDSSCQTIIPKIKLEPHEVDQFLNFSPKEAPVDHLHLPPTPPSSHGSDSEGSLSPNPRLHPFSLPQTHSPSRAAPRAPSALSSSPLLTAPHKLQGSGPLVLTEEEKRTLIAEGYPIPTKLPLSKSEEKALKKIRRKIKNKISAQESRRKKKEYMDSLEKKVESCSTENLELRKKVEVLENTNRTLLQQLQKLQTLVMGKVSRTCKLAGTQTGTCLMVVVLCFAVAFGSFFQGYGPYPSATKMALPSQHSLQEPYTASVVRSRNLLIYEEHSPPEESSSPGSAGELGGWDRGSSLLRVSGLESRPDVDLPHFIISNETSLEKSVLLELQQHLVSAKLEGNETLKVVELDRRVNTTF

SEQ ID NO: 5492 - protein, 561 aa, Homo sapiens
MITSQGSVSFRDVTVGFTQEEWQHLDPAQRTLYRDVMLENYSHLVSVGYCIPKPEVILKLEKGEEPWILEEKFPSQSHLELINTSRNYSIMKFNEFNKGGKCFCDEKHEIIHSEEEPSEYNKNGNSFWLNEDLIWHQKIKNWEQSFEYNECGKAFPENSLFLVHKRGYTGQKTCKYTEHGKTCDMSFFITHQQTHPRENHYGNECGENIFEESILLEHQSVYPFSQKLNLTPIQRTHSINNIIEYNECGTFFSEKLVLHLQQRTHTGEKPYECHECGKTFTQKSAHTRHQRTHTGGKPYECHECGKTFYKNSDLIKHQRIHTGERPYGCHECGKSFSEKSTLTQHQRTHTGEKPYECHECGKTFSFKSVLTVHQKTHTGEKPYECYACGKAFLRKSDLIKHQRIHTGEKPYECNECGKSFSEKSTLTKHLRTHTGEKPYECIQCGKFFCYYSGFTEHLRRHTGEKPFGCNECGKTFRQKSALIVHQRTHIRQKPYGCNQCGKSFCVKSKLIAHHRTHTGEKPYECNVCGKSFYVKSKLTVHQRIHLGRNPINVVNEGNYSG

SEQ ID NO: 5493 - protein, 312 aa, Homo sapiens
MKNHTRQIEFILLGLTDNSQLQIVIFLFLLLNCVLSMIGNFTIIALILLDSQLKTPMYFFLRNFSFLEISFTTACIPRFLITIVTREKTISCNGCISQLFFYIFLGVTEFFLLAALSYDRYVAICKPLRYMSIMSNKVCYQLVFSSWVTGFLIIFTPLILGLNLDFCASNIIDHFICDISLILQLSCSDTHLLELIAFLLAVMTLIVTLFLVILSYSYIIKTILKFPSAQQKKKAFSTCSSHMIVVSITYGSCMFIYIKPSANERVALSKGVTVLNTSVAPLLNPFIYTLRNQQVKQAFKAVFRKIFSASDK

SEQ ID NO: 5494 - protein, 245 aa, Homo sapiens
MPSQQKKIIFCMAGVFSFACALGVVTALGTPLWIKATVLCKTGALLVNASGQELDKFMGEMQYGLFHGEGVRQCGLGARPFRFSFFPDLLKAIPVSIHVNVILFSAILIVLTMVGTAFFMYNAFGKPFETLHGPLGLYLLSFISVALWLPATRHQAQGSCGCLVMILFASEVKIHHLSEKIANYKEGTYVYKTQSEKYTTSFWVIFFCFFVHFLNGLLIRLAGFQFPFAKSKDAETTNVAADLMY

SEQ ID NO: 5495 - protein, 568 aa, Homo sapiens
MERDRISALKRSFEVEEVETPNSTPPRRVQTPLLRATVASSTQKFQDLGVKNSEPSARHVDSLSQRSPKASLRRVELSGPKAAEPVSRRTELSIDISSKQVENAGAIGPSRFGLKRAEVLGHKTPEPAPRRTEITIVKPQESAHRRMEPPASKVPEVPTAPATDAAPKRVEIQMPKPAEAPTAPSPAQTLENSEPAPVSQLQSRLEPKPQPPVAEATPRSQEATEAAPSCVGDMADTPRDAGLKQAPASRNEKAPVDFGYVGIDSILEQMRRKAMKQGFEFNIMVVGQSGLGKSTLINTLFKSKISRKSVQPTSEERIPKTIEIKSITHDIEEKGVRMKLTVIDTPGFGDHINNENCWQPIMKFINDQYEKYLQEEVNINRKKRIPDTRVHCCLYFIPATGHSLRPLDIEFMKRLSKVVNIVPVIAKADTLTLEERVHFKQRITADLLSNGIDVYPQKEFDEDSEDRLVNEKFREMIPFAVVGSDHEYQVNGKRILGRKTKWGTIEVENTTHCEFAYLRDLLIRTHMQNIKDITSSIHFEAYRVKRLNEGSSAMANGMEEKEPEAPEM

SEQ ID NO: 5496 - protein, 443 aa, Homo sapiens
MATAASNHYSLLTSSASIVHAEPPGGMQQGAGGYREAQSLVQGDYGALQSNGHPLSHAHQWITALSHGGGGGGGGGGGGGGGGGGGGGDGSPWSTSPLGQPDIKPSVVVQQGGRGDELHGPGALQQQHQQQQQQQQQQQQQQQQQQQQQRPPHLVHHAANHHPGPGAWRSAAAAAHLPPSMGASNGGLLYSQPSFTVNGMLGAGGQPAGLHHHGLRDAHDEPHHADHHPHPHSHPHQQPPPPPPPQGPPGHPGAHHDPHSDEDTPTSDDLEQFAKQFKQRRIKLGFTQADVGLALGTLYGNVFSQTTICRFEALQLSFKNMCKLKPLLNKWLEEADSSSGSPTSIDKIAAQGRKRKKRTSIEVSVKGALESHFLKCPKPSAQEITSLADSLQLEKEVVRVWFCNRRQKEKRMTPPGGTLPGAEDVYGGSRDTPPHHGVQTPVQ

SEQ ID NO: 5497 - protein, 414 aa, Homo sapiens
MGGCAGSRRRFSDSEGEETVPEPRLPLLDHQGAHWKNAVGFWLLGLCNNFSYVVMLSAAHDILSHKRTSGNQSHAVLLADILPTLVIKLLAPLGLHLLPYSPRVLVSGICAAGSFVLVAFSHSVGTSLCGVVFASISSGLGEVTFLSLTAFYPRAVISWWSSGTGGAGLLGALSYLGLTQAGLSPQQTLLSMLGIPALLLASYFLLLTSPEAQDPGGEEEAESAARQPLIRTEAPESKPGSSSSLSLRERWTVFKGLLWYIVPLVVVYFAEYFINQGLFELLFFWNTSLSHAQQYRWYQMLYQAGVFASRSSLRCCRIRFTWALALLQCLNLVFLLADVWFGFLPSIYLVFLIILYEGLLGGAAYVNTFHNIALETSDEHREFAMAATCISDTLGISLSGLLALPLHDFLCQLS

SEQ ID NO: 5498 - protein, 305 aa, Homo sapiens
MACILKRKSVIAVSFIAAFLFLLVVRLVNEVNFPLLLNCFGQPGTKWIPFSYTYRRPLRTHYGYINVKTQEPLQLDCDLCAIVSNSGQMVGQKVGNEIDRSSCIWRMNNAPTKGYEEDVGRMTMIRVVSHTSVPLLLKNPDYFFKEANTTIYVIWGPFRNMRKDGNGIVYNMLKKTVGIYPNAQIYVTTEKRMSYCDGVFKKETGKDRVQSGSYLSTGWFTFLLAMDACYGIHVYGMINDTYCKTEGYRKVPYHYYEQGRDECDEYFLHEHAPYGGHRFITEKKVFAKWAKKHRIIFTHPNWTLS

SEQ ID NO: 5499 - protein, 1100 aa, Homo sapiens
MGNAAGSAEQPAGPAAPPPKQPAPPKQPMPAAGELEERFNRALNCMNLPPDKVQLLSQYDNEKKWELICDQERFQVKNPPAAYIQKLKSYVDTGGVSRKVAADWMSNLGFKRRVQESTQVLRELETSLRTNHIGWVQEFLNEENRGLDVLLEYLAFAQCSVTYDMESTDNGASNSEKNKPLEQSVEDLSKGPPSSVPKSRHLTIKLTPAHSRKALRNSRIVSQKDDVHVCIMCLRAIMNYQSGFSLVMNHPACVNEIALSLNNKNPRTKALVLELLAAVCLVRGGHDIILAAFDNFKEVCGEQHRFEKLMEYFRNEDSNIDFMVACMQFINIVVHSVENMNFRVFLQYEFTHLGLDLYLERLRLTESDKLQVQIQAYLDNIFDVGALLEDTETKNAVLEHMEELQEQVALLTERLRDAENESMAKIAELEKQLSQARKELETLRERFSESTAMGPSRRPPEPEKAPPAAPTRPSALELKVEELEEKGLIRILRGPGDAVSIEILPVAVATPSGGDAPTPGVPTGSPSPDLAPAAEPAPGAAPPPPPPLPGLPSPQEAPPSAPPQAPPLPGSPEPPPAPPLPGDLPPPPPPPPPPPGTDGPVPPPPPPPPPPPGGPPDALGRRDSELGPGVKAKKPIQTKFRMPLLNWVALKPSQITGTVFTELNDEKVLQELDMSDFEEQFKTKSQGPSLDLSALKSKAAQKAPSKATLIEANRAKNLAITLRKGNLGAERICQAIEAYDLQALGLDFLELLMRFLPTEYERSLITRFEREQRPMEELSEEDRFMLCFSRIPRLPERMTTLTFLGNFPDTAQLLMPQLNAIIAASMSIKSSDKLRQILEIVLAFGNYMNSSKRGAAYGFRLQSLDALLEMKSTDRKQTLLHYLVKVIAEKYPQLTGFHSDLHFLDKAGSVSLDSVLADVRSLQRGLELTQREFVRQDDCMVLKEFLRANSPTMDKLLADSKTAQEAFESVVEYFGENPKTTSPGLFFSLFSRFIKAYKKAEQEVEQWKKEAAAQEAGADTPGKGEPPAPKSPPKARRPQMDLISELKRRQQKEPLIYESDRDGAIEDIITVIKTVPFTARTGKRTSRLLCEASLGEEMPL

SEQ ID NO: 5500 - protein, 469 aa, Homo sapiens
MSIHFSSPVFTSRSAAFSGRGAQVRLSSARPGGLGSSSLYGLGASRPRVAVRSAYGGPVGAGIREVTINQSLLAPLRLDADPSLQRVRQEESEQIKTLNNKFASFIDKVRFLEQQNKLLETKWTLLQEQKSAKSSRLPDIFEAQIAGLRGQLEALQVDGGRLEAELRSMQDVVEDFKNKYEDEINHRTAAENEFVVLKKDVDAAYMSKVELEAKVDALNDEINFLRTLNETELTELQSQISDTSVVLSMDNSRSLDLDGIIAEVKAQYEEMAKCSRAEAEAWYQTKFETLQAQAGKHGDDLRNTRNEISEMNRAIQRLQAEIDNIKNQRAKLEAAIAEAEERGELALKDARAKQEELEAALQRGKQDMARQLREYQELMSVKLALDIEIATYRKLLEGEESRLAGDGVGAVNISVMNSTGGSSSGGGIGLTLGGTMGSNALSFSSSAGPGLLKAYSIRTASASRRSARD

SEQ ID NO: 5501 - protein, 252 aa, Homo sapiens
MQLTRCCFVFLVQGSLYLVICGQDDGPPGSEDPERDDHEGQPRPRVPRKRGHISPKSRPMANSTLLGLLAPPGEAWGILGQPPNRPNHSPPPSAKVKKIFGWGDFYSNIKTVALNLLVTGKIVDHGNGTFSVHFQHNATGQGNISISLVPPSKAVEFHQEQQIFIEAKASKIFNCRMEWEKVERGRRTSLCTHDPAKICSRDHAQSSATWSCSQPFKVVCVYIAFYSTDYRLVQKVCPDYNYHSDTPYYPSG

SEQ ID NO: 5502 - protein, 541 aa, Homo sapiens
MRLSPFHLQLEFHMKEKREDLQISWSFISVPEMAVNIQPKALGEDQVAETSAMSDVLKDILKHLAGSASPSVVLITKPTTVKEAQNLQCAASTAQESCPPKPPRAHELKLLVRNIHVLLLSEPGASGHINAVCVVQLNDPVQRFSSTLTKNTPDLMWEEEFTFELNAKSKELHLQISEAGRSSEGLLATATVPLDLFKKQPSGPQSFTLTSGSACGSSVLGSVTAEFSYMEPGELKSWPIPPPVPAAKIEKDRTVMPCGTVVTTVTAVKTKPRVDVGRASPLSSDSPVKTPIKVKVIEKDISVQAIACRSAPVSKTLSSSDTELLVLNGSDPVAEVAIRQLSESSKLKLKSPRKKSTIIISGISKTSLSQDHDAALMQGYTASVDSTHQEDAPSHPERAAASAPPEEAESAQASLAPKPQEDELDSWDLEKEPQAAAWSSQVLLDPDGDELSESSMSVLEPGTAKKHKGGILRKGAKLFFRRRHQQKDPGMSQSHNDLVFLEQPEGSRRKGITLTRILNKKLLSRHRNKNTMNGAPVEPCT

SEQ ID NO: 5503 - protein, 578 aa, Homo sapiens
MRPALGHPRSVSSASGSFPPPPAAARLQPLFLRGGSFRGRRGSGDSSTSTSTSRGGGGGRRGGGGGSPSSSTGAEREDDDESLSVSKPLVPNAALLGPPAQVGAPAGPAPVAFSSSAATSSSTSTPTSSCSMTAADFGGGAAAGAVGGPGSRSAGGAGGTGTGSGASCCPCCCCCGCPDRPGRRGRRRGCAPSPRCRWGYQALSVVLLLAQGGLLDLYLIAVTDLYWCSWIATDLVVVVGWAIFFAKNSRGRRGGAASGAHNHHLHHHHAAPPLHLPAPSAATAGAKARGARGGAGGAGGGLGAAAAAGEFAFAYLAWLIYSIAFTPKVVLILGTSILDLIELRAPFGTTGFRLTMALSVPLLYSLVRAISEAGAPPGSAGPLLLQPQRHRAAGCFLGTCLDLLDSFTLVELMLEGRVPLPAHLRYLLIAVYFLTLASPVLWLYELNAAAAAAASWGQASGPGSCSRLLRLLGGCLVDVPLLALRCLLVVSYQQPLSIFMLKNLFFLGCRGLEALEGCWDRGNRASPSRARGGYGAPPSAPPPPPPPPQGGSQLGHCISENEGGAHGYVNTLAVASQN

SEQ ID NO: 5504 - protein, 410 aa, Homo sapiens
MFNNELMADVHFVVGPPGATRTVPAHKYVLAVGSSVFYAMFYGDLAEVKSEIHIPDVEPAAFLILLKYMYSDEIDLEADTVLATLYAAKKYIVPALAKACVNFLETSLEAKNACVLLSQSRLFEEPELTQRCWEVIDAQAEMALRSEGFCEIDRQTLEIIVTREALNTKEAVVFEAVLNWAEAECKRQGLPITPRNKRHVLGRALYLVRIPTMTLEEFANGAAQSDILTLEETHSIFLWYTATNKPRLDFPLTKRKGLAPQRCHRFQSSAYRSNQWRYRGRCDSIQFAVDRRVFIAGLGLYGSSSGKAEYSVKIELKRLGVVLAQNLTKFMSDGSSNTFPVWFEHPVQVEQDTFYTASAVLDGSELSYFGQEGMTEVQCGKVAFQFQCSSDSTNGTGVQGGQIPELIFYA

SEQ ID NO: 5505 - protein, 415 aa, Homo sapiens
MSPFLYLVLLVLGLHATIHCASPEGKVTACHSSQPNATLYKMSSINADFAFNLYRRFTVETPDKNIFFSPVSISAALVMLSFGACCSTQTEIVETLGFNLTDTPMVEIQHGFQHLICSLNFPKKELELQIGNALFIGKHLKPLAKFLNDVKTLYETEVFSTDFSNISAAKQEINSHVEMQTKGKVVGLIQDLKPNTIMVLVNYIHFKAQWANPFDPSKTEDSSSFLIDKTTTVQVPMMHQMEQYYHLVDMELNCTVLQMDYSKNALALFVLPKEGQMESVEAAMSSKTLKKWNRLLQKGWVDLFVPKFSISATYDLGATLLKMGIQHAYSENADFSGLTEDNGLKLSNAAHKAVLHIGEKGTEAAAVPEVELSDQPENTFLHPIIQIDRSFMLLILERSTRSILFLGKVVNPTEA

SEQ ID NO: 5506 - protein, 717 aa, Homo sapiens
MAADKPADQGAEKHEGTGQSSGITDQEKELSTNAFQAFTSGNYDACLQHLACLQDINKDDYKIILNTAVAEFFKSNQTTTDNLRQTLNQLKNQVHSAVEEMDGLDDVENSMLYYNQAVILYHLRQYTEAISVGEKLYQFIEPFEEKFAQAVCFLLVDLYILTYQAEKALHLLAVLEKMISQGNNNKNGKNETGNNNNKDGSNHKAESGALIEAAKSKIHQYKVRAYIQMKSLKACKREIKSVMNTAGNSAPSLFLKSNFEYLRGNYRKAVKLLNSSNIAEHPGFMKTGECLRCMFWNNLGCIHFAMSKHNLGIFYFKKALQENDNVCAQLSAGSTDPGKKFSGRPMCTLLTNKRYELLYNCGIQLLHIGRPLAAFECLIEAVQVYHANPRLWLRLAECCIAANKGTSEQETKGLPSKKGIVQSIVGQGYHRKIVLASQSIQNTVYNDGQSSAIPVASMEFAAICLRNALLLLPEEQQDPKQENGAKNSNQLGGNTESSESSETCRCSILACSAYVALALGDNLMALNHADKLLQQPKLSGSLKFLGHLYAAEALISLDRISDAITHLNPENVTDVSLGISSNEQDQGSDKGENEAMESSGKRAPQCYPSSVNSARTVMLFNLGSAYCLRSEYDKARKCLHQAASMIHPKEVPPEAILLAVYLELQNGNTQLALQIIKRNQLLPAVKTHSEVRKKPVFQPVHPIQPIQMPAFTTVQRK

SEQ ID NO: 5507 - protein, 652 aa, Homo sapiens
MPLLLLLLLLPSPLHPHPICEVSKVASHLEVNCDKRNLTALPPDLPKDTTILHLSENLLYTFSLATLMPYTRLTQLNLDRCELTKLQVDGTLPVLGTLDLSHNQLQSLPLLGQTLPALTVLDVSFNRLTSLPLGALRGLGELQELYLKGNELKTLPPGLLTPTPKLEKLSLANNNLTELPAGLLNGLENLDTLLLQENSLYTIPKGFFGSHLLPFAFLHGNPWLCNCEILYFRRWLQDNAENVYVWKQGVDVKAMTSNVASVQCDNSDKFPVYKYPGKGCPTLGDEGDTDLYDYYPEEDTEGDKVRATRTVVKFPTKAHTTPWGLFYSWSTASLDSQMPSSLHPTQESTKEQTTFPPRWTPNFTLHMESITFSKTPKSTTEPTPSPTTSEPVPEPAPNMTTLEPTPSPTTPEPTSEPAPSPTTPEPTSEPAPSPTTPEPTSEPAPSPTTPEPTPIPTIATSPTILVSATSLITPKSTFLTTTKPVSLLESTKKTIPELDQPPKLRGVLQGHLESSRNDPFLHPDFCCLLPLGFYVLGLFWLLFASVVLILLLSWVGHVKPQALDSGQGAALTTATQTTHLELQRGRQVTVPRAWLLFLRGSLPTFRSSLFLWVRPNGRVGPLVAGRRPSALSQGRGQDLLSTVSIRYSGHSL

SEQ ID NO: 5508 - protein, 217 aa, Homo sapiens
MLAKLLCDQVVGAPIAVSAFYAGMSILQGKDDIFLDLKQKFWNTYMVVYVARNAKDVAVSYYHFYHMAKVHPEPGTWDSFLEKFMVGEVSYGSWYQHVQEWWELSRTHPVLYLFYEDMKENPKREIQKILEFVGRSLPEETVDFVVQHTSFKEMKKNPMTNYTTVPQEFMDHSISPFMRKGMAGDWKTTFTVAQNERFDADYAEKMAGCSLSFRSEL

SEQ ID NO: 5509 - protein, 516 aa, Homo sapiens
MPVPERPAAGPDSPRPGTRRAAPRVLFGEWLLGEISSGCYEGLQWLDEARTCFRVPWKHFARKDLSEADARIFKAWAVARGRWPPSSRGGGPPPEAETAERAGWKTNFRCALRSTRRFVMLRDNSGDPADPHKVYALSRELCWREGPGTDQTEAEAPAAVPPPQGGPPGPFLAHTHAGLQAPGPLPAPAGDKGDLLLQAVQQSCLADHLLTASWGADPVPTKAPGEGQEGLPLTGACAGGPGLPAGELYGWAVETTPSPGPQPAALTTGEAAAPESPHQAEPYLSPSPSACTAVQEPSPGALDVTIMYKGRTVLQKVVGHPSCTFLYGPPDPAVRATDPQQVAFPSPAELPDQKQLRYTEELLRHVAPGLHLELRGPQLWARRMGKCKVYWEVGGPPGSASPSTPACLLPRNCDTPIFDFRVFFQELVEFRARQRRGSPRYTIYLGFGQDLSAGRPKEKSLVLVKLEPWLCRVHLEGTQREGVSSLDSSSLSLCLSSANSLYDDIECFLMELEQPA

SEQ ID NO: 5510 - protein, 211 aa, Homo sapiens
MVAHNQVAADNAVSTAAEPRRRPEPSSSSSSSPAAPARPRPCPAVPAPAPGDTHFRTFRSHADYRRITRASALLDACGFYWGPLSVHGAHERLRAEPVGTFLVRDSRQRNCFFALSVKMASGPTSIRVHFQAGRFHLDGSRESFDCLFELLEHYVAAPRRMLGAPLRQRRVRPLQELCRQRIVATVGRENLARIPLNPVLRDYLSSFPFQI

SEQ ID NO: 5511 - protein, 1038 aa, Homo sapiens
MQPEEGTGWLLELLSEVQLQQYFLRLRDDLNVTRLSHFEYVKNEDLEKIGMGRPGQRRLWEAVKRRKALCKRKSWMSKVFSGKRLEAEFPPHHSQSTFRKTSPAPGGPAGEGPLQSLTCLIGEKDLRLLEKLGDGSFGVVRRGEWDAPSGKTVSVAVKCLKPDVLSQPEAMDDFIREVNAMHSLDHRNLIRLYGVVLTPPMKMVTELAPLGSLLDRLRKHQGHFLLGTLSRYAVQVAEGMGYLESKRFIHRDLAARNLLLATRDLVKIGDFGLMRALPQNDDHYVMQEHRKVPFAWCAPESLKTRTFSHASDTWMFGVTLWEMFTYGQEPWIGLNGSQILHKIDKEGERLPRPEDCPQDIYNVMVQCWAHKPEDRPTFVALRDFLLEAQPTDMRALQDFEEPDKLHIQMNDVITVIEGRAENYWWRGQNTRTLCVGPFPRNVVTSVAGLSAQDISQPLQNSFIHTGHGDSDPRHCWGFPDRIDELYLGNPMDPPDLLSVELSTSRPPQHLGGVKKPTYDPVSEDQDPLSSDFKRLGLRKPGLPRGLWLAKPSARVPGTKASRGSGAEVTLIDFGEEPVVPALRPCAPSLAQLAMDACSLLDETPPQSPTRALPRPLHPTPVVDWDARPLPPPPAYDDVAQDEDDFEICSINSTLVGAGVPAGPSQGQTNYAFVPEQARPPPPLEDNLFLPPQGGGKPPSSAQTAEIFQALQQECMRQLQAPAGSPAPSPSPGGDDKPQVPPRVPIPPRPTRPHVQLSPAPPGEEETSQWPGPASPPRVPPREPLSPQGSRTPSPLVPPGSSPLPPRLSSSPGKTMPTTQSFASDPKYATPQVIQAPGPRAGPCILPIVRDGKKVSSTHYYLLPERPSYLERYQRFLREAQSPEEPTPLPVPLLLPPPSTPAPAAPTATVRPMPQAALDPKANFSTNNSNPGARPPPPRATARLPQRGCPGDGPEAGRPADKIQMAMVHGVTTEECQAALQCHGWSVQRAAQYLKVEQLFGLGLRPRGECHKVLEMFDWNLEQAGCHLLGSWGPAHHKR

SEQ ID NO: 5512 - protein, 469 aa, Homo sapiens
MKSKEEETAVDKGDLVALSLPAGHGDTDGPISLDVPDGAPDPQRTKAAIDHLHQKILKITEQIKIEQEARDDNVAEYLKLANNADKQQVSRIKQVFEKKNQKSAQTIAQLHKKLEHYRRRLKEIEQNGPSRQPKDVLRDMQQGLKDVGANVRAGISGFGGGVVEGVKGSLSGLSQATHTAVVSKPREFASLIRNKFGSADNIAHLKDPLEDGPPEEAARALSGSATLVSSPKYGSDDECSSASASSAGAGSNSGAGPGGALGSPKSNALYGAPGNLDALLEELREIKEGQSHLEDSMEDLKTQLQRDYTYMTQCLQEERYRYERLEEQLNDLTELHQNEMTNLKQELASMEEKVAYQSYERARDIQEAVESCLTRVTKLELQQQQQQVVQLEGVENANARALLGKFINVILALMAVLLVFVSTIANFITPLMKTRLRITSTTLLVLVLFLLWKHWDSLTYLLEHVLLPS

SEQ ID NO: 5513 - protein, 1132 aa, Homo sapiens
MASDGASALPGPDMSMKPSAAPSPSPALPFLPPTSDPPDHPPREPPPQPIMPSVFSPDNPLMLSAFPSSLLVTGDGGPCLSGAGAGKVIVKVKTEGGSAEPSQTQNFILTQTALNSTAPGTPCGGLEGPAPPFVTASNVKTILPSKAVGVSQEGPPGLPPQPPPPVAQLVPIVPLEKAWPGPHGTTGEGGPVATLSKPSLGDRSKISKDVYENFRQWQRYKALARRHLSQSPDTEALSCFLIPVLRSLARLKPTMTLEEGLPLAVQEWEHTSNFDRMIFYEMAERFMEFEAEEMQIQNTQLMNGSQGLSPATPLKLDPLGPLASEVCQQPVYIPKKAASKTRAPRRRQRKAQRPPAPEAPKEIPPEAVKEYVDIMEWLVGTHLATGESDGKQEEEGQQQEEEGMYPDPGLLSYINELCSQKVFVSKVEAVIHPQFLADLLSPEKQRDPLALIEELEQEEGLTLAQLVQKRLMALEEEEDAEAPPSFSGAQLDSSPSGSVEDEDGDGRLRPSPGLQGAGGAACLGKVSSSGKRAREVHGGQEQALDSPRGMHRDGNTLPSPSSWDLQPELAAPQGTPGPLGVERRGSGKVINQVSLHQDGHLGGAGPPGHCLVADRTSEALPLCWQGGFQPESTPSLDAGLAELAPLQGQGLEKQVLGLQKGQQTGGRGVLPQGKEPLAVPWEGSSGAMWGDDRGTPMAQSYDQNPSPRAAGERDDVCLSPGVWLSSEMDAVGLELPVQIEEVIESFQVEKCVTEYQEGCQGLGSRGNISLGPGETLVPGDTESSVIPCGGTVAAAALEKRNYCSLPGPLRANSPPLRSKENQEQSCETVGHPSDLWAEGCFPLLESGDSTLGSSKETLPPTCQGNLLIMGTEDASSLPEASQEAGSRGNSFSPLLETIEPVNILDVKDDCGLQLRVSEDTCPLNVHSYDPQGEGRVDPDLSKPKNLAPLQESQESYTTGTPKATSSHQGLGSTLPRRGTRNAIVPRETSVSKTHRSADRAKGKEKKKKEAEEEDEELSNFAYLLASKLSLSPREHPLSPHHASGGQGSQRASHLLPAGAKGPSKLPYPVAKSGKRALAGGPAPTEKTPHSGAQLGVPREKPLALGVVRPSQPRKRRCDSFVTGRRKKRRRSQ

SEQ ID NO: 5514 - protein, 381 aa, Homo sapiens
MGDRERNKKRLLELLRAPDTGNAHCADCGAADPDWASYKLGIFICLNCCGVHRNFPDISRVKSVRLDFWDDSIVEFMIHNGNLRVKAKFEARVPAFYYIPQANDCLVLKEQWIRAKYERREFMADGETISLPGNREGFLWKRGRDNSQFLRRKFVLLAREGLLKYFTKEQGKSPKAVISIKDLNATFQTEKIGHPHGLQITYRRDGHTRNLFVYHESGKEIVDWFNALRAARLQYLKMAFPELPESELVPFLTRNYLKQGFMEKTGPKQKEPFKKRWFALDCHERRLLYYKNPLDAFEQGQVFLGNKEQGYEAYEDLPKGIRGNRWKAGLTIVTPERRFVLTCPSEKEQQEWLESLRGVLSSPLTPLNRLTASTESGRSSR

SEQ ID NO: 5515 - protein, 132 aa, Homo sapiens
MVKKFKDSKSVLLITCKTCNRTVKHHGKSRSFVSTLKSNPATPTSKLSLKTPERRTANPNHDMSGSKGKSPASVFRTPTSGQSVSTCSSKNTSKTKKHFSQLKMLLSQNESQKIPKVDFRNFLSSLKGGLLK

SEQ ID NO: 5516 - protein, 338 aa, Homo sapiens
MNSLSEANTKFMFDLFQQFRKSKENNIFYSPISITSALGMVLLGAKDNTAQQIKKVLHFDQVTENTTGKAATYHVDRSGNVHHQFQKLLTEFNKSTDAYELKIANKLFGEKTYLFLQEYLDAIKKFYQTSVESVDFANAPEESRKKINSWVESQTNEKIKNLIPEGNIGSNTTLVLVNAIYFKGQWEKKFNKEDTKEEKFWPNKLEEKLTAEKLMEWTSLQNMRETRVDLHLPRFKVEESYDLKDTLRTMGMVDIFNGDADLSGMTGSRGLVLSGVLHKAFVEVTEEGAEAAAATAVVGFGSSPTSTNEEFHCNHPFLFFIRQNKTNSILFYGRFSSP

SEQ ID NO: 5517 - protein, 413 aa, Homo sapiens
MHLALTTVLLWAWGLQAFEIVEKENIFQRTPCPAFLMFENAAYLADMSFELPCHCKPEEVPAVVWFYQKHLGSSHTKVLTDFDGRVLTEAAQVRVGSDMLTRFSIRMFSLLVFRAQSEDSGLYFCGTRKGDYFYAYDVDIQNSEGMVATFQDKGQEPFADEYYGHLHVFTTFWEWTPCDRCGVRGEQWRIGLCYLQSPDLSPRYLKAVPDVVSCGSRAVPRKLRTKARDHTPEVLVRSCLVPCEKTKTIREGVLAIINYVSKVGSRPWVPQVPIQFHQQRLGHGLIISCPGARPEHAVAWDKDRQHLYRTQYLKGVNRSMRVFIDHGNQLHIRFTQLDDRGIYYCWRQGVLVAGFRLGVTSHGHYPASFSDPETRSAVELTLIGYLLITAVFVTIHFCRCCCYLFHCCPSFSP

SEQ ID NO: 5518 - protein, 237 aa, Homo sapiens
MASGQARPPFEEESPQPSTTVRSPEVVVDDEVPGPSAPWIDPSPQPQSLGLKRKSEWSDESEEELEEELELERAPEPEDTWVVETLCGLKMKLKRKRASSVLPEHHEAFNRLLGDPVVQKFLAWDKDLRVSDKYLLAMVIAYFSRAGLFSWQYQRIHFFLALYLASDMEEDNQAPKQDIFSFLYGKNYSQRPLFHKLRYQLLCSMRWRTWVSPEEMEEIQAYDPEHWVWARDRTLIS

SEQ ID NO: 5519 - protein, 915 aa, Homo sapiens
MADEALAGLDEGALRKLLEVTADLAERRRIRSAIRELQRQELEREEEALASKRFRAERQDNKENWLHSQQREAEQRAALARLAGQLESMNDVEELTALLRSAGEYEERKLIRAAIRRVRAQEIEAATLAGRLYSGRPNSGSREDSKGLAAHRLEQCEVPEREEQEQQAEVSKPTPTPEGTSQDVTTVTLLLRAPPGSTSSSPASPSSSPTPASPEPPLEPAEAQCLTAEVPGSPEPPPSPPKTTSPEPQESPTLPSTEGQVVNKLLSGPKETPAAQSPTRGPSDTKRADVAGPRPCQRSLSVLSPRQPAQNRESTPLASGPSSFQRAGSVRDRVHKFTSDSPMAARLQDGTPQAALSPLTPARLLGPSLTSTTPASSSSGSSSRGPSDTSSRFSKEQRGVAQPLAQLRSCPQEEGPRGRGLAARPLENRAGGPVARSEEPGAPLPVAVGTAEPGGSMKTTFTIEIKDGRGQASTGRVLLPTGNQRAELTLGLRAPPTLLSTSSGGKSTITRVNSPGTLARLGSVTHVTSFSHAPPSSRGGCSIKMEAEPAEPLAAAVEAANGAEQTRVNKAPEGRSPLSAEELMTIEDEGVLDKMLDQSTDFEERKLIRAALRELRQRKRDQRDKERERRLQEARGRPGEGRGNTATETTTRHSQRAADGSAVSTVTKTERLVHSNDGTRTARTTTVESSFVRRSENGSGSTMMQTKTFSSSSSSKKMGSIFDREDQASPRAGSLAALEKRQAEKKKELMKAQSLPKTSASQARKAMIEKLEKEGAAGSPGGPRAAVQRSTSFGVPNANSIKQMLLDWCRAKTRGYEHVDIQNFSSSWSDGMAFCALVHNFFPEAFDYGQLSPQNRRQNFEVAFSSAETHADCPQLLDTEDMVRLREPDWKCVYTYIQEFYRCLVQKGLVKTKKS

SEQ ID NO: 5520 - protein, 444 aa, Homo sapiens
MVSQALRLLCLLLGLQGCLAAVFVTQEEAHGVLHRRRRANAFLEELRPGSLERECKEEQCSFEEAREIFKDAERTKLFWISYSDGDQCASSPCQNGGSCKDQLQSYICFCLPAFEGRNCETHKDDQLICVNENGGCEQYCSDHTGTKRSCRCHEGYSLLADGVSCTPTVEYPCGKIPILEKRNASKPQGRIVGGKVCPKGECPWQVLLLVNGAQLCGGTLINTIWVVSAAHCFDKIKNWRNLIAVLGEHDLSEHDGDEQSRRVAQVIIPSTYVPGTTNHDIALLRLHQPVVLTDHVVPLCLPERTFSERTLAFVRFSLVSGWGQLLDRGATALELMVLNVPRLMTQDCLQQSRKVGDSPNITEYMFCAGYSDGSKDSCKGDSGGPHATHYRGTWYLTGIVSWGQGCATVGHFGVYTRVSQYIEWLQKLMRSEPRPGVLLRAPFP

SEQ ID NO: 5521 - protein, 1009 aa, Homo sapiens
MTSPQLEWTLQTLLEQLNEDELKSFKSLLWAFPLEDVLQKTPWSEVEEADGKKLAEILVNTSSENWIRNATVNILEEMNLTELCKMAKAEMMEDGQVQEIDNPELGDAEEDSELAKPGEKEGWRNSMEKQSLVWKNTFWQGDIDNFHDDVTLRNQRFIPFLNPRTPRKLTPYTVVLHGPAGVGKTTLAKKCMLDWTDCNLSPTLRYAFYLSCKELSRMGPCSFAELISKDWPELQDDIPSILAQAQRILFVVDGLDELKVPPGALIQDICGDWEKKKPVPVLLGSLLKRKMLPRAALLVTTRPRALRDLQLLAQQPIYVRVEGFLEEDRRAYFLRHFGDEDQAMRAFELMRSNAALFQLGSAPAVCWIVCTTLKLQMEKGEDPVPTCLTRTGLFLRFLCSRFPQGAQLRGALRTLSLLAAQGLWAQMSVFHREDLERLGVQESDLRLFLDGDILRQDRVSKGCYSFIHLSFQQFLTALFYALEKEEGEDRDGHAWDIGDVQKLLSGEERLKNPDLIQVGHFLFGLANEKRAKELEATFGCRMSPDIKQELLQCKAHLHANKPLSVTDLKEVLGCLYESQEEELAKVVVAPFKEISIHLTNTSEVMHCSFSLKHCQDLQKLSLQVAKGVFLENYMDFELDIEFESSNSNLKFLEVKQSFLSDSSVRILCDHVTRSTCHLQKVEIKNVTPDTAYRDFCLAFIGKKTLTHLTLAGHIEWERTMMLMLCDLLRNHKCNLQYLRLGGHCATPEQWAEFFYVLKANQSLKHLRLSANVLLDEGAMLLYKTMTRPKHFLQMLSLENCRLTEASCKDLAAVLVVSKKLTHLCLAKNPIGDTGVKFLCEGLSYPDCKLQTLVLQQCSITKLGCRYLSEALQEACSLTNLDLSINQIARGLWILCQALENPNCNLKHLRLWSCSLMPFYCQHLGSALLSNQKLETLDLGQNHLWKSGIIKLFGVLRQRTGSLKILRLKTYETNLEIKKLLEEVKEKNPKLTIDCNASGATAPPCCDFFC

SEQ ID NO: 5522 - protein, 443 aa, Homo sapiens
MRSEKEGAGGLRAAVAARGPSGREKLSALEVQFHRDSQQQEAETPPTSSSGCGGGAGKPREEKRTALSKVVIRRLPPGLTKEQLEEQLRPLPAHDYFEFFAADLSLYPHLYSRAYINFRNPDDILLFRDRFDGYIFLDSKDPEYKKFLETYCVEEEKTSANPETLLGEMEAKTRELIARRTTPLLEYIKNRKLEKQRIREEKREERRRRELEKKRLREEEKRRRREEERCKKKETDKQKKIAEKEVRIKLLKKPEKGEEPTTEKPKERGEEIDTGGGKQESCAPGAVVKARPMEGSLEEPQETSHSGSDKEHRDVERSQEQESEAQRYHVDDGRRHRAHHEPERLSRRSEDEQRWGKGPGQDRGKKGSQDSGAPGEAMERLGRAQRCDDSPAPRKERLANKDRPALQLYDPGARFRARECGGNRRICKAEGSGTGPEKREEAE

SEQ ID NO: 5523 - protein, 239 aa, Homo sapiens
MAHAGRTGYDNREIVMKYIHYKLSQRGYEWDAGDVGAAPPGAAPAPGIFSSQPGHTPHPAASRDPVARTSPLQTPAAPGAAAGPALSPVPPVVHLTLRQAGDDFSRRYRRDFAEMSSQLHLTPFTARGRFATVVEELFRDGVNWGRIVAFFEFGGVMCVESVNREMSPLVDNIALWMTEYLNRHLHTWIQDNGGWDAFVELYGPSMRPLFDFSWLSLKTLLSLALVGACITLGAYLGHK

SEQ ID NO: 5524 - protein, 449 aa, Homo sapiens
DSDLSMRTLSTPSPALICPPNLPGFQNGRGSSTSSSSITGETVAMVHSPPPTRLTHPLIRLASRPQKEQASIDRLPDHSMVQIFSFLPTNQLCRCARVCRRWYNLAWDPRLWRTIRLTGETINVDRALKVLTRRLCQDTPNVCLMLETVTVSGCRRLTDRGLYTIAQCCPELRRLEVSGCYNISNEAVFDVVSLCPNLEHLDVSGCSKVTCISLTREASIKLSPLHGKQISIRYLDMTDCFVLEDEGLHTIAAHCTQLTHLYLRRCVRLTDEGLRYLVIYCASIKELSVSDCRFVSDFGLREIAKLESRLRYLSIAHCGRVTDVGIRYVAKYCSKLRYLNARGCEGITDHGVEYLAKNCTKLKSLDIGKCPLVSDTGLECLALNCFNLKRLSLKSCESITGQGLQIVAANCFDLQTLNVQDCEVSVEALRFVKRHCKRCVIEHTNPAFF

SEQ ID NO: 5525 - protein, 1349 aa, Homo sapiens
MACYLVISSRHLSNGHYRGIKGVFRGPLCKNGSPSPDFAEKKSTAKALEDVKANFYCELCDKQYHKHQEFDNHINSYDHAHKQRLKELKQREFARNVASKSWKDEKKQEKALKRLHQLAELRQQSECVSGNGPAYKAPRVAIEKQLQQGIFPIKNGRKVSCMKSALLLKGKNLPRIISDKQRSTMPNRHQLQSDRRCLFGNQVLQTSSDLSNANHRTGVSFTFSKKVHLKLESSASVFSENTEETHDCNKSPIYKTKQTADKCKCCRFANKDTHLTKEKEVNISPSHLESVLHNTISINSKILQDKHDSIDETLEDSIGIHASFSKSNIHLSDVDFTPTSREKETRNTLKNTLENCVNHPCQANASFSPPNIYNHSDARISECLDEFSSLEPSEQKSTVHLNPNSRIENREKSLDKTERVSKNVQRLVKEACTHNVASKPLPFLHVQSKDGHTTLQWPTELLLFTKTEPCISYGCNPLYFDFKLSRNTKEDHNLEDLKTELGKKPLELKTKRESQVSGLTEDQQKLIQEDYQYPKPKTMIANPDWEKFQRKYNLDYSDSEPNKSEYTFSANDLEMKNPKVPLYLNTSLKDCAGKNNSSENKLKEASRAHWQGCRKAVLNDIDEDLSFPSYISRFKKHKLIPCSPHLEFEDERQFNCKSSPCTVGGHSDHGKDFSVILKSNHISMTSKVSGCGNQRYKRYSPQSCLSRYSSSLDTSPSSMSSLRSTCSSHRFNGNSRGNLLCFHKREHHSVERHKRKCLKHNCFYLSDDITKSSQMQSEPQKERNCKLWESFKNEKYSKRRYCHCRERQKLGKNQQQFSGLKSTRIIYCDSNSQISCTGSSKKPPNCQGTQHDRLDSYSIEKMYYLNKSKRNQESLGSPHICDLGKVRPMKCNSGNISCLLKNCSSGPSETTESNTAEGERTPLTAKILLERVQAKKCQEQSSNVEISSNSCKSELEAPSQVPCTIQLAPSGCNRQALPLSEKIQYASESRNDQDSAIPRTTEKDKSKSSHTNNFTILADTDCDNHLSKGIIHLVTESQSLNIKRDATTKEQSKPLISEIQPFIQSCDPVPNEFPGAFPSNKYTGVTDSTETQEDQINLDLQDVSMHINHVEGNINSYYDRTMQKPDKVEDGLEMCHKSISPPLIQQPITFSPDEIDKYKILQLQAQQHMQKQLLSKHLRVLPAAGPTAFSPASTVQTVPVHQHTSITTIHHTFLQHFAVSASLSSHSSHLPIAHLHPLSQAHFSPISFSTLTPTIIPAHPTFLAGHPLHLVAATPFHPSHITLQPLPPTAFIPTLFGPHLNPATTSIIHLNPLIQPVFQGQDFCHHSCSSQMQQLNEVKEALNVSTHLN

SEQ ID NO: 5526 - protein, 598 aa, Homo sapiens
MASLRRVKVLLVLNLIAVAGFVLFLAKCRPIAVRSGDAFHEIRPRAEVANLSAHSASPIQDAVLKRLSLLEDIVYRQLNGLSKSLGLIEGYGGRGKGGLPATLSPAEEEKAKGPHEKYGYNSYLSEKISLDRSIPDYRPTKCKELKYSKDLPQISIIFIFVNEALSVILRSVHSAVNHTPTHLLKEIILVDDNSDEEELKVPLEEYVHKRYPGLVKVVRNQKREGLIRARIEGWKVATGQVTGFFDAHVEFTAGWAEPVLSRIQENRKRVILPSIDNIKQDNFEVQRYENSAHGYSWELWCMYISPPKDWWDAGDPSLPIRTPAMIGCSFVVNRKFFGEIGLLDPGMDVYGGENIELGIKVWLCGGSMEVLPCSRVAHIERKKKPYNSNIGFYTKRNALRVAEVWMDDYKSHVYIAWNLPLENPGIDIGDVSERRALRKSLKCKNFQWYLDHVYPEMRRYNNTVAYGELRNNKAKDVCLDQGPLENHTAILYPCHGWGPQLARYTKEGFLHLGALGTTTLLPDTRCLVDNSKSRLPQLLDCDKVKSSLYKRWNFIQNGAIMNKGTGRCLEVENRGLAGIDLILRSCTGQRWTIKNSIK

SEQ ID NO: 5527 - protein, 853 aa, Homo sapiens
MEYERRGGRGDRTGRYGATDRSQDDGGENRSRDHDYRDMDYRSYPREYGSQEGKHDYDDSSEEQSAEIRGQLQSHGVQAREVRLMRNKSSGQSRGFAFVEFSHLQDATRWMEANQHSLNILGQKVSMHYSDPKPKINEDWLCNKCGVQNFKRREKCFKCGVPKSEAEQKLPLGTRLDQQTLPLGGRELSQGLLPLPQPYQAQGVLASQALSQGSEPSSENANDTIILRNLNPHSTMDSILGALAPYAVLSSSNVRVIKDKQTQLNRGFAFIQLSTIVEAAQLLQILQALHPPLTIDGKTINVEFAKGSKRDMASNEGSRISAASVASTAIAAAQWAISQASQGGEGTWATSEEPPVDYSYYQQDEGYGNSQGTESSLYAHGYLKGTKGPGITGTKGDPTGAGPEASLEPGADSVSMQAFSRAQPGAAPGIYQQSAEASSSQGTAANSQSYTIMSPAVLKSELQSPTHPSSALPPATSPTAQESYSQYPVPDVSTYQYDETSGYYYDPQTGLYYDPNSQYYYNAQSQQYLYWDGERRTYVPALEQSADGHKETGAPSKEGKEKKEKHKTKTAQQIAKDMERWARSLNKQKENFKNSFQPISSLRDDERRESATADAGYAILEKKGALAERQHTSMDLPKLASDDRPSPPRGLVAAYSGESDSEEEQERGGPEREEKLTDWQKLACLLCRRQFPSKEALIRHQQLSGLHKQNLEIHRRAHLSENELEALEKNDMEQMKYRDRAAERREKYGIPEPPEPKRRKYGGISTASVDFEQPTRDGLGSDNIGSRMLQAMGWKEGSGLGRKKQGIVTPIEAQTRVRGSGLGARGSSYGVTSTESYKETLHKTMVTRFNEAQ

SEQ ID NO: 5528 - protein, 888 aa, Homo sapiens
MKVARFQKIPNGENETMIPVLTSKKASELPVSEVASILQADLQNGLNKCEVSHRRAFHGWNEFDISEDEPLWKKYISQFKNPLIMLLLASAVISVLMHQFDDAVSITVAILIVVTVAFVQEYRSEKSLEELSKLVPPECHCVREGKLEHTLARDLVPGDTVCLSVGDRVPADLRLFEAVDLSIDESSLTGETTPCSKVTAPQPAATNGDLASRSNIAFMGTLVRCGKAKGVVIGTGENSEFGEVFKMMQAEEAPKTPLQKSMDLLGKQLSFYSFGIIGIIMLVGWLLGKDILEMFTISVSLAVAAIPEGLPIVVTVTLALGVMRMVKKRAIVKKLPIVETLGCCNVICSDKTGTLTKNEMTVTHIFTSDGLHAEVTGVGYNQFGEVIVDGDVVHGFYNPAVSRIVEAGCVCNDAVIRNNTLMGKPTEGALIALAMKMGLDGLQQDYIRKAEYPFSSEQKWMAVKCVHRTQQDRPEICFMKGAYEQVIKYCTTYQSKGQTLTLTQQQRDVYQQEKARMGSAGLRVLALASGPELGQLTFLGLVGIIDPPRTGVKEAVTTLIASGVSIKMITGDSQETAVAIASRLGLYSKTSQSVSGEEIDAMDVQQLSQIVPKVAVFYRASPRHKMKIIKSLQKNGSVVAMTGDGVNDAVALKAADIGVAMGQTGTDVCKEAADMILVDDDFQTIMSAIEEGKGIYNNIKNFVRFQLSTSIAALTLISLATLMNFPNPLNAMQILWINIIMDGPPAQSLGVEPVDKDVIRKPPRNWKDSILTKNLILKILVSSIIIVCGTLFVFWRELRDNVITPRDTTMTFTCFVFFDMFNALSSRSQTKSVFEIGLCSNRMFCYAVLGSIMGQLLVIYFPPLQKVFQTESLSILGLALGEEWTAAG

SEQ ID NO: 5529 - protein, 630 aa, Homo sapiens
MRERGQDSLAGLVLYVGLFGHPGMLHRAKYSRFRNESITSLDEGSSGGSVGNKGSPQPPHPALAPHLPTEDATLPSQESPTPLCTLIPRMASMKLANPATLLSLKNFCLGTKEVPRLKLQESRDPGSSGPSSPETSLSRSGTAPPPQQDLVGHRATALTPDSCPLPGPGEPTLRSRQDRHFLQHLLGMGMNYCVRYMGCVEVLQSMRSLDFGMRTQVTREAISRLCEAVPGANGAIKKRKPPVKFLSTVLGKSNLQFSGMNIKLTISTCSLTLMNLDNQQIIANHHMQSISFASGGDPDTTDYVAYVAKDPVNQRACHILECHNGMAQDVISTIGQAFELRFKQYLKNPSLNTSCESEEVHIDSHAEEREDHEYYNEIPGKQPPVGGVSDMRIKVQATEQMAYCPIQCEKLCYLPGNSKCSSVYENCLEQSRAIGNVHPRGVQSQRDTSLLKHTCRVDLFDDPCYINTQALQSTPGSAGNQRSAQPLGSPWHCGKAPETVQPGATAQPASSHSLPHIKQQLWSEECYHGKLSRKAAESLLVKDGDFLVRESATSPGQYVLSGLQGGQAKHLLLVDPEGKVRTKDHVFDNVGHLIRYHMDNSLPIISSGSEVSLKQPVRKDNNPALLHSNK

SEQ ID NO: 5530 - protein, 424 aa, Homo sapiens
MATLSFVFLLLGAVSWPPASASGQEFWPGQSAADILSGAASRRRYLLYDVNPPEGFNLRRDVYIRIASLLKTLLKTEEWVLVLPPWGRLYHWQSPDIHQVRIPWSEFFDLPSLNKNIPVIEYEQFIAESGGPFIDQVYVLQSYAEGWKEGTWEEKVDERPCIDQLLYSQDKHEYYRGWFWGYEETRGLNVSCLSVQGSASIVAPLLLRNTSARSVMLDRAENLLHDHYGGKEYWDTRRSMVFARHLREVGDEFRSRHLNSTDDADRIPFQEDWMKMKVKLGSALGGPYLGVHLRRKDFIWGHRQDVPSLEGAVRKIRSLMKTHRLDKVFVATDAVRKEYEELKKLLPEMVRFEPTWEELELYKDGGVAIIDQWICAHARCLPTSLSAESGSGGFQRFFCPKYSVSEQMVACVHSGHFHTVCLLV

SEQ ID NO: 5531 - protein, 505 aa, Homo sapiens
MLSFFRRTLGRRSMRKHAEKERLREAQRAATHIPAAGDSKSIITCRVSLLDGTDVSVDLPKKAKGQELFDQIMYHLDLIESDYFGLRFMDSAQVAHWLDGTKSIKKQVKIGSPYCLHLRVKFYSSEPNNLREELTRYLFVLQLKQDILSGKLDCPFDTAVQLAAYNLQAELGDYDLAEHSPELVSEFRFVPIQTEEMELAIFEKWKEYRGQTPAQAETNYLNKAKWLEMYGVDMHVVKARDGNDYSLGLTPTGVLVFEGDTKIGLFFWPKITRLDFKKNKLTLVVVEDDDQGKEQEHTFVFRLDHPKACKHLWKCAVEHHAFFRLRGPVQKSSHRSGFIRLGSRFRYSGKTEYQTTKTNKARRSTSFERRPSKRYSRRTLQMKACATKPEELSVHNNVSTQSNGSQQAWGMRSALPVSPSISSAPVPVEIENLPQSPGTDQHDRKWLSAASDCCQRGGNQWNTRALPPPQTAHRNYTDFVHEHNVKNAGIRHDVHFPGHTAMTEI

SEQ ID NO: 5532 - protein, 462 aa, Homo sapiens
MASPLPSGFPARRNSRLDVFLRRHLPPEVYDAVRAYEPCIVVSNSENHILKYVVLSDRLVYLTENPPKSIRRVVALRDVVAIDLIDDYPEFLSSPDREISQHIRIIYSSTVLKKECKKSNSVRKFLFPFHHTKANNKKVKEEKNGLAFWRSKESRSLKESPLRSEEKIKHFSQLKSELFLKDNSLRRILSLLMELKVAAQKNFILKRLFWKTSDLFYFIVNKLHEYLPESRDKNALQNQSQRVDELVACIEIIQTLVLMFRETETESSRLNTLAAKKGALFNLLVILISEPQIPKSCPVFDIQLVADSALVRMSFDAELQKLILEYTNTATALLYEILLVFQQGNLGLGSTKFAISWIMSFLQSCPPIITFVASIVKQVVRGLSASFQLLSPCQAVLLYQQFYILKSCLRHSRTLAEYIRNNYREEFRYFIHMPALQKRLPLCYPITQPTIQLFHEVLKLVE

SEQ ID NO: 5533 - protein, 494 aa, Homo sapiens
MSGEATVLAYHAPEEQEGLLVVKVEEENYVLDQDFGLQENPWSQEVFRQKFRQFSYSDSTGPREALSRLRELCCQWLRPEVHSKEQILELLMLEQFLAILPEELQAWLREHRPENGEEAVTMLEELEKELEEPRQQDTTHGQEMFWQEMTSTGALKSLSLNSPVQPLENQCKTETQESQAFQERDGRMVAGKVLMAKQEIVECVASAAMISPGKLPGETHSQRIAEEALGGLDNSKKQKGNAAGNKISQLPSQDRHFSLATFNRRIPTEHSVLESHESEGSFSMNSNDITQQSVDTREKLYECFDCGKAFCQSSKLIRHQRIHTGERPYACKECGKAFSLSSDLVRHQRIHSGEKPYECCECGKAFRGSSELIRHRRIHTGEKPYECGECGKAFSRSSALIQHKKIHTGDKSYECIACGKAFGRSSILIEHQRIHTGEKPYECNECGKSFNQSSALTQHQRIHTGEKPYECSECRKTFRHRSGLMQHQRTHTRV

SEQ ID NO: 5534 - protein, 564 aa, Homo sapiens
MDSRYNSTAGIGDLNQLSAAIPATRVEVSVSCRNLLDRDTFSKSDPICVLYVQGVGNKEWREFGRTEVIDNTLNPDFVRKFILDYFFEERENLRFDLYDVDSKSPNLSKHDFLGQVFCTLGEIVGSQGSRLEKPIVGIPGKKCGTIILTAEELNCCRDAVLMQFCANKLDKKDFFGKSDPFLVFYRSNEDGSFTICHKTEVVKNTLNPVWQAFKISVRALCNGDYDRTIKVEVYDWDRDGSHDFIGEFTTSYRELSRGQSQFNVYEVVNPKKKGKKKKYTNSGTVTLLSFLVETEVSFLDYIKGGTQINFTVAIDFTASNGNPAQPTSLHYMNPYQLNAYGMALKAVGEIVQDYDSDKMFPALGFGAKLPPDGRISHEFALNGNPQNPYCDGIEGVMEAYYRSLKSVQLYGPTNFAPVINHVARYASSVKDGSQYFVLLIVTDGVISDMAQTKESIVNASKLPMSIIIVGVGPAEFDAMVELDGDDVRVSSRGKYAERDIVQFVPFRDYIDRSGNHILSMARLAKDVLAEIPEQFLSYMRARGIKPSPAPPPYTPPTHVLQTQI

SEQ ID NO: 5535 - protein, 595 aa, Homo sapiens
MGPLTFRDVAIEFSLKEWQCLDTAQRNLYRNVMLENYRNLVFLGITVSKPDLITCLEQGKEAWSMKRHEIMVAKPTVMCSHFAQDLWPEQNIKDSFQKVTLKRYGKCRHENLPLRKGCESMDECKMHKGGCNGLNQCLTATQSKIFQCDKYVKVAHKFSNSNRHEIRHTKKKPFKCTKCGKSFGMISCLTEHSRIHTRVNFYKCEECGKAFNWSSTLTKHKRIHTGEKPYKCEECGKAFNQSSNLIKHKKIHTGEKPYKCEECGKTFNRFSTLTTHKIIHTGEKPYKCKECGKAFNRSSTLTTHRKIHTGEKPYKCEECGKAFKQSSNLTTHKIIHTGEKPYKCKKCGKAFNQSAHLTTHEVIHTGEKPYKCEKCGKAFNHFSHLTTHKIIHTGEKPYKCKECGKAFKHSSTLTKHKIIHTGEKPYKCKECEKAFNQSSKLTEHKKIHTGEKPYECEKCGKAFNQSSNLTRHKKSHTEEKPYKCEECGKGFKWPSTLTIHKIIHTGEKPYKCEECGKAFNQSSKLTKHKKIHTGEKPYTCEECGKAFNQSSNLTKHKRIHTGEKPYKCEECDKAFKWSSVLTKHKIIHTGEKLQI

SEQ ID NO: 5536 - protein, 424 aa, Homo sapiens
MAALGDEVLDGYVFPACPPCSYRYPYPAATKGKGAAGGSWQQRGRGCLPASSPCSAGAASLSFPGCGRLTAAEYFDSYQRERLMALLAQVGPGLGPRARRAGSCDVAVQVSPRIDAAVQCSLGRRTLQRRARDPESPAGPGAEGTTGGGSFSQQPSRRGLEQGSPQNGAPRPMRFPRTVAVYSPLALRRLTAFLEGPGPAAGEQRSGASDGERGPPPARLQGPEEGEVWTKKAPRRPQSDDDGEAQAAVRASWEQPADGPELPPREAQEGEAAPRSALRSPGQPPSAGRARDGGDGREAAVAGEGPSPRSPELGKERLRFQFLEQKYGYYHCKDCNIRWESAYVWCVQGTNKVYFKQFCRTCQKSYNPYRVEDITCQSCKQTRCSCPVKLRHVDPKRPHRQDLCGRCKGKRLSCDSTFSFKYII

SEQ ID NO: 5537 - protein, 603 aa, Homo sapiens
MAVARKIRTLLTVNILVFVGIVLFSVYCRLQGRSQELVRIVSGDRRVRSRHAKVGTLGDREAILQRLDHLEEVVYNQLNGLAKPIGLVEGPGGLGQGGLAATLRDDGQEAEGKYEEYGYNAQLSDRISLDRSIPDYRPRKCRQMSYAQDLPQVSVVFIFVNEALSVILRSVHSVVNHTPSQLLKEVILVDDNSDNVELKFNLDQYVNKRYPGLVKIVRNSRREGLIRARLQGWKAATAPVVGFFDAHVEFNTGWAEPALSRIREDRRRIVLPAIDNIKYSTFEVQQYANAAHGYNWGLWCMYIIPPQDWLDRGDESAPIRTPAMIGCSFVVDREYFGDIGLLDPGMEVYGGENVELGMRVWQCGGSMEVLPCSRVAHIERTRKPYNNDIDYYAKRNALRAAEVWMDDFKSHVYMAWNIPMSNPGVDFGDVSERLALRQRLKCRSFKWYLENVYPEMRVYNNTLTYGEVRNSKASAYCLDQGAEDGDRAILYPCHGMSSQLVRYSADGLLQLGPLGSTAFLPDSKCLVDDGTGRMPTLKKCEDVARPTQRLWDFTQSGPIVSRATGRCLEVEMSKDANFGLRLVVQRCSGQKWMIRNWIKHARH

SEQ ID NO: 5538 - protein, 258 aa, Homo sapiens
MSLESLFQHIIFTEHQAEESRRLMREVRSEITRCREKIKKATEELNEEKIKLESKVQQFFEKSFFLQLLKAHENALEKQYSEITNHRNMLLQTFEAIKKQMIEEEDKFIKEITDFNNDYEITKKRELLMKENVKIEISDLENQANMLKSEMKSMEHDSSQLNELQKQKSELIQELFTLQRKLKVFEDEENESICTTKYLEAEKIKISEKPQNDTECLRLKKELELYKEDDMESVYEALQTEIEFLELTLAQKDLQESK

SEQ ID NO: 5539 - protein, 386 aa, Homo sapiens
MSALEKSMHLGRLPSRPPLPGSGGSQSGAKMRMGPGRKRDFSPVPWSQYFESMEDVEVENETGKDTFRVYKSGSEGPVLLLLHGGGHSALSWAVFTAAIISRVQCRIVALDLRSHGETKVKNPEDLSAETMAKDVGNVVEAMYGDLPPPIMLIGHSMGGAIAVHTASSNLVPSLLGLCMIDVVEGTAMDALNSMQNFLRGRPKTFKSLENAIEWSVKSGQIRNLESARVSMVGQVKQCEGITSPEGSKSIVEGIIEEEEEDEEGSESISKRKKEDDMETKKDHPYTWRIELAKTEKYWDGWFRGLSNLFLSCPIPKLLLLAGVDRLDKDLTIGQMQGKFQMQVLPQCGHAVHEDAPDKVAEAVATFLIRHRFAEPIGGFQCVFPGC

SEQ ID NO: 5540 - protein, 2173 aa, Homo sapiens
MVNENTRMYIPEENHQGSNYGSPRPAHANMNANAAAGLAPEHIPTPGAALSWQAAIDAARQAKLMGSAGNATISTVSSTQRKRQQYGKPKKQGSTTATRPPRALLCLTLKNPIRRACISIVEWKPFEIIILLTIFANCVALAIYIPFPEDDSNATNSNLERVEYLFLIIFTVEAFLKVIAYGLLFHPNAYLRNGWNLLDFIIVVVGLFSAILEQATKADGANALGGKGAGFDVKALRAFRVLRPLRLVSGVPSLQVVLNSIIKAMVPLLHIALLVLFVIIIYAIIGLELFMGKMHKTCYNQEGIADVPAEDDPSPCALETGHGRQCQNGTVCKPGWDGPKHGITNFDNFAFAMLTVFQCITMEGWTDVLYWVNDAVGRDWPWIYFVTLIIIGSFFVLNLVLGVLSGEFSKEREKAKARGDFQKLREKQQLEEDLKGYLDWITQAEDIDPENEDEGMDEEKPRNMSMPTSETESVNTENVAGGDIEGENCGARLAHRISKSKFSRYWRRWNRFCRRKCRAAVKSNVFYWLVIFLVFLNTLTIASEHYNQPNWLTEVQDTANKALLALFTAEMLLKMYSLGLQAYFVSLFNRFDCFVVCGGILETILVETKIMSPLGISVLRCVRLLRIFKITRYWNSLSNLVASLLNSVRSIASLLLLLFLFIIIFSLLGMQLFGGKFNFDEMQTRRSTFDNFPQSLLTVFQILTGEDWNSVMYDGIMAYGGPSFPGMLVCIYFIILFICGNYILLNVFLAIAVDNLADAESLTSAQKEEEEEKERKKLARTASPEKKQELVEKPAVGESKEEKIELKSITADGESPPATKINMDDLQPNENEDKSPYPNPETTGEEDEEEPEMPVGPRPRPLSELHLKEKAVPMPEASAFFIFSSNNRFRLQCHRIVNDTIFTNLILFFILLSSISLAAEDPVQHTSFRNHILGNADYVFTSIFTLEIILKMTAYGAFLHKGSFCRNYFNILDLLVVSVSLISFGIQSSAINVVKILRVLRVLRPLRAINRAKGLKHVVQCVFVAIRTIGNIVIVTTLLQFMFACIGVQLFKGKLYTCSDSSKQTEAECKGNYITYKDGEVDHPIIQPRSWENSKFDFDNVLAAMMALFTVSTFEGWPELLYRSIDSHTEDKGPIYNYRVEISIFFIIYIIIIAFFMMNIFVGFVIVTFQEQGEQEYKNCELDKNQRQCVEYALKARPLRRYIPKNQHQYKVWYVVNSTYFEYLMFVLILLNTICLAMQHYGQSCLFKIAMNILNMLFTGLFTVEMILKLIAFKPKHYFCDAWNTFDALIVVGSIVDIAITEVNPAEHTQCSPSMNAEENSRISITFFRLFRVMRLVKLLSRGEGIRTLLWTFIKSFQALPYVALLIVMLFFIYAVIGMQVFGKIALNDTTEINRNNNFQTFPQAVLLLFRCATGEAWQDIMLACMPGKKCAPESEPSNSTEGETPCGSSFAVFYFISFYMLCAFLIINLFVAVIMDNFDYLTRDWSILGPHHLDEFKRIWAEYDPEAKGRIKHLDVVTLLRRIQPPLGFGKLCPHRVACKRLVSMNMPLNSDGTVMFNATLFALVRTALRIKTEGNLEQANEELRAIIKKIWKRTSMKLLDQVVPPAGDDEVTVGKFYATFLIQEYFRKFKKRKEQGLVGKPSQRNALSLQAGLRTLHDIGPEIRRAISGDLTAEEELDKAMKEAVSAASEDDIFRRAGGLFGNHVSYYQSDGRSAFPQTFTTQRPLHINKAGSSQGDTESPSHEKLVDSTFTPSSYSSTGSNANINNANNTALGRLPRPAGYPSTVSTVEGHGPPLSPAIRVQEVAWKLSSNRERHVPMCEDLELRRDSGSAGTQAHCLLLRRANPSRCHSRESQAAMAGQEETSQDETYEVKMNHDTEACSEPSLLSTEMLSYQDDENRQLTLPEEDKRDIRQSPKRGFLRSASLGRRASFHLECLKRQKDRGGDISQKTVLPLHLVHHQALAVAGLSPLLQRSHSPASFPRPFATPPATPGSRGWPPQPVPTLRLEGVESSEKLNSSFPSIHCGSWAETTPGGGGSSAARRVRPVSLMVPSQAGAPGRQFHGSASSLVEAVLISEGLGQFAQDPKFIEVTTQELADACDMTIEEMESAADNILSGGAPQSPNGALLPFVNCRDAGQDRAGGEEDAGCVRARGRPSEEELQDSRVYVSSL

SEQ ID NO: 5541 - protein, 580 aa, Homo sapiens
MDYPKMDYFLDVESAHRLLDVESAQRFFYSQGAQARRATLLLPPTLMAASSEDDIDRRPIRRVRSKSDTPYLAEARISFNLGAAEEVERLAAMRSDSLVPGTHTPPIRRRSKFANLGRIFKPWKWRKKKSEKFKHTSAALERKISMRQSREELIKRGVLKEIYDKDGELSISNEEDSLENGQSLSSSQLSLPALSEMEPVPMPRDPCSYEVLQPSDIMDGPDPGAPVKLPCLPVKLSPPLPPKKVMICMPVGGPDLSLVSYTAQKSGQQGVAQHHHTVLPSQIQHQLQYGSHGQHLPSTTGSLPMHPSGCRMIDELNKTLAMTMQRLESSEQRVPCSTSYHSSGLHSGDGVTKAGPMGLPEIRQVPTVVIECDDNKENVPHESDYEDSSCLYTREEEEEEEDEDDDSSLYTSSLAMKVCRKDSLAIKLSNRPSKRELEEKNILPRQTDEERLELRQQIGTKLTRRLSQRPTAEELEQRNILKPRNEQEEQEEKREIKRRLTRKLSQRPTVEELRERKILIRFSDYVEVADAQDYDRRADKPWTRLTAADKAAIRKELNEFKSTEMEVHELSRHLTRFHRP

SEQ ID NO: 5542 - protein, 569 aa, Homo sapiens
MPSSLFADLERNGSGGGGGGSSGGGETLDDQRALQLALDQLSLLGLDSDEGASLYDSEPRKKSVNMTECVPVPSSEHVAEIVGRQGCKIKALRAKTNTYIKTPVRGEEPVFVVTGRKEDVAMARREIISAAEHFSMIRASRNKNTALNGAVPGPPNLPGQTTIQVRVPYRVVGLVVGPKGATIKRIQQQTHTYIVTPSRDKEPVFEVTGMPENVDRAREEIEAHIALRTGGIIELTDENDFHANGTDVGFDLHHGSGGSGPGSLWSKPTPSITPTPGRKPFSSYRNDSSSSLGSASTDSYFGGGTSSSAAATQRLADYSPPSPALSFAHNGNNNNNGNGYTYTAGGEASVPSPDGCPELQPTFDPAPAPPPGAPLIWAQFERSPGGGPAAPVSSSCSSSASSSASSSSVVFPGGGASAPSNANLGLLVHRRLHPGTSCPRLSPPLHMAPGAGEHHLARRVRSDPGGGGLAYAAYANGLGAQLPGLQPSDTSGSSSSSSSSSSSSSSSSGLRRKGSRDCSVCFESEVIAALVPCGHNLFCMECANRICEKSEPECPVCHTAVTQAIRIFS

SEQ ID NO: 5543 - protein, 754 aa, Homo sapiens
MAEQWELDEEGIRRLGALTLEQPELVESLSLQGSYAGKIHSIGDAFRNFKNLRSLDLSRNLITSLKGIQYLCSLQDLNLYYNNIPSLVEVSRLQPLPFLKELDLRLNPVVRKDTDYRLFAVYTLQTLEKLDDRTVREGERKAAKLHFSQLGNSENFLLEVEKSSREKTMKNCVTGESSASKVSANVDSRIEMDSNKGLFIPFPNREIKDSLSTSATQGNGTRDQKLDTFPLGTQTQEVARREMPSDNHQEDEFRHYSPRQSTVRSPEKMTREGYQVSFLDNKSSGSSPEKELIPKPDTFHLTHDASLSKCLDVGDSSQIHPYQLPSDVGLENYDSCYSQTLSLHGSLGKRPQRSKNYQEYSIKPSNDIKTTASHSCGDLLTSLSNPDSSTGRLLKLSSDLYATTHFNSDPAVLVNVEQQLSTSLDDLTPAHGSVPNNAVLGNRTTPLRTLLLSPGTSEHRKIFTKRSLSPSKRGFKWKDNILANLNLKHGFQDATGSEPLSSDLGSLHGLAGNHSPPISARTPHVATVLRQLLELVDKHWNGSGSLLLNKKFLGPARDLLLSLVVPAPSQPRCCSHPEDTMKAFCRRELELKEAAQLVPNDMESLKQKLVRVLEENLILSEKIQQLEEGAAISIVSGQQSHTYDDLLHKNQQLTMQVACLNQELAQLKKLEKTVAILHESQRSLVVTNEYLLQQLNKEPKGYSGKALLPPEKGHHLGRSSPFGKSTLSSSSPVAHETGQYLIQSVLDAAPEPGL

SEQ ID NO: 5544 - protein, 410 aa, Homo sapiens
MTLDVGPEDELPDWAAAKEFYQKYDPKDVIGRGVSSVVRRCVHRATGHEFAVKIMEVTAERLSPEQLEEVREATRRETHILRQVAGHPHIITLIDSYESSSFMFLVFDLMRKGELFDYLTEKVALSEKETRSIMRSLLEAVSFLHANNIVHRDLKPENILLDDNMQIRLSDFGFSCHLEPGEKLRELCGTPGYLAPEILKCSMDETHPGYGKEVDLLFPSWACGVILFTLLAGSPPFWHRRQILMLRMIMEGQYQFSSPEWDDRSSTVKDLISRLLQVDPEARLTAEQALQHPFFERCEGSQPWNLTPRQRFRVAVWTVLAAGRVALSTHRVRPLTKNALLRDPYALRSVRHLIDNCAFRLYGHWVKKGEQQNRAALFQHRPPGPFPIMGPEEEGDSAAITEDEAVLVLG

SEQ ID NO: 5545 - protein, 2351 aa, Homo sapiens
MFFKMKNEIDNDPESEKCIKDSTIMRREPQNILSPLMLPNLEIPFSVKDIISRIERAQLHRAREDIDMQLSEIMNNVHRIMTRYTLVFNSSSERNVSLTEHKKKQRTNFLEKMATYAKTIEIREKTLANILAWLEEWNDVLSEMTLMDVDEHHHWIAQMELLPDTLKAIENNVKILSRFSTSFLDEKKKQKKKILSRGTLWKSWKERVIKRPSTARALRPDQMISDQLATNTKVSEIQGMLQELIGTTMFSTLENNAIKYISSTIVNLSTALSMLNDELKCVNFQSSTVYAHETSEAEKELSLKIIRDLSNENEMLQQKLQDAEEKCEQLIRSKIVIEQLYAKLSTSSTLKVLPGPSPQSSRAIIKVGDTEDNMDNILDKELENIVDEVQRKETKDSGIKWDSTISYTAQAERTPDLTELRQQPVASEDISEDSTKDNVSLKKGDFYQEDETDEYQSWKRSHKKATYVYETSGPNLSDNKSGQKVSEAKPSQYYELQVLKKKRKEMKSFSEDKSKSPTEAKRKHLSLTETKSQGGKSGTSMMMLEQFRKVKRESPFDKRPTAAEIKVEPTTESLDKEGKGEIRSLVEPLSMIQFDDTAEPQKGKIKGKKHHISSGTITSKEEKTEEKEELTKQVKSHQLVKSLSRVAKETSESTRVLESPDGKSEQSNLEEFQEAIMAFLKQKIDNIGKAFDKKTVPKEEELLKRAEAEKLGIIKAKMEEYFQKVAETVTKILRKYKDTKKEEQVGEKPIKQKKVVSFMPGLHFQKSPISAKSESSTLLSYESTDPVINNLIQMILAEIESERDIPTVSTVQKDHKEKEKQRQEQYLQEGQEQMSGMSLKQQLLGERNLLKEHYEKISENWEEKKAWLQMKEGKQEQQSQKQWQEEEMWKEEQKQATPKQAEQEEKQKQRGQEEEELPKSSLQRLEEGTQKMKTQGLLLEKENGQMRQIQKEAKHLGPHRRREKGKEKQKPERGLEDLERQIKTKDQMQMKETQPKELEKMVIQTPMTLSPRWKSVLKDVQRSYEGKEFQRNLKTLENLPDEKEPISITPPPSLQYSLPGALPISGQPLTKCIHLTPQQAQEVGITLTPQQAQAQGITLTLQQAQELGIPLTPQQAQALEILFTPQQAQALGIPLTPQQTQVQGITLTPQQDQAPGISLTTQQAQKLGIPLTPQQAQALGIPLTPQQAQELGIPLTPQQAQALRVSLTPQQAQELGIPLTPQQAQALGITLTLQQAQQLGIPLTPQQAQALGITLTPKQVQELGIPLTPQQAQALGITLTPKQAQELGIPLNPQQAQTLGIPLTPKQAQALGIPFTPQQAQALGIPLTPQQAQTQEITLTPQQAQALGMPLTTQQAQELGIPLTPQHAQALGMPLTTQQAQELGIPLTPQQAQALGMPLTTQQAQELGIPLTPQQAQELGIPFTPQQAQAQEITLTPQQAQALGMPLTAQQAQELGITLTPQQAQELGIPLTPQQAQALGIPLIPPQAQELGIPLTPQQAQALGILLIPPQAQELGIPLTPQQAQALGIPLIPPQAQELGIPLTPQQVQALGIPLIPPQAQELEIPLTPQQAQALGIPLTPQQAQELGIPLTPQQAQELGIPLTPQQAQAQGIPLTPQQAQALGISLTPQQAQAQGITLTPQQAQALGVPITPVNAWVSAVTLTSEQTHALESPMNLEQAQEQLLKLGVPLTLDKAHTLGSPLTLKQVQWSHRPFQKSKASLPTGQSIISRLSPSLRLSLASSAPTAEKSSIFGVSSTPLQISRVPLNQGPFAPGKPLEMGILSEPGKLGAPQTLRSSGQTLVYGGQSTSAQFPAPQAPPSPGQLPISRAPPTPGQPFIAGVPPTSGQIPSLWAPLSPGQPLVPEASSIPGDLLESGPLTFSEQLQEFQPPATAEQSPYLQAPSTPGQHLATWTLPGRASSLWIPPTSRHPPTLWPSPAPGKPQKSWSPSVAKKRLAIISSLKSKSVLIHPSAPDFKVAQVPFTTKKFQMSEVSDTSEETQILRDTFAIESFRTFQSHFTKYRTPVYQTPYTDERALLTLMKPTTSPSSLTTLLRTSQISPLEWYQKSRFPPIDKPWILSSVSDTKKPKVMVPPSSPQELEEKRYFVDVEAQKKNLILLNQAIKTCGLPSQLHTMARTLIIEILHMDTVQLGYLFRKYIAYRLIQHARNNIMKRLKAIQNTGKGYEARNLHMMLSRLDDYGKKVMQVWTEKQKSLGQKRNQCLKKMIHVFNQLKKIHELNLSQPIPLIIEEKQIPASTTFVQKPFLKLLMEEDRTSDICKKFRQQEDQTEAIWNVDLSTSSYPIAEKTSMHSLWAQLGGYPDIPRLLQLEVQSTFRKSLASLQSRVKKIPK

SEQ ID NO: 5546 - protein, 450 aa, Homo sapiens
MQPPRERLVVTGRAGWMGMGRGAGRSALGFWPTLAFLLCSFPAATSPCKILKCNSEFWSATSGSHAPASDDTPEFCAALRSYALCTRRTARTCRGDLAYHSAVHGIEDLMSQHNCSKDGPTSQPRLRTLPPAGDSQERSDSPEICHYEKSFHKHSATPNYTHCGLFGDPHLRTFTDRFQTCKVQGAWPLIDNNYLNVQVTNTPVLPGSAATATSKLTIIFKNFQECVDQKVYQAEMDELPAAFVDGSKNGGDKHGANSLKITEKVSGQHVEIQAKYIGTTIVVRQVGRYLTFAVRMPEEVVNAVEDWDSQGLYLCLRGCPLNQQIDFQAFHTNAEGTGARRLAAASPAPTAPETFPYETAVAKCKEKLPVEDLYYQACVFDLLTTGDVNFTLAAYYALEDVKMLHSNKDKLHLYERTRDLPGRAAAGLPLAPRPLLGALVPLLALLPVFC

SEQ ID NO: 5547 - protein, 676 aa, Homo sapiens
MRVLGGRCGALLACLLLVLPVSEANFLSKQQASQVLVRKRRANSLLEETKQGNLERECIEELCNKEEAREVFENDPETDYFYPKYLVCLRSFQTGLFTAARQSTNAYPDLRSCVNAIPDQCSPLPCNEDGYMSCKDGKASFTCTCKPGWQGEKCEFDINECKDPSNINGGCSQICDNTPGSYHCSCKNGFVMLSNKKDCKDVDECSLKPSICGTAVCKNIPGDFECECPEGYRYNLKSKSCEDIDECSENMCAQLCVNYPGGYTCYCDGKKGFKLAQDQKSCEVVSVCLPLNLDTKYELLYLAEQFAGVVLYLKFRLPEISRFSAEFDFRTYDSEGVILYAESIDHSAWLLIALRGGKIEVQLKNEHTSKITTGGDVINNGLWNMVSVEELEHSISIKIAKEAVMDINKPGPLFKPENGLLETKVYFAGFPRKVESELIKPINPRLDGCIRSWNLMKQGASGIKEIIQEKQNKHCLVTVEKGSYYPGSGIAQFHIDYNNVSSAEGWHVNVTLNIRPSTGTGVMLALVSGNNTVPFAVSLVDSTSEKSQDILLSVENTVIYRIQALSLCSDQQSHLEFRVNRNNLELSTPLKIETISHEDLQRQLAVLDKAMKAKVATYLGGLPDVPFSATPVNAFYNGCMEVNINGVQLDLDEAISKHNDIRAHSCPSVWKKTKNS

SEQ ID NO: 5548 - protein, 882 aa, Homo sapiens
MPGRARTRARGRARRRESYQQEAPGGPRAPGSATTQEPPQLQSTPRPLQEEVPVVRPLQPRAARGGAGGGAQSQGVKEPGPEAGLHTAPLQERRIGGVFQDLVVNTRQDMKHVKDSKTGSEGTVVQLLANHFRVISRPQWVAYKYNVDYKPDIEDGNLRTILLDQHRRKFGERHIFDGNSLLLSRPLKERRVEWLSTTKDKNIVKITVEFSKELTPTSPDCLRYYNILFRRTFKLLDFEQVGRNYYTKKKAIQLYRHGTSLEIWLGYVTSVLQYENSITLCADVSHKLLRIETAYDFIKRTSAQAQTGNIREEVTNKLIGSIVLTKYNNKTYRVDDIDWKQNPEDTFNKSDGSKITYIDYYRQQHKEIVTVKKQPLLVSQGRWKKGLTGTQREPILLIPQLCHMTGLTDEICKDYSIVKELAKHTRLSPRRRHHTLKEFINTLQDNKKVRELLQLWDLKFDTNFLSVPGRVLKNANIVQGRRMVKANSQGDWSREIRELPLLNAMPLHSWLILYSRSSHREAMSLKGHLQSVTAPMGITMKPAEMIEVDGDANSYIDTLRKYTRPTLQMGMSCLLVFKVICILPNDDKRRYDSIKRYLCTKCPIPSQCVVKKTLEKVQARTIVTKIAQQMNCKMGGALWKVETDVQRTMFVGIDCFHDIVNRQKSIAGFVASTNAELTKWYSQCVIQKTGEELVKELEICLKAALDVWCKNESSMPHSVIVYRDGVGDGQLQALLDHEAKKMSTYLKTISPNNFTLAFIVVKKRINTRFFLKHGSNFQNPPPGTVIDVELTRNEWYDFFIVSQSVQDGTVTPTHYNVIYDTIGLSPDTVQRLTYCLCHMYYNLPGIIRVPAPCHYAHKLAYLVGQSIHQEPNRSLSTRLFYL

SEQ ID NO: 5549 - protein, 310 aa, Homo sapiens
MAATGANAEKAESHNDCPVRLLNPNIAKMKEDILYHFNLTTSRHNFPALFGDVKFVCVGGSPSRMKAFIRCVGAELGLDCPGRDYPNICAGTDRYAMYKVGPVLSVSHGMGIPSISIMLHELIKLLYYARCSNVTIIRIGTSGGIGLEPGTVVITEQAVDTCFKAEFEQIVLGKRVIRKTDLNKKLVQELLLCSAELSEFTTVVGNTMCTLDFYEGQGRLDGALCSYTEKDKQAYLEAAYAAGVRNIEMESSVFAAMCSACGLQAAVVCVTLLNRLEGDQISSPRNVLSEYQQRPQRLVSYFIKKKLSKA

SEQ ID NO: 5550 - protein, 313 aa, Homo sapiens
MKKEQDSNVTEFVLLGLSSSWELQLFLFLLFLFFYIAIVLGNLLIVVTVQAHAHLLQSPMYYFLGHLSFIDLCLSCVTVPKMLGDFLQQGKSISFSGCLAQIYFLHFLGASEMFLLTVMAYDRYVAICNPLRYLTVMNPQLCLWLVLACWCGGFIHSIMQVILVIQLPFCGPNELDNFYCDVPQVIKLACMDTYVVEVLVIANSGLLSLVCFLVLLFSYAIILITLRTHFCQGQNKVFSTCASHLTVVSLIFVPCVFIYLRPFCSFSVDKIFSLFYTVITPMLNPLIYTLRNTDMKTAMKKLRIKPCGIPLPC

SEQ ID NO: 5551 - protein, 586 aa, Homo sapiens
MSANPRWDISRALGVAKLFHLVCGVREACVTPFLTLYLRQLGLAAPWVGTLMGTKHLIAAFWAPVCAFLAKSYRKRRALLIGSLLGSVGASLLMVLVPPVDKNRVHFPCNGSSGLTSTDALPGVTLPVNITSAQESASSHPAKRTAEVEMPGFRNPPGESDRETFRDLHVYLAPSVEGARTTSQALLHPVTSGLKDHPWEVTFEVVKTALPLLPGGKGPGNPANLSGTKGKAWAFDLSLEALRRTFILSLGSVAFWELLTAPLEQVADDSLYEFLDFVDATDRYRSLWVWRLLGMSAGVCGITALVGQLDCFLMTSGPRGVVHFYGYSVVSTLALLVSIAFPIPICQQWEPSYKRVKALSIVGGDPHLILLASTTVLVGAIVSTVQNFLFWHMKDHGSGELVMGFSVALSLLGEILLHPFKATLLRKLSRTGLVGLGLSCLAGQLLYYSFLWSWWSVLPIQILSAISNRALWWAVGASVEDLATPRMERALSALFRGHFYGSGCSLGSFVGGFVVMRFSLAVLYQACCVALLLWLALLLSIQRRLPRERKIKYSKLLSMEVSDTSDSEQGTEQDWLVKAMREEHSD

SEQ ID NO: 5552 - protein, 462 aa, Homo sapiens
MGKEKTHINIVVIGHVDSGKSTTTGHLIYKCGGIDKRTIEKFEKEAAEMGKGSFKYAWVLDKLKAERERGITIDISLWKFETSKYYVTIIDAPGHRDFIKNMITGTSQADCAVLIVAAGVGEFEAGISKNGQTREHALLAYTLGVKQLIVGVNKMDSTEPPYSQKRYEEIVKEVSTYIKKIGYNPDTVAFVPISGWNGDNMLEPSANMPWFKGWKVTRKDGNASGTTLLEALDCILPPTRPTDKPLRLPLQDVYKIGGIGTVPVGRVETGVLKPGMVVTFAPVNVTTEVKSVEMHHEALSEALPGDNVGFNVKNVSVKDVRRGNVAGDSKNDPPMEAAGFTAQVIILNHPGQISAGYAPVLDCHTAHIACKFAELKEKIDRRSGKKLEDGPKFLKSGDAAIVDMVPGKPMCVESFSDYPPLGRFAVRDMRQTVAVGVIKAVDKKAAGAGKVTKSAQKAQKAK

SEQ ID NO: 5553 - protein, 744 aa, Homo sapiens
MAADKPADQGAEKHEGTGQSSGITDQEKELSTNAFQAFTSGNYDACLQHLACLQDINKDDYKIILNTAVAEFFKSNQTTTDNLRQTLNQLKNQVHSAVEEMDGLDDVENSMLYYNQAVILYHLRQYTEAISVGEKLYQFIEPFEEKFAQAVCFLLVDLYILTYQAEKALHLLAVLEKMISQGNNNKNGKNETGNNNNKDGSNHKAESGALIEAAKSKIHQYKVRAYIQMKSLKACKREIKSVMNTAGNSAPSLFLKSNFEYLRGNYRKAVKLLNSSNIAEHPGFMKTGECLRCMFWNNLGCIHFAMSKHNLGIFYFKKALQENDNVCAQLSAGSTDPGKKFSGRPMCTLLTNKRYELLYNCGIQLLHIGRPLAAFECLIEAVQVYHANPRLWLRLAECCIAANKGTSEQETKGLPSKKGIVQSIVGQGYHRKIVLASQSIQNTVYNDGQSSAIPVASMEFAAICLRNALLLLPEEQQDPKQENGAKNSNQLGGNTESSESSETCSSKSHDGDKFIPAPPSSPLRKQELENLKCSILACSAYVALALGDNLMALNHADKLLQQPKLSGSLKFLGHLYAAEALISLDRISDAITHLNPENVTDVSLGISSNEQDQGSDKGENEAMESSGKRAPQCYPSSVNSARTVMLFNLGSAYCLRSEYDKARKCLHQAASMIHPKEVPPEAILLAVYLELQNGNTQLALQIIKRNQLLPAVKTHSEVRKKPVFQPVHPIQPIQMPAFTTVQRK

SEQ ID NO: 5554 - protein, 226 aa, Homo sapiens
MSETAPAETATPAPVEKSPAKKKATKKAAGAGAAKRKATGPPVSELITKAVAASKERNGLSLAALKKALAAGGYDVEKNNSRIKLGLKSLVSKGTLVQTKGTGASGSFKLNKKAASGEAKPKAKKAGAAKAKKPAGATPKKAKKAAGAKKAVKKTPKKAKKPAAAGVKKVAKSPKKAKAAAKPKKATKSPAKPKAVKPKAAKPKAAKPKAAKPKAAKAKKAAAKKK

SEQ ID NO: 5555 - protein, 586 aa, Homo sapiens
MARGYGATVSLVLLGLGLALAVIVLAVVLSRHQAPCGPQAFAHAAVAADSKVCSDIGRAILQQQGSPVDATIAALVCTSVVNPQSMGLGGGVIFTIYNVTTGKVEVINARETVPASHAPSLLDQCAQALPLGTGAQWIGVPGELRGYAEAHRRHGRLPWAQLFQPTIALLRGGHVVAPVLSRFLHNSILRPSLQASTLRQLFFNGTEPLRPQDPLPWPALATTLETVATEGVEVFYTGRLGQMLVEDIAKEGSQLTLQDLAKFQPEVVDALEVPLGDYTLYSPPPPAGGAILSFILNVLRGFNFSTESMARPEGRVNVYHHLVETLKFAKGQRWRLGDPRSHPKLQNASRDLLGETLAQLIRQQIDGRGDHQLSHYSLAEAWGHGTGTSHVSVLGEDGSAVAATSTINTPFGAMVYSPRTGIILNNELLDLCERCPRGSGTTPSPVSGDRVGGAPGRCWPPVPGERSPSSMVPSILINKAQGSKLVIGGAGGELIISAVAQAIMSKLWLGFDLRAAIAAPILHVNSKGCVEYEPNFSQEVQRGLQDRGQNQTQRPFFLNVVQAVSQEGACVYAVSDLRKSGEAAGY

SEQ ID NO: 5556 - protein, 638 aa, Homo sapiens
MNRQVCKKSFSGRSQGFSGRSAVVSGSSRMSCVARSGGAGGGACGFRSGAGSFGSRSLYNLGSNKSISISVAAGSSRAGGFGGGRSSCGFAGGYGGGFGGSYGGGFGGGRGVGSGFGGAGGFGGAGGFGGPGVFGGPGSFGGPGGFGPGGFPGGIQEVIVNQSLLQPLNVEIDPQIGQVKAQEREQIKTLNNKFASFIDKVRFLEQQNKVLETKWELLQQQTTGSGPSSLEPCFESYISFLCKQLDSLLGERGNLEGELKSMQDLVEDFKKKYEDEINKRTAAENEFVGLKKDVDAAFMNKVELQAKVDSLTDEVSFLRTLYEMELSQMQSHASDTSVVLSMDNNRCLDLGSIIAEVRAQYEEIAQRSKSEAEALYQTKLGELQTTAGRHGDDLRNTKSEIMELNRMIQRLRAEIENVKKQNANLQTAIAEAEQRGEMALKDANAKLQDLQTALQKAKDDLARLLRDYQELMNVKLALDVEIATYRKLLEGEECRMSGECQSAVCISVVSNVTSTSGSSGSSRGVFGGVSGSGSGGYKGGSSSSSSSGYGVSGGSGSGYGGVSSGSTGGRGSSGSYQSSSSGSRLGGAGSISVSHSGMGSSSGSIQTSGGSGYKSGGGGSTSIRFSQTTSSSQHSSTK

SEQ ID NO: 5557 - protein, 994 aa, Homo sapiens
MSYDYHQNWGRDGGPRSSGGGYGGGPAGGHGGNRGSGGGGGGGGGGRGGRGRHPGHLKGREIGMWYAKKQGQKNKEAERQERAVVHMDERREEQIVQLLNSVQAKNDKESEAQISWFAPEDHGYGTEVSTKNTPCSENKLDIQEKKLINQEKKMFRIRNRSYIDRDSEYLLQENEPDGTLDQKLLEDLQKKKNDLRYIEMQHFREKLPSYGMQKELVNLIDNHQVTVISGETGCGKTTQVTQFILDNYIERGKGSACRIVCTQPRRISAISVAERVAAERAESCGSGNSTGYQIRLQSRLPRKQGSILYCTTGIILQWLQSDPYLSSVSHIVLDEIHERNLQSDVLMTVVKDLLNFRSDLKVILMSATLNAEKFSEYFGNCPMIHIPGFTFPVVEYLLEDVIEKIRYVPEQKEHRSQFKRGFMQGHVNRQEKEEKEAIYKERWPDYVRELRRRYSASTVDVIEMMEDDKVDLNLIVALIRYIVLEEEDGAILVFLPGWDNISTLHDLLMSQVMFKSVNQTQVFKRTPPGVRKIVIATNIAETSITIDDVVYVIDGGKIKETHFDTQNNISTMSAEWVSKANAKQRKGRAGRVQPGHCYHLYNGLRASLLDDYQLPEILRTPLEELCLQIKILRLGGIAYFLSRLMDPPSNEAVLLSIRHLMELNALDKQEELTPLGVHLARLPVEPHIGKMILFGALFCCLDPVLTIAASLSFKDPFVIPLGKEKIADARRKELAKDTRSDHLTVVNAFEGWEEARRRGFRYEKDYCWEYFLSSNTLQMLHNMKGQFAEHLLGAGFVSSRNPKDPESNINSDNEKIIKAVICAGLYPKVAKIRLNLGKKRKMVKVYTKTDGLVAVHPKSVNVEQTDFHYNWLIYHLKMRTSSIYLYDCTEVSPYCLLFFGGDISIQKDNDQETIAVDEWIVFQSPARIAHLVKELRKELDILLQEKIESPHPVDWNDTKSRDCAVLSAIIDLIKTQEKATPRNFPPRFQDGYYS

SEQ ID NO: 5558 - protein, 1009 aa, Homo sapiens
MEALTLWLLPWICQCVSVRADSIIHIGAIFEENAAKDDRVFQLAVSDLSLNDDILQSEKITYSIKVIEANNPFQAVQEACDLMTQGILALVTSTGCASANALQSLTDAMHIPHLFVQRNPGGSPRTACHLNPSPDGEAYTLASRPPVRLNDVMLRLVTELRWQKFVMFYDSEYDIRGLQSFLDQASRLGLDVSLQKVDKNISHVFTSLFTTMKTEELNRYRDTLRRAILLLSPQGAHSFINEAVETNLASKDSHWVFVNEEISDPEILDLVHSALGRMTVVRQIFPSAKDNQKCTRNNHRISSLLCDPQEGYLQMLQISNLYLYDSVLMLANAFHRKLEDRKWHSMASLNCIRKSTKPWNGGRSMLDTIKKGHITGLTGVMEFREDSSNPYVQFEILGTTYSETFGKDMRKLATWDSEKGLNGSLQERPMGSRLQGLTLKVVTVLEEPFVMVAENILGQPKRYKGFSIDVLDALAKALGFKYEIYQAPDGRYGHQLHNTSWNGMIGELISKRADLAISAITITPERESVVDFSKRYMDYSVGILIKKPEEKISIFSLFAPFDFAVWACIAAAIPVVGVLIFVLNRIQAVRAQSAAQPRPSASATLHSAIWIVYGAFVQQGGESSVNSMAMRIVMGSWWLFTLIVCSSYTANLAAFLTVSRMDNPIRTFQDLSKQVEMSYGTVRDSAVYEYFRAKGTNPLEQDSTFAELWRTISKNGGADNCVSSPSEGIRKAKKGNYAFLWDVAVVEYAALTDDDCSVTVIGNSISSKGYGIALQHGSPYRDLFSQRILELQDTGDLDVLKQKWWPHMGRCDLTSHASAQADGKSLKLHSFAGVFCILAIGLLLACLVAALELWWNSNRCHQETPKEDKEVNLEQVHRRMNSLMDEDIAHKQISPASIELSALEMGGLAPTQTLEPTREYQNTQLSVSTFLPEQSSHGTSRTLSSGPSSNLPLPLSSSATMPSMQCKHRSPNGGLFRQSPVKTPIPMSFQPVPGGVLPEALDTSHGTSI

SEQ ID NO: 5559 - protein, 832 aa, Homo sapiens
MEGDGGTPWALALLRTFDAGEFTGWEKVGSGGFGQVYKVRHVHWKTWLAIKCSPSLHVDDRERMELLEEAKKMEMAKFRYILPVYGICREPVGLVMEYMETGSLEKLLASEPLPWDLRFRIIHETAVGMNFLHCMAPPLLHLDLKPANILLDAHYHVKISDFGLAKCNGLSHSHDLSMDGLFGTIAYLPPERIREKSRLFDTKHDVYSFAIVIWGVLTQKKPFADEKNILHIMVKVVKGHRPELPPVCRARPRACSHLIRLMQRCWQGDPRVRPTFQGNGLNGELIRQVLAALLPVTGRWRSPGEGFRLESEVIIRVTCPLSSPQEITSETEDLCEKPDDEVKETAHDLDVKSPPEPRSEVVPARLKRASAPTFDNDYSLSELLSQLDSGVSQAVEGPEELSRSSSESKLPSSGSGKRLSGVSSVDSAFSSRGSLSLSFEREPSTSDLGTTDVQKKKLVDAIVSGDTSKLMKILQPQDVDLALDSGASLLHLAVEAGQEECAKWLLLNNANPNLSNRRGSTPLHMAVERRVRGVVELLLARKISVNAKDEDQWTALHFAAQNGDESSTRLLLEKNASVNEVDFEGRTPMHVACQHGQENIVRILLRRGVDVSLQGKDAWLPLHYAAWQGHLPIVKLLAKQPGVSVNAQTLDGRTPLHLAAQRGHYRVARILIDLCSDVNVCSLLAQTPLHVAAETGHTSTARLLLHRGAGKEAMTSDGYTALHLAARNGHLATVKLLVEEKADVLARGPLNQTALHLAAAHGHSEVVEELVSADVIDLFDEQGLSALHLAAQGRHAQTVETLLRHGAHINLQSLKFQGGHGPAATLLRRSKT

SEQ ID NO: 5560 - protein, 611 aa, Homo sapiens
MDPGAGSETSLTVNEQVIVMSGHETIRVLEVGVDAQLPAEEESKGLEGVAAEGSQSGDPAEASQAAGEAGPDNLGSSAEATVKSPPGIPPSPATAIATFSQAPSQPQASQTLTPLAVQAAPQVLTQENLATVLTGVMVPAGAVTQPLLIPISIAGQVAGQQGLAVWTIPTATVAALPGLTAASPTGGVFKPPLAGLQAAAVLNTALPAPVQAAAPVQASSTAQPRPPAQPQTLFQTQPLLQTTPAILPQPTAATAAAPTPKPVDTPPQITVQPAGFAFSPGIISAASLGGQTQILGSLTTAPVITSAIPSMPGISSQILTNAQGQVIGTLPWVVNSASVAAPAPAQSLQVQAVTPQLLLNAQGQVIATLASSPLPPPVAVRKPSTPESPAKSEVQPIQPTPTVPQPAVVIASPAPAAKPSASAPIPITCSETPTVSQLVSKPHTPSLDEDGINLEEIREFAKNFKIRRLSLGLTQTQVGQALTATEGPAYSQSAICRFEKLDITPKSAQKLKPVLEKWLNEAELRNQEGQQNLMEFVGGEPSKKRKRRTSFTPQAIEALNAYFEKNPLPTGQEITEIAKELNYDREVVRVWFCNRRQTLKNTSKLNVFQIP

SEQ ID NO: 5561 - protein, 727 aa, Homo sapiens
MPKNSKVTQREHSSEHVTESVADLLALEEPVDYKQSVLNVAGEAGGKQKAVEEELDAEDRPAWNSKLQYILAQIGFSVGLGNIWRFPYLCQKNGGGAYLVPYLVLLIIIGIPLFFLELAVGQRIRRGSIGVWHYICPRLGGIGFSSCIVCLFVGLYYNVIIGWSIFYFFKSFQYPLPWSECPVVRNGSVAVVEAECEKSSATTYFWYREALDISDSISESGGLNWKMTLCLLVAWSIVGMAVVKGIQSSGKVMYFSSLFPYVVLACFLVRGLLLRGAVDGILHMFTPKLDKMLDPQVWREAATQVFFALGLGFGGVIAFSSYNKQDNNCHFDAALVSFINFFTSVLATLVVFAVLGFKANIMNEKCVVENAEKILGYLNTNVLSRDLIPPHVNFSHLTTKDYMEMYNVIMTVKEDQFSALGLDPCLLEDELDKSVQGTGLAFIAFTEAMTHFPASPFWSVMFFLMLINLGLGSMIGTMAGITTPIIDTFKVPKEMFTVGCCVFAFLVGLLFVQRSGNYFVTMFDDYSATLPLTLIVILENIAVAWIYGTKKFMQELTEMLGFRPYRFYFYMWKFVSPLCMAVLTTASIIQLGVTPPGYSAWIKEEAAERYLYFPNWAMALLITLIVVATLPIPVVFVLRHFHLLSDGSNTLSVSYKKGRMMKDISNLEENDETRFILSKVPSEAPSPMPTHRSYLGPGSTSPLETSGNPNGRYGSGYLLASTPESEL

SEQ ID NO: 5562 - protein, 373 aa, Homo sapiens
MWAAGRWGPTFPSSYAGFSADCRPRSRPSSDSCSVPMTGARGQGLEVVRSPSPPLPLSCSNSTRSLLSPLGHQSFQFDEDDGDGEDEEDVDDEEDVDEDAHDSEAKVASLRGMELQGCASTQVESENNQEEQKQVRLPESRLTPWEVWFIGKEKEERDRLQLKALEELNQQLEKRKEMEEREKRKIIAEEKHKEWVQKKNEQKRKEREQKINKEMEEKAAKELEKEYLQEKAKEKYQEWLKKKNAEECERKKKEKEKEKQQQAEIQEKKEIAEKKFQEWLENAKHKPRPAAKSYGYANGKLTGFYSGNSYPEPAFYNPIPWKPIHMPPPKEAKDLSGRKSKRPVISQPHKSSSLVIHKARSNLCLGTLCRIQR

SEQ ID NO: 5563 - protein, 428 aa, Homo sapiens
MPAWIFVNRSLALGKIRCFGFDMDYTLAAYKSPAYEALTFELLLERLVCIGYPHEILRYTYDPTFPTRRLVFDELYGNLLKVDAHGNVLLGAYGFTFLSEAEIWSFYPSKFIQRDDLQCFYILNMLFNLPETYLYACLVDFFSGCSRYTNCDTGYQHGNLFMSFRSLFQDVTDAMNNIHQSGCLKKTLEDLEKYVKKDPRLPILLGKMKEVGKVFLATNSSYNYTNAIMTYLFSISEAEASGRPWRSYFDLIVVDTQKPHFFAEGLVLRQVNTDSGKLHVGTYTGPHQHCAVYSGGSSDMVCELLGVRGMDILYIGDHIFGDILKSKKRQGWRTCLVVPELSWELDIWAQEKERLEELKRLDTHLADIYQHMDGSSCELQVINFTKREIQMPHESVVEQEQANLDPASCLLSCNQRSLPAKSCLSSAI

SEQ ID NO: 5564 - protein, 321 aa, Homo sapiens
MAQAVWSRLGRILWLACLLPWAPAGVAAEFLVGDLVVTQNTSLPWPSSYLTKTVLKVSFLLHDPSNFLKTALFLYSWDFGDGTQMVTEDSVVYYNYSIIGTFTVKLKVVAEWEEVEPDATRAVKQKTGDFSASLKLQETLRGIQVLGPTLIQTFQKMTVTLNFLGSPPLTVCWRLKPECLPLEEGECHPVSVASTAYNLTHTFRDPGDYCFSIRAENIISKTHQYHKIQVWPSRIQPAVFAFPCATLITVMLAFIMYMTLRNATQQKDMVENPEPPSGVRCCCQMCCGPFLLETPSEYLEIVRENHGLLPPLYKSVKTYTV

SEQ ID NO: 5565 - protein, 1059 aa, Homo sapiens
MEPTVADVHLVPRTTKEVPALDAACCRAASIGVVATSLVVLTLGVLLAFLSTQGFHVDHTAELRGIRWTSSLRRETSDYHRTLTPTLEALLHFLLRPLQTLSLGLEEELLQRGIRARLREHGISLAAYGTIVSAELTGRHKGPLAERDFKSGRCPGNSFSCGNSQCVTKVNPECDDQEDCSDGSDEAHCECGLQPAWRMAGRIVGGMEASPGEFPWQASLRENKEHFCGAAIINARWLVSAAHCFNEFQDPTKWVAYVGATYLSGSEASTVRAQVVQIVKHPLYNADTADFDVAVLELTSPLPFGRHIQPVCLPAATHIFPPSKKCLISGWGYLKEDFLVKPEVLQKATVELLDQALCASLYGHSLTDRMVCAGYLDGKVDSCQGDSGGPLVCEEPSGRFFLAGIVSWGIGCAEARRPGVYARVTRLRDWILEATTKASMPLAPTMAPAPAAPSTAWPTSPESPVVSTPTKSMQALSTVPLDWVTVPKLQECGARPAMEKPTRVVGGFGAASGEVPWQVSLKEGSRHFCGATVVGDRWLLSAAHCFNHTKVEQVRAHLGTASLLGLGGSPVKIGLRRVVLHPLYNPGILDFDLAVLELASPLAFNKYIQPVCLPLAIQKFPVGRKCMISGWGNTQEGNATKPELLQKASVGIIDQKTCSVLYNFSLTDRMICAGFLEGKVDSCQGDSGGPLACEEAPGVFYLAGIVSWGIGCAQVKKPGVYTRITRLKGWILEIMSSQPLPMSPPSTTRMLATTSPRTTAGLTVPGATPSRPTPGAASRVTGQPANSTLSAVSTTARGQTPFPDAPEATTHTQLPDCGLAPAALTRIVGGSAAGRGEWPWQVSLWLRRREHRCGAVLVAERWLLSAAHCFDVYGDPKQWAAFLGTPFLSGAEGQLERVARIYKHPFYNLYTLDYDVALLELAGPVRRSRLVRPICLPEPAPRPPDGTRCVITGWGSVREGGSMARQLQKAAVRLLSEQTCRRFYPVQISSRMLCAGFPQGGVDSCSGDAGGPLACREPSGRWVLTGVTSWGYGCGRPHFPGVYTRVAAVRGWIGQHIQE

SEQ ID NO: 5566 - protein, 1174 aa, Homo sapiens [sequence omitted]

SEQ ID NO: 5567 - protein, 311 aa, Homo sapiens
MAAENSSFVTQFILAGLTDQPGVQIPLFFLFLGFYVVTVVGNLGLITLIRLNSHLHTPMYFFLYNLSFIDFCYSSVITPKMLMSFVLKKNSISYAGCMTQLFFFLFFVVSESFILSAMAYDRYVAICNPLLYMVTMSPQVCFLLLLGVYGMGFAGAMAHTACMMGVTFCANNLVNHYMCDILPLLECACTSTYVNELVVFVVVGIDIGVPTVTIFISYALILSSIFHIDSTEGRSKAFSTCSSHIIAVSLFFGSGAFMYLKPFSLLAMNQGKVSSLFYTTVVPMLNPLIYSLRNKDVKVALKKILNKNAFS

SEQ ID NO: 5568 - protein, 328 aa, Homo sapiens
MDNASFSEPWPANASGPDPALSCSNASTLAPLPAPLAVAVPVVYAVICAVGLAGNSAVLYVLLRAPRMKTVTNLFILNLAIADELFTLVLPINIADFLLRQWPFGELMCKLIVAIDQYNTFSSLYFLTVMSADRYLVVLATAESRRVAGRTYSAARAVSLAVWGIVTLVVLPFAVFARLDDEQGRRQCVLVFPQPEAFWWRASRLYTLVLGFAIPVSTICVLYTTLLCRLHAMRLDSHAKALERAKKRVTFLVVAILAVCLLCWTPYHLSTVVALTTDLPQTPLVIAISYFITSLSYANSCLNPFLYAFLDASFRRNLRQLITCRAAA

SEQ ID NO: 5569 - protein, 725 aa, Homo sapiens
MEPGDAARPGSGRATGAPPPRLLLLPLLLGWGLRVAAAASASSSGAAAEDSSAMEELATEKEAEESHRQDSVSLLTFILLLTLTILTIWLFKHRRVRFLHETGLAMIYGLIVGVILRYGTPATSGRDKSLSCTQEDRAFSTLLVNVSGKFFEYTLKGEISPGKINSVEQNDMLRKVTFDPEVFFNILLPPIIFHAGYSLKKRHFFRNLGSILAYAFLGTAVSCFIIGNLMYGVVKLMKIMGQLSDKFYYTDCLFFGAIISATDPVTVLAIFNELHADVDLYALLFGESVLNDAVAIVLSSSIVAYQPAGLNTHAFDAAAFFKSVGIFLGIFSGSFTMGAVTGVNANVTKFTKLHCFPLLETALFFLMSWSTFLLAEACGFTGVVAVLFCGITQAHYTYNNLSVESRSRTKQLFEVLHFLAENFIFSYMGLALFTFQKHVFSPIFIIGAFVAIFLGRAAHIYPLSFFLNLGRRHKIGWNFQHMMMFSGLRGAMAFALAIRDTASYARQMMFTTTLLIVFFTVWIIGGGTTPMLSWLNIRVGVEEPSEEDQNEHHWQYFRVGVDPDQDPPPNNDSFQVLQGDGPDSARGNRTKQESAWIFRLWYSFDHNYLKPILTHSGPPLTTTLPAWCGLLARCLTSPQVYDNQEPLREEDSDFILTEGDLTLTYGDSTVTANGSSSSHTASTSLEGSRRTKSSSEEVLERDLGMGDQKVSSRGTRLVFPLEDNA

SEQ ID NO: 5570 - protein, 746 aa, Homo sapiens
MLRNSTFKNMQRRHTTLREKGRRQAIRGPAYMFNEKGTSLTPEEERFLDSAEYGNIPVVRKMLEESKTLNFNCVDYMGQNALQLAVGNEHLEVTELLLKKENLARVGDALLLAISKGYVRIVEAILNHPAFAQGQRLTLSPLEQELRDDDFYAYDEDGTRFSHDITPIILAAHCQEYEIVHILLLKGARIERPHDYFCKCNECTEKQRKDSFSHSRSRMNAYKGLASAAYLSLSSEDPVLTALELSNELARLANIETEFKLGRTLRSPFMKFVAHAVSFTIFLGLLVVNASDRFEGVKTLPNETFTDYPKQIFRVKTTQFSWTEMLIMKWVLGMIWSECKEIWEEGPREYVLHLWNLLDFGMLSIFVASFTARFMAFLKATEAQLYVDQHVQDDTLHNVSLPPEVAYFTYARDKWWPSDPQIISEGLYAIAVVLSFSRIAYILPANESFGPLQISLGRTVKDIFKFMVIFIMVFVAFMIGMFNLYSYYRGAKYNPAFTTVEESFKTLFWSIFGLSEVISVVLKYDHKFIENIGYVLYGVYNVTMVVVLLNMLIAMINNSYQEIEEDADVEWKFARAKLWLSYFDEGRTLPAPFNLVPSPKSFYYLIMRIKMCLIKLCKSKAKSCENDLEMGMLNSKFKKTRYQAGMRNSENLTANNTLSKPTRYQKIMKRLIKRYVLKAQVDRENDEVNEGELKEIKQDISSLRYELLEEKSQATGELADLIQQLSEKFGKNLNKDHLRVNKGKDI

SEQ ID NO: 5571 - protein, 492 aa, Homo sapiens
MALNSGSPPAIGPYYENHGYQPENPYPAQPTVVPTVYEVHPAQYYPSPVPQYAPRVLTQASNPVVCTQPKSPSGTVCTSKTKKALCITLTLGTFLVGAALAAGLLWKFMGSKCSNSGIECDSSGTCINPSNWCDGVSHCPGGEDENRCVRLYGPNFILQVYSSQRKSWHPVCQDDWNENYGRAACRDMGYKNNFYSSQGIVDDSGSTSFMKLNTSAGNVDIYKKLYHSDACSSKAVVSLRCIACGVNLNSSRQSRIVGGESALPGAWPWQVSLHVQNVHVCGGSIITPEWIVTAAHCVEKPLNNPWHWTAFAGILRQSFMFYGAGYQVEKVISHPNYDSKTKNNDIALMKLQKPLTFNDLVKPVCLPNPGMMLQPEQLCWISGWGATEEKGKTSEVLNAAKVLLIETQRCNSRYVYDNLITPAMICAGFLQGNVDSCQGDSGGPLVTSKNNIWWLIGDTSWGSGCAKAYRPGVYGNVMVFTDWIYRQMRADG

SEQ ID NO: 5572 - protein, 506 aa, Homo sapiens
MSVLSPGDLKPKRGSPHRGSLDRTDASTDLAMRSWPSELGSRTCSTSATTTAPSNSTPIARHPGRTKGYNSDDNLCEPSLEFEVPNHRQYVSRPSSLESSRNTSSNSSPLNLKGSSEQLHGRSESFSSEDLIPSRDLATLPREASTPGRNALGRHEYPLPRNGPLPQEGAQKRGTAPPYVGVRPCSASPSSEMVTLEEFLEESNRSSPTHDTPSCRDDLLSDYFRKASDPPAIGGQPGPPAKKEGAKMPTNFVAPTVKMAAPTSEGRPLKPGQYVKPNFRLTEAEAPPSVAPRQAQPPQSLSLGRPRQAPEALGGRETGSHTLQSPAPPSSHSLARERTPLVGKAGSSCQGPGPRSRPLDTRRFSLAPPKEERLAPLHQSATAPAIATAGAGAAAAGSGSNSQLLHFSPAAAPAARTKPKAPPRSGEVATITPVRAGLSLSEGDGVPGQGCSEGLPAKSPGRSPDLAPHLGRALEDCSRGSVSKSSPASPEPGGDPQTVWYEYGCV

SEQ ID NO: 5573 - protein, 329 aa, Homo sapiens
MTLVSFFSFLSKPLIMLLSNSSWRLSQPSFLLVGIPGLEESQHWIALPLGILYLLALVGNVTILFIIWMDPSLHQSMYLFLSMLAAIDLVLASSTAPKALAVLLVHAHEIGYIVCLIQMFFIHAFSSMESGVLVAMALDRYVAICHPLHHSTILHPGVIGRIGMVVLVRGLLLLIPFPILLGTLIFCQATIIGHAYCEHMAVVKLACSETTVNRAYGLTMALLVIGLDVLAIGVSYAHILQAVLKVPGSEARLKAFSTCGSHICVILVFYVPGIFSFLTHRFGHHVPHHVHVLLATRYLLMPPALNPLVYGVKTQQIRQRVLRVFTQKD

SEQ ID NO: 5574 - protein, 292 aa, Homo sapiens
MEEEEYEQIPQENPPEELSQDPVLELSGGLREKEQKTPRRLRLILMGKTGSGKSATGNSILGRDVFESKLSTRPVTKTSQRRSREWAGKELEVIDTPNILSPQVSPEVADAICQAIVLSAPGPHAVLLVTQLGRFTDEDQQVVRRLQEVFGVGVLGHTILVFTRKEDLAGGSLEDYVRETNNQALAWLDVTLARRHCGFNNRAQGEEQEAQLRELMEKVEAIMWENEGDYYSNKAYQYTQQNFRLKELQERQVSQGQGSEDVPGEESWLEGLSQIQKESEEAHRCLLGKADL

SEQ ID NO: 5575 - protein, 241 aa, Homo sapiens
MNRCWALFLSLCCYLRLVSAEGDPIPEELYEMLSDHSIRSFDDLQRLLHGDPGEEDGAELDLNMTRSHSGGELESLARGRRSLGSLTIAEPAMIAECKTRTEVFEISRRLIDRTNANFLVWPPCVEVQRCSGCCNNRNVQCRPTQVQLRPVQVRKIEIVRKKPIFKKATVTLEDHLACKCETVAAARPVTRSPGGSQEQRAKTPQTRVTIRTVRVRRPPKGKHRKFKHTHDKTALKETLGA

SEQ ID NO: 5576 - protein, 327 aa, Homo sapiens
MEWRNHSGRVSEFVLLGFPAPAPLQVLLFALLLLAYVLVLTENTLIIMAIRNHSTLHKPMYFFLANMSFLEIWYVTVTIPKMLAGFVGSKQDHGQLISFEGCMTQLYFFLGLGCTECVLLAVMAYDRYMAICYPLHYPVIVSGRLCVQMAAGSWAGGFGISMVKVFLISGLSYCGPNIINHFFCDVSPLLNLSCTDMSTAELTDFILAIFILLGPLSVTGASYVAITGAVMHIPSAAGRYKAFSTCASHLTVVIIFYAASIFIYARPKALSAFDTNKLVSVLYAVIVPLLNPIIYCLRNQEVKRALCCTLHLYQHQDPDPKKASRNV

SEQ ID NO: 5577 - protein, 1165 aa, Homo sapiens
MICQKFCVVLLHWEFIYVITAFNLSYPITPWRFKLSCMPPNSTYDYFLLPAGLSKNTSNSNGHYETAVEPKFNSSGTHFSNLSKTTFHCCFRSEQDRNCSLCADNIEGKTFVSTVNSLVFQQIDANWNIQCWLKGDLKLFICYVESLFKNLFRNYNYKVHLLYVLPEVLEDSPLVPQKGSFQMVHCNCSVHECCECLVPVPTAKLNDTLLMCLKITSGGVIFQSPLMSVQPINMVKPDPPLGLHMEITDDGNLKISWSSPPLVPFPLQYQVKYSENSTTVIREADKIVSATSLLVDSILPGSSYEVQVRGKRLDGPGIWSDWSTPRVFTTQDVIYFPPKILTSVGSNVSFHCIYKKENKIVPSKEIVWWMNLAEKIPQSQYDVVSDHVSKVTFFNLNETKPRGKFTYDAVYCCNEHECHHRYAELYVIDVNINISCETDGYLTKMTCRWSTSTIQSLAESTLQLRYHRSSLYCSDIPSIHPISEPKDCYLQSDGFYECIFQPIFLLSGYTMWIRINHSLGSLDSPPTCVLPDSVVKPLPPSSVKAEITINIGLLKISWEKPVFPENNLQFQIRYGLSGKEVQWKMYEVYDAKSKSVSLPVPDLCAVYAVQVRCKRLDGLGYWSNWSNPAYTVVMDIKVPMRGPEFWRIINGDTMKKEKNVTLLWKPLMKNDSLCSVQRYVINHHTSCNGTWSEDVGNHTKFTFLWTEQAHTVTVLAINSIGASVANFNLTFSWPMSKVNIVQSLSAYPLNSSCVIVSWILSPSDYKLMYFIIEWKNLNEDGEIKWLRISSSVKKYYIHDHFIPIEKYQFSLYPIFMEGVGKPKIINSFTQDDIEKHQSDAGLYVIVPVIISSSILLLGTLLISHQRMKKLFWEDVPNPKNCSWAQGLNFQKPETFEHLFIKHTASVTCGPLLLEPETISEDISVDTSWKNKDEMMPTTVVSLLSTTDLEKGSVCISDQFNSVNFSEAEGTEVTYEDESQRQPFVKYATLISNSKPSETGEEQGLINSSVTKCFSSKNSPLKDSFSNSSWEIEAQAFFILSDQHPNIISPHLTFSEGLDELLKLEGNFPEENNDKKSIYYLGVTSIKKRESGVLLTDKSRVSCPFPAPCLFTDIRVLQDSCSHFVENNINLGTSSKKTFASYMPQFQTCSTQTHKIMENKMCDLTV

SEQ ID NO: 5578 - protein, 788 aa, Homo sapiens
MGCAPSIHVSQSGVIYCRDSDESSSPRQTTSVSQGPAAPLPGLFVQTDAADAIPPSRASGPPSVARVRRARTELGSGSSAGSAAPAATTSRGRRRHCCSSAEAETQTCYTSVKQVSSAEVRIGPMRLTQDPIQVLLIFAKEDSQSDGFWWACDRAGYRCNIARTPESALECFLDKHHEIIVIDHRQTQNFDAEAVCRSIRATNPSEHTVILAVVSRVSDDHEEASVLPLLHAGFNRRFMENSSIIACYNELIQIEHGEVRSQFKLRACNSVFTALDHCHEAIEITSDDHVIQIHKIHRDSGDNSQTEPHSFRYKNRRKESIDVKSISSRGSDAPSLQNRRYPSMARIHSMTIEAPITKVINIINAAQENSPVTVAEALDRVLEILRTTELYSPQLGTKDEDPHTSDLVGGLMTDGLRRLSGNEYVFTKNVHQSHSHLAMPITINDVPPCISQLLDNEESWDFNIFELEAITHKRPLVYLGLKVFSRFGVCEFLNCSETTLRAWFQVIEANYHSSNAYHNSTHAADVLHATAFFLGKERVKGSLDQLDEVAALIAATVHDVDHPGRTNSFLCNAGSELAVLYNDTAVLESHHTALAFQLTVKDTKCNIFKNIDRNHYRTLRQAIIDMVLATEMTKHFEHVNKFVNSINKPMAAEIEGSDCECNPAGKNFPENQILIKRMMIKCADVANPCRPLDLCIEWAGRISEEYFAQTDEEKRQGLPVVMPVFDRNTCSIPKSQISFIDYFITDMFDAWDAFAHLPALMQHLADNYKHWKTLDDLKCKSLRLPSDS

SEQ ID NO: 5579 - protein, 1458 aa, Homo sapiens
MGLRPGIFLLELLLLLGQGTPQIHTSPRKSTLEGQLWPETLKNSPFPCNPNKLGVNMPSKSVHSLKPSDIKFVAAIGNLEIPPDPGTGDLEKQDWTERPQQVCMGVMTVLSDIIRYFSPSVPMPVCHTGKRVIPHDGAEDLWIQAQELVRNMKENLQLDFQFDWKLINVFFSNASQCYLCPSAQQNGLAAGGVDELMGVLDYLQQEVPRAFVNLVDLSEVAEVSRQYHGTWLSPAPEPCNCSEETTRLAKVVMQWSYQEAWNSLLASSRYSEQESFTVVFQPFFYETTPSLHSEDPRLQDSTTLAWHLWNRMMEPAGEKDEPLSVKHGRPMKCPSQESPYLFSYRNSNYLTRLQKPQDKLEVREGAEIRCPDKDPSDTVPTSVHRLKPADINVIGALGDSLTAGNGAGSTPGNVLDVLTQYRGLSWSVGGDENIGTVTTLANILREFNPSLKGFSVGTGKETSPNAFLNQAVAGGRAEDLPVQARRLVDLMKNDTRIHFQEDWKIITLFIGGNDLCDFCNDLVHYSPQNFTDNIGKALDILHAEVPRAFVNLVTVLEIVNLRELYQEKKVYCPRMILRSLCPCVLKFDDNSTELATLIEFNKKFQEKTHQLIESGRYDTREDFTVVVQPFFENVDMPKTSEGLPDNSFFAPDCFHFSSKSHSRAASALWNNMLEPVGQKTTRHKFENKINITCPNQVQPFLRTYKNSMQGHGTWLPCRDRAPSALHPTSVHALRPADIQVVAALGDSLTAGNGIGSKPDDLPDVTTQYRGLSYSAGGDGSLENVTTLPNILREFNRNLTGYAVGTGDANDTNAFLNQAVPGAKAEDLMSQVQTLMQKMKDDHRVNFHEDWKVITVLIGGSDLCDYCTDSNLYSAANFVHHLRNALDVLHREVPRVLVNLVDFLNPTIMRQVFLGNPDKCPVQQASVLCNCVLTLRENSQELARLEAFSRAYRSSMRELVGSGRYDTQEDFSVVLQPFFQNIQLPVLADGLPDTSFFAPDCIHPNQKFHSQLARALWTNMLEPLGSKTETLDLRAEMPITCPTQNEPFLRTPRNSNYTYPIKPAIENWGSDFLCTEWKASNSVPTSVHQLRPADIKVVAALGDSLTTAVGARPNNSSDLPTSWRGLSWSIGGDGNLETHTTLPNILKKFNPYLLGFSTSTWEGTAGLNVAAEGARARDMPAQAWDLVERMKNSPDINLEKDWKLVTLFIGVNDLCHYCENPEAHLATEYVQHIQQALDILSEELPRAFVNVVEVMELASLYQGQGGKCAMLAAQNNCTCLRHSQSSLEKQELKKVNWNLQHGISSFSYWHQYTQREDFAVVVQPFFQNTLTPLNERGDTDLTFFSEDCFHFSDRGHAEMAIALWNNMLEPVGRKTTSNNFTHSRAKLKCPSPESPYLYTLRNSRLLPDQAEEAPEVLYWAVPVAAGVGLVVGIIGTVVWRCRRGGRREDPPMSLRTVAL

SEQ ID NO: 5580 - protein, 619 aa, Homo sapiens
MFVPRSLKIKRNANDDGKSCVAKIIKPDPEDLQLDKSRDVPVDAVATEAATIDRHISESCPFPSPGGQLAEVHSVSPEQGAKDSHPSEEPVKSFSKTQRWAEPGEPICVVCGRYGEYICDKTDEDVCSLECKAKHLLQVKEKEEKSKLSNPQKADSEPESPLNASYVYKEHPFILNLQEDQIENLKQQLGILVQGQEVTRPIIDFEHCSLPEVLNHNLKKSGYEVPTPIQMQMIPVGLLGRDILASADTGSGKTAAFLLPVIMRALFESKTPSALILTPTRELAIQIERQAKELMSGLPRMKTVLLVGGLPLPPQLYRLQQHVKVIIATPGRLLDIIKQSSVELCGVKIVVVDEADTMLKMGFQQQVLDILENIPNDCQTILVSATIPTSIEQLASQLLHNPVRIITGEKNLPCANVRQIILWVEDPAKKKKLFEILNDKKLFKPPVLVFVDCKLGADLLSEAVQKITGLKSISIHSEKSQIERKNILKGLLEGDYEVVVSTGVLGRGLDLISVRLVVNFDMPSSMDEYVHQIGRVGRLGQNGTAITFINNNSKRLFWDIAKRVKPTGSILPPQLLNSPYLHDQKRKEQQKDKQTQNDLVTGANLMDIIRKHDKSNSQK

SEQ ID NO: 5581 - protein, 617 aa, Homo sapiens
MGSYLSVPAYFTSRDLFRCSECQDSLTNWYYEKDGKLYCPKDYWGKFGEFCHGCSLLMTGPFMVAGEFKYHPECFACMSCKVIIEDGDAYALVQHATLYCGKCHNEVVLAPMFERLSTESVQEQLPYSVTLISMPATTEGRRGFSVSVESACSNYATTVQVKEVNRMHISPNNRNAIHPGDRILEINGTPVRTLRVEEVEDAISQTSQTLQLLIEHDPVSQRLDQLRLEARLAPHMQNAGHPHALSTLDTKENLEGTLRRRSLRRSNSISKSPGPSSPKEPLLFSRDISRSESLRCSSSYSQQIFRPCDLIHGEVLGKGFFGQAIKVTHKATGKVMVMKELIRCDEETQKTFLTEVKVMRSLDHPNVLKFIGVLYKDKKLNLLTEYIEGGTLKDFLRSMDPFPWQQKVRFAKGIASGMAYLHSMCIIHRDLNSHNCLIKLDKTVVVADFGLSRLIVEERKRAPMEKATTKKRTLRKNDRKKRYTVVGNPYWMAPEMLNGKSYDETVDIFSFGIVLCEIIGQVYADPDCLPRTLDFGLNVKLFWEKFVPTDCPPAFFPLAAICCRLEPESRPAFSKLEDSFEALSLYLGELGIPLPAELEELDHTVSMQYGLTRDSPP

SEQ ID NO: 5582 - protein, 416 aa, Homo sapiens
MYRHGISSQRSWPLWTTIFIFLGVAAILGVTIGLLVHFLAVEKTYYYQGDFHISGVTYNDNCENAASQASTNLSKDIETKMLNAFQNSSIYKEYVKSEVIKLLPNANGSNVQLQLKFKFPPAEGVSMRTKIKAKLHQMLKNNMASWNAVPASIKLMEISKAASEMLTNNCCGRQVANSIITGNKIVNGKSSLEGAWPWQASMQWKGRHYCGASLISSRWLLSAAHCFAKKNNSKDWTVNFGIVVNKPYMTRKVQNIIFHENYSSPGLHDDIALVQLAEEVSFTEYIRKICLPEAKMKLSENDNVVVTGWGTLYMNGSFPVILQEDFLKIIDNKICNASYAYSGFVTDTMLCAGFMSGEADACQNDSGGPLAYPDSRNIWHLVGIVSWGDGCGKKNKPGVYTRVTSYRNWITSKTGL

SEQ ID NO: 5583 - protein, 409 aa, Homo sapiens
MTQKGSMKPVKKKKTEEPELEPLCCCEYIDRNGEKNHVATCLCDCQDLDEGCDRWITCKSLQPETCERIMDTISDRLRIPWLRGAKKVNISIIPPLVLLPVFLHVASWHFLLGVVVLTSLPVLALWYYYLTHRRKEQTLFFLSLGLFSLGYMYYVFLQEVVPKGRVGPVQLAVLTCGLFLILLALHRAKKNPGYLSNPASGDRSLSSSQLECLSRKGQEKTKGFPGADMSGSLNNRTTKDDPKGSSKMPAGSPTKAKEDWCAKCQLVRPARAWHCRICGICVRRMDHHCVWINSCVGESNHQAFILALLIFLLTSVYGITLTLDTICRDRSVFTALFYCPGVYANYSSALSFTCVWYSVIITAGMAYIFLIQLINISYNVTEREVQQALRQKTGRRLLCGLIVDTGLLG

SEQ ID NO: 5584 - protein, 598 aa, Homo sapiens
MTFQASHRSAWGKSRKKNWQYEGPTQKLFLKRNNVSAPDGPSDPSISVSSEQSGAQQPPALQVERIVDKRKNKKGKTEYLVRWKGYDSEDDTWEPEQHLVNCEEYIHDFNRRHTEKQKESTLTRTNRTSPNNARKQISRSTNSNFSKTSPKALVIGKDHESKNSQLFAASQKFRKNTAPSLSSRKNMDLAKSGIKILVPKSPVKSRTAVDGFQSESPEKLDPVEQGQEDTVAPEVAAEKPVGALLGPGAERARMGSRPRIHPLVPQVPGPVTAAMATGLAVNGKGTSPFMDALTANGTTNIQTSVTGVTASKRKFIDDRRDQPFDKRLRFSVRQTESAYRYRDIVVRKQDGFTHILLSTKSSENNSLNPEVMREVQSALSTAAADDSKLVLLSAVGSVFCCGLDFIYFIRRLTDDRKRESTKMAEAIRNFVNTFIQFKKPIIVAVNGPAIGLGASILPLCDVVWANEKAWFQTPYTTFGQSPDGCSTVMFPKIMGGASANEMLLSGRKLTAQEACGKGLVSQVFWPGTFTQEVMVRIKELASCNPVVLEESKALVRCNMKMELEQANERECEVLKKIWGSAQGMDSMLKYLQRKIDEF

SEQ ID NO: 5585 - protein, 618 aa, Homo sapiens
MASTDYSTYSQAAAQQGYSAYTAQPTQGYAQTTQAYGQQSYGTYGQPTDVSYTQAQTTATYGQTAYATSYGQPPTGYTTPTAPQAYSQPVQGYGTGAYDTTTATVTTTQASYAAQSAYGTQPAYPAYGQQPAATAPTRPQDGNKPTETSQPQSSTGGYNQPSLGYGQSNYSYPQVPGSYPMQPVTAPPSYPPTSYSSTQPTSYDQSSYSQQNTYGQPSSYGQQSSYGQQSSYGQQPPTSYPPQTGSYSQAPSQYSQQSSSYGQQSSFRQDHPSSMGVYGQESGGFSGPGENRSMSGPDNRGRGRGGFDRGGMSRDPDEDSDNSAIYVQGLNDSVTLDDLADFFKQCGVVKMNKRTGQPMIHIYLDKETGKPKGDATVSYEDPPTAKAAVEWFDGKDFQGSKLKVSLARKKPPMNSMRGGLPPREGRGMPPPLRGGPGGPGGPGGPMGRMGGRGGDRGGFPPRGPRGSRGNPSGGGNVQHRAGDWQCPNPGCGNQNFAWRTECNQCKAPKPEGFLPPPFPPPGGDRGRGGPGGMRGGRGGLMDRGGPGGMFRGGRGGDRGGFRGGRGMDRGGFGGGRRGGPGGPPGPLMEQMGGRRGGRGGPGKMDKGEHRQERRDRPY

SEQ ID NO: 5586 - protein, 824 aa, Homo sapiens
MADRAEMFSLSTFHSLSPPGCRPPQDISLEEFDDEDLSEITDDCGLGLSYDSDHCEKDSLSLGRSEQPHPICSFQDDFQEFEMIDDNEEEDDEDEEEEEEEEEGDGEGQEGGDPGSEAPAPGPLIPSPSVEEPHKHRPTTLRLTTLGAQDSLNNNGGFDLVRPASWQETALCSPAPEALRELPGPLPATDTGPGGAQSPVRPGCDCEGNRPAEPPAPGGTSPSSDPGIEADLRSRSSGGRGGRRSSQELSSPGSDSEDAGGARLGRMISSISETELELSSDGGSSSSGRSSHLTNSIEEASSPASEPEPPREPPRRPAFLPVGPDDTNSEYESGSESEPDLSEDADSPWLLSNLVSRMISEGSSPIRCPGQCLSPAPRPPGEPVSPAGGAAQDSQDPEAAAGPGGVELVDMETLCAPPPPAPAAPRPGPAQPGPCLFLSNPTRDTITPLWAAPGRAARPGRACSAACSEEEDEEDDEEEEDAEDSAGSPGGRGTGPSAPRDASLVYDAVKYTLVVDEHTQLELVSLRRCAGLGHDSEEDSGGEASEEEAGAALLGGGQVSGDTSPDSPDLTFSKKFLNVFVNSTSRSSSTESFGLFSCLVNGEEREQTHRAVFRFIPRHPDELELDVDDPVLVEAEEDDFWFRGFNMRTGERGVFPAFYAHAVPGPAKDLLGSKRSPCWVERFDVQFLGSVEVPCHQGNGILCAAMQKIATARKLTVHLRPPASCDLEISLRGVKLSLSGGGPEFQRCSHFFQMKNISFCGCHPRNSCYFGFITKHPLLSRFACHVFVSQESMRPVAQSVGRAFLEYYQEHLAYACPTEDIYLE

SEQ ID NO: 5587 - protein, 782 aa, Homo sapiens
MARARAGALLALWVLGAAAHPQCLDFRPPFRPTQPLRLCAQYSDFGCCDEGRDAELTRRFWALASRVDAAEWAACAGYARDLLCQECSPYAAHLYDAEDPFTPLRTVPGLCQDYCLDMWHKCRGLFRHLSTDQELWALEGNLARFCRYLSLDDTDYCFPYLLVNKNLNSNLGHVVADAKGCLQLCLEEVANGLRNPVAMVHARDGTHRFFVAEQVGLVWAYLPDRSRLGKPFLNISRVVLTSPWEGDERGFLGIAFHPSFQHNRRLYVYYSVGIRSSEWIRISEFRVSEDDENAVDHSSERIILEVKEPASNHNGGQLLFGDDGYLYIFTGDGGMAGDPFGTFGNAQNKSALLGKVLRIDVDRKERGLPYGIPPDNPFVGDPAAQPEVYALGVRNMWRCSFDRGDPSSGTGRGRLFCGDVGQNKFEEVDVVERGGNYGWRAREGFECYDRSLCANTSLNDLLPIFAYPHTVGKSVTGGYVYRGCEYPNLNGLYIFGDFMSGRLMSLQENPGTGQWQYSEICMGHGQTCEFPGLINNYYPYIISFGEDEAGELYFMSTGEPSATAPRGVVYKIIDASRRAPPGKCQIQPAQVKIRSRLIPFVPKEKFIPKTRSTPRPTARAPTRAPRRGRPTAAPPAPTPRPARPTQQPGSRRGGGRRRGRLNSASRAFRDGEVRLVRPAGLSSGSGRVEVFVGGRWGTVCDDSWNISGAAVVCRQLGFAYAVRAVKRAEFGQGGSLPILLDDVRCAGWERNLLECQHNGVGTHNCEHDEDAGVVCSHQNPDL

SEQ ID NO: 5588 - protein, 456 aa, Homo sapiens
MARWPAPPPPPPPPPPLAAPPPPGASAKGPPARKLLFMCTLSLSVTYLCYSLLGGSGSLQFPLALQESPGAAAEPPPSPPPPSLLPTPVRLGAPSQPPAPPPLDNASHGEPPEPPEQPAAPGTDGWGLPSGGGGAQDAWLRTPLAPSEMITAQSALPEREAQESSTTDEDLAGRRAANGSSERGGAVSTPDYGEKKLPQALIIGVKKGGTRALLEAIRVHPDVRAVGVEPHFFDRNYEKGLEWYRNVMPKTLDGQITMEKTPSYFVTNEAPKRIHSMAKDIKLIVVVRNPVTRAISDYTQTLSKKPEIPTFEVLAFKNRTLGLIDASWSAIRIGIYALHLENWLQYFPLSQILFVSGERLIVDPAGEMAKVQDFLGLKRVVTEKHFYFNKTKGFPCLKKPEDSSAPRCLGKSKGRTHPRIDPDVIHRLRKFYKPFNLMFYQMTGQDFQWEQEEGDK

SEQ ID NO: 5589 - protein, 1040 aa, Homo sapiens
MGTATRRKPHLLLVAAVALVSSSAWSSALGSQTTFGPVFEDQPLSVLFPEESTEEQVLLACRARASPPATYRWKMNGTEMKLEPGSRHQLVGGNLVIMNPTKAQDAGVYQCLASNPVGTVVSREAILRFGFLQEFSKEERDPVKAHEGWGVMLPCNPPAHYPGLSYRWLLNEFPNFIPTDGRHFVSQTTGNLYIARTNASDLGNYSCLATSHMDFSTKSVFSKFAQLNLAAEDTRLFAPSIKARFPAETYALVGQQVTLECFAFGNPVPRIKWRKVDGSLSPQWTTAEPTLQIPSVSFEDEGTYECEAENSKGRDTVQGRIIVQAQPEWLKVISDTEADIGSNLRWGCAAAGKPRPTVRWLRNGEPLASQNRVEVLAGDLRFSKLSLEDSGMYQCVAENKHGTIYASAELAVQALAPDFRLNPVRRLIPAARGGEILIPCQPRAAPKAVVLWSKGTEILVNSSRVTVTPDGTLIIRNISRSDEGKYTCFAENFMGKANSTGILSVRDATKITLAPSSADINLGDNLTLQCHASHDPTMDLTFTWTLDDFPIDFDKPGGHYRRTNVKETIGDLTILNAQLRHGGKYTCMAQTVVDSASKEATVLVRGPPGPPGGVVVRDIGDTTIQLSWSRGFDNHSPIAKYTLQARTPPAGKWKQVRTNPANIEGNAETAQVLGLTPWMDYEFRVIASNILGTGEPSGPSSKIRTREAAPSVAPSGLSGGGGAPGELIVNWTPMSREYQNGDGFGYLLSFRRQGSTHWQTARVPGADAQYFVYSNESVRPYTPFEVKIRSYNRRGDGPESLTALVYSAEEEPRVAPTKVWAKGVSSSEMNVTWEPVQQDMNGILLGYEIRYWKAGDKEAAADRVRTAGLDTSARVSGLHPNTKYHVTVRAYNRAGTGPASPSANATTMKPPPRRPPGNISWTFSSSSLSIKWDPVVPFRNESAVTGYKMLYQNDLHLTPTLHLTGKNWIEIPVPEDIGHALVQIRTTGPGGDGIPAEVHIVRNGGTSMMVENMAVRPAPHPGTVISHSVAMLILIGSLEL

SEQ ID NO: 5590 - protein, 1627 aa, Homo sapiens
MRLWSWVLHLGLLSAALGCGLAERPRRARRDPRAGRPPRPAAGPATCATRAARGRRASPPPPPPPGGAWEAVRVPRRRQQREARGATEEPSPPSRALYFSGRGEQLRLRADLELPRDAFTLQVWLRAEGGQRSPAVITGLYDKCSYISRDRGWVVGIHTISDQDNKDPRYFFSLKTDRARQVTTINAHRSYLPGQWVYLAATYDGQFMKLYVNGAQVATSGEQVGGIFSPLTQKCKVLMLGGSALNHNYRGYIEHFSLWKVARTQREILSDMETHGAHTALPQLLLQENWDNVKHAWSPMKDGSSPKVEFSNAHGFLLDTSLEPPLCGQTLCDNTEVIASYNQLSSFRQPKVVRYRVVNLYEDDHKNPTVTREQVDFQHHQLAEAFKQYNISWELDVLEVSNSSLRRRLILANCDISKIGDENCDPECNHTLTGHDGGDCRHLRHPAFVKKQHNGVCDMDCNYERFNFDGGECCDPEITNVTQTCFDPDSPHRAYLDVNELKNILKLDGSTHLNIFFAKSSEEELAGVATWPWDKEALMHLGGIVLNPSFYGMPGHTHTMIHEIGHSLGLYHVFRGISEIQSCSDPCMETEPSFETGDLCNDTNPAPKHKSCGDPGPGNDTCGFHSFFNTPYNNFMSYADDDCTDSFTPNQVARMHCYLDLVYQGWQPSRKPAPVALAPQVLGHTTDSVTLEWFPPIDGHFFERELGSACHLCLEGRILVQYASNASSPMPCSPSGHWSPREAEGHPDVEQPCKSSVRTWSPNSAVNPHTVPPACPEPQGCYLELEFLYPLVPESLTIWVTFVSTDWDSSGAVNDIKLLAVSGKNISLGPQNVFCDVPLTIRLWDVGEEVYGIQIYTLDEHLEIDAAMLTSTADTPLCLQCKPLKYKVVRDPPLQMDVASILHLNRKFVDMDLNLGSVYQYWVITISGTEESEPSPAVTYIHGSGYCGDGIIQKDQGEQCDDMNKINGDGCSLFCRQEVSFNCIDEPSRCYFHDGDGVCEEFEQKTSIKDCGVYTPQGFLDQWASNASVSHQDQQCPGWVIIGQPAASQVCRTKVIDLSEGISQHAWYPCTISYPYSQLAQTTFWLRAYFSQPMVAAAVIVHLVTDGTYYGDQKQETISVQLLDTKDQSHDLGLHVLSCRNNPLIIPVVHDLSQPFYHSQAVRVSFSSPLVAISGVALRSFDNFDPVTLSSCQRGETYSPAEQSCVHFACEKTDCPELAVENASLNCSSSDRYHGAQCTVSCRTGYVLQIRRDDELIKSQTGPSVTVTCTEGKWNKQVACEPVDCSIPDHHQVYAASFSCPEGTTFGSQCSFQCRHPAQLKGNNSLLTCMEDGLWSFPEALCELMCLAPPPVPNADLQTARCRENKHKVGSFCKYKCKPGYHVPGSSRKSKKRAFKTQCTQDGSWQEGACVPVTCDPPPPKFHGLYQCTNGFQFNSECRIKCEDSDASQGLGSNVIHCRKDGTWNGSFHVCQEMQGQCSVPNELNSNLKLQCPDGYAIGSECATSCLDHNSESIILPMNVTVRDIPHWLNPTRVERVVCTAGLKWYPHPALIHCVKGCEPFMGDNYCDAINNRAFCNYDGGDCCTSTVKTKKVTPFPMSCDLQGDCACRDPQAQEHSRKDLRGYSHG

SEQ ID NO: 5591 - protein, 4523 aa, Homo sapiens
MAAQVAAREARDFREAPTLRLTSGAGLEAVGAVELEEEEENEEEAAARRARSFAQDARVRFLGGRLAMMLGFTEEKWSQYLESEDNRQVLGEFLESTSPACLVFSFAASGRLAASQEIPRDANHKLVFISKKITESIGVNDFSQVVLFGELPALSLGHVSAFLDEILVPVLSNKNNHKSWSCFTSQDMEYHIEVMKKKMYIFRGKMSRRTLLPIPTVAGKMDLDQNCSENKPPSNERIILHAIESVVIEWSHQIQEIIERDSVQRLLNGLHLSPQAELDFWMMRRENLSCIYDQLQAPVVLKMVKILTTKQSSYFPTLKDIFLAVENALLEAQDVELYLRPLRRHIQCLQETEFPQTRILIAPLFHTICLIWSHSKFYNTPARVIVLLQEFCNLFINQATAYLSPEDLLRGEIEESLEKVQVAVNILKTFKNSFFNYRKKLASYFMGRKLRPWDFQSHLVFCRFDKFLDRLIKIEDIFATTLEFEKLERLEFGGTKGAILNGQVHEMSEELMELCKLFKQSTYDPSDCTNMEFESDYVAFKSKTLEFDRRLGTIICEAFFNCNGLEAAFKLLTIFGNFLEKPVVMEIFSLHYSTLVHMFNTELDVCKQLYNEHMKQIECGHVVLNKNMPFTSGNMKWAQQVLQRLQMFWSNFASLRYLFLGNPDHALVYQKYVEMTTLLDQFESRIYNEWKSNVDEICEFNLNQPLVKFSAINGLLCVNFDPKLVAVLREVKYLLMLKKQDIPDSALAIFKKRNTILKYIGNLDLLVQGYNKLKQTLLEVEYPLIEDELRAIDEQLTAATTWLTWQDDCWGYIERVRAATSELEHRVERTQKNVKVIQQTMRGWARCVLPPRREHRREAAFTLEDKGDLFTKKYKLIQGDGCKIHNLVEENRKLFKANPSLDTWKIYVEFIDDIVVEGFFQAIMHDLDFFLKNTEKQLKPAPFFQAQMILLPPEIVFKPSLDREAGDGFYDLVEEMLCNSFRMSAQMNRIATHLEIKNYQNDMDNMLGLAEVRQEIMNRVVNVINKVLDFRNTLETHTYLWVDDRAEFMKHFLLYGHAVSSDEMDAHANEEIPEQPPTLEQFKEQIDIYEALYVQMSKFEDFRVFDSWFKVDMKPFKVSLLTIIKKWSWMFQEHLLRFVIDSLNELQEFIKETDSGLQRELNEGDHDGLVDIMVHLLAVRSRQRATDELFEPLKETITLLESYGQKMPEQVYIQLEELPERWETTKKIAATVRHEVSPLHNAEVTLIRKKCILFDAKQAEFRERFRHYAPLGFNAENPYTALDKANEELEALEEEMLQMQESTRLFEVALPEYKQMKQCRKEIKLLKGLWDVIIYVRRSIDNWTKTQWRQIHVEQMDVELRRFAKASSITEIWSLNKEVRVWDAYTGLEGTVKDMTASLRAITELQSPALRDRHWHQLMKAIGVKFLINEATTLADLLALRLHRVEDDVRRIVDKAVKELGTEKVITEISQTWATMKFSYEVHYRTGIPLLKSDEQLFETLEHNQVQLQTLLQSKYVEYFIEQVLSWQNKLNIADLVIFTWMEVQRTWSHLESIFVCSEDIRIQLVKDARRFDGVDAEFKELMFKTAKVENVLEATCRPNLYEKLKDLQSRLSLCEKALAEYLETKRIAFPRFYFVSSADLLDILSKGAQPKQVTCHLAKLFDSIADLQFEDNQDVSAHRAVGMYSKEKEYVPFQAECECVGHVETWLLQLEQTMQETVRHSITEAIVAYEEKPRELWIFDFPAQVALTSSQIWWTTDVGIAFSRLEEGYETALKDFHKKQISQLNTLITLLLGELPPGDRQKIMTICTIDVHARDVVAKLISQKKVVVSPQAFTWLSQLRHRWEDTQKHCFVNICDAQFQYFYEYLGNSPRLVITPLTDRCYITLTQSLHLTMSGAPAGPAGTGKTETTKDLGRALGMMVYVFNCSEQMDYKSIGNIYKGLVQTGAWGCFDEFNRISVEVLSVVAVQVKMIHDAIRNRKKRFVFLGEAITLKPSVGIFITMNPGYAGRTELPENLKALFRPCAMVAPDIELICEILLVAEGFVDARALARKFITLYTLCKELLSKQDHYDWGLRAIKSVLVVAGSLKRGDKNRPEDQVLMRALRDFNMPKIVTDDIPVFLGLVGDLFPALDVPRRRKLHFEQMVRQSTLELRLQPEESFILKVVQLEELLAVRHSVFVVGNAGTGKSKILRTLNRTYVNMKQKPVWNDLNPKAVTTDELFGFIHHATREWKDGKIVYSYFIGLFSSILREQANLKHDGPKWIVLDGDIDPMWIESLNTVMDDNKVLTLASNERIALTPFMRLLFEIHHLRSATPATVSRAGILYVNPQDLGWNPYVASWIDRRRHQSEKANLTILFDKYVPACLDKLRTSFKTITSIPESSLVQTLCVLLECLLTPENVPSDSPKEVYEVYFVFACIWAFGGTLLQDQISDYQADFSRWWQKEMKAVKFPSQGTIFDYYVDHKTKKLLPWADKIAQFTMDPDVPLQTVLVHTTETARLRYFMELLLEKGKPLMLVGNAGVGKTVFVGDTLASLSEDYIVSRVPFNYYTTSTALQKILEKPLEKKAGHNYGPGGNKKLIYFIDDMNMPEVDLYGTVQPHTLIRQHIDYGHWYDRQKVMLKEIHNCQYVACMNPMVGSFTINPRLQRHFTVFAFNFPSLDALNTIYGQIFSFHFQQQAFAPSILRSGPTLIQATIAFHQTMMCNFLPTAIKFHYIFNLRDLSNVFQGILFASPECLKGPLDLIHLWLHESARVYGDKLIDKKDCDLFQRRMLETAYKYFEGIDSHMLLQQPLIYCHFADRGKDPHYMPVKDWEVLKTILTETLDNYNELNAAMHLVLFEDAMQHVCRISRILRTPQGCALLVGVGGSGKQSLSRLAAYLRGLEVFQITLTEGYGIQELRVDLANLYIRTGAKNMPTVFLLTDAQVLDESFLVLINDLLASGEIPDLFSDEDVDKIISGIHNEVHALGMVDSRENCWKFFMARVRLQLKIILCFSPVGRTLRVRARKFPAIVNCTAIDWFHAWPQEALVSVSRRFIEETKGIEPVHKDSISLFMAHVHTTVNEMSTRYYQNERRHNYTTPKSFLEQISLFKNLLKKKQNEVSEKKERLVNGIQKLKTTASQVGDLKARLASQEAELQLRNHDAEALITKIGLQTEKVSREKTIADAEERKVTAIQTEVFQKQRECEADLLKAEPALVAATAALNTLNRVNLSELKAFPNPPIAVTNVTAAVMVLLAPRGRVPKDRSWKAAKVFMGKVDDFLQALINYDKEHIPENCLKVVNEHYLKDPEFNPNLIRTKSFAAAGLCAWVINIIKFYEVYCDVEPKRQALAQANLELAAATEKLEAIRKKLVDLDRNLSRLTASFEKATAEKVRCQEEVNQTNKTIKLANRLVKELEAKKIRWGQSIKSFEAQEKTLCGDVLLTAAFVSYVGPFTRQYRQELVHCKWVPFLQQKVSIPLTEGLDLISMLTDDATIAAWNNEGLPSDRMSTENAAILTHCERWPLVIDPQQQGIKWIKNKYGMDLKVTHLGQKGFLNAIETALAFGDVILIENLEETIDPVLDPLLGRNTIKKGKYIRIGDKECEFNKNFRLILHTKLANPHYKPELQAQTTLLNFTVTEDGLEAQLLAEVVSIERPDLEKLKLVLTKHQNDFKIELKYLEDDLLLRLSAAEGSFLDDTKLVERLEATKTTVAEIEHKVIEAKENERKINEARECYRPVAARASLLYFVINDLQKINPLYQFSLKAFNVLFHRAIEQADKVEDMQGRISILMESITHAVFLYTSQALFEKDKLTFLSQMAFQILLRKKEIDPLELDFLLRFTVEHTHLSPVDFLTSQSWSAIKAIAVMEEFRGIDRDVEGSAKQWRKWVESECPEKEKLPQEWKKKSLIQKLILLRAMRPDRMTYALRNFVEEKLGAKYVERTRLDLVKAFEESSPATPIFFILSPGVDALKDLEILGKRLGFTIDSGKFHNVSLGQGQETVAEVALEKASKGGHWVILQNVHLVAKWLGTLEKLLERFSQGSHRDYRVFMSAESAPTPDEHIIPQGLLENSIKITNEPPTGMLANLHAALYNFDQDTLEICSKEQEFKSILFSLCYFHACVAGRLRFGPQGWSRSYPFNPGDLTICASVLYNYLEANSKVPWEDLRYLFGEIMYGGHITDDWDRKLCRVYLEEFMNPSLTEDELMLAPGFAAPPYLDYAGYHQYIEEMLPPESPALYGLHPNAEIEFLTVTSNTLFRTLLEMQPRNALSGDELGQSTEEKVKNVLDDILEKLPEEFNMAEIMQKNSNRSPYVLVCFQECERMNILIREIRISLEQLDLSLKGELALSPAVEAQQFALSYDTVPDTWSKLAYPSTYGLAQWFNDLLLRCRELDTWTQDLTLPAVVWLSGFFNPQSFLTAIMQTMARKNEWPLDKTRLTADVTKKTKEDYGHPPREGAYLHGLFMEGARWDTQAGTIVEARLKELACPMPVIFAKATPVDRQETKQTYECPVYRTKLRGPSYIWTFRLKSEEKTAKWVLAGVALLLEA

SEQ ID NO: 5592 - protein, 595 aa, Homo sapiens
MPACCSCSDVFQYETNKVTRIQSMNYGTIKWFFHVIIFSYVCFALVSDKLYQRKEPVISSVHTKVKGIAEVKEEIVENGVKKLVHSVFDTADYTFPLQGNSFFVMTNFLKTEGQEQRLCPEYPTRRTLCSSDRGCKKGWMDPQSKGIQTGRCVVYEGNQKTCEVSAWCPIEAVEEAPRPALLNSAENFTVLIKNNIDFPGHNYTTRNILPGLNITCTFHKTQNPQCPIFRLGDIFRETGDNFSDVAIQGGIMGIEIYWDCNLDRWFHHCRPKYSFRRLDDKTTNVSLYPGYNFRYAKYYKENNVEKRTLIKVFGIRFDILVFGTGGKFDIIQLVVYIGSTLSYFGLAAVFIDFLIDTYSSNCCRSHIYPWCKCCQPCVVNEYYYRKKCESIVEPKPTLKYVSFVDESHIRMVNQQLLGRSLQDVKGQEVPRPAMDFTDLSRLPLALHDTPPIPGQPEEIQLLRKEATPRSRDSPVWCQCGSCLPSQLPESHRCLEELCCRKKPGACITTSELFRKLVLSRHVLQFLLLYQEPLLALDVDSTNSRLRHCAYRCYATWRFGSQDMADFAILPSCCRWRIRKEFPKSEGQYSGFKSPY

SEQ ID NO: 5593 - protein, 2320 aa, Homo sapiens
MAEPSSARRPVPLIESELYFLIARYLSAGPCRRAAQVLVQELEQYQLLPKRLDWEGNEHNRSYEELVLSNKHVAPDHLLQICQRIGPMLDKEIPPSISRVTSLLGAGRQSLLRTAKDCRHTVWKGSAFAALHRGRPPEMPVNYGSPPNLVEIHRGKQLTGCSTFSTAFPGTMYQHIKMHRRILGHLSAVYCVAFDRTGHRIFTGSDDCLVKIWSTHNGRLLSTLRGHSAEISDMAVNYENTMIAAGSCDKIIRVWCLRTCAPVAVLQGHTGSITSLQFSPMAKGSQRYMVSTGADGTVCFWQWDLESLKFSPRPLKFTEKPRPGVQMLCSSFSVGGMFLATGSTDHVIRMYFLGFEAPEKIAELESHTDKVDSIQFCNNGDRFLSGSRDGTARIWRFEQLEWRSILLDMATRISGDLSSEEERFMKPKVTMIAWNQNDSIVVTAVNDHVLKVWNSYTGQLLHNLMGHADEVFVLETHPFDSRIMLSAGHDGSIFIWDITKGTKMKHYFNMIEGQGHGAVFDCKFSQDGQHFACTDSHGHLLIFGFGCSKPYEKIPDQMFFHTDYRPLIRDSNNYVLDEQTQQAPHLMPPPFLVDVDGNPHPTKYQRLVPGRENSADEHLIPQLGYVATSDGEVIEQIISLQTNDNDERSPESSILDGMIRQLQQQQDQRMGADQDTIPRGLSNGEETPRRGFRRLSLDIQSPPNIGLRRSGQVEGVRQMHQNAPRSQIATERDLQAWKRRVVVPEVPLGIFRKLEDFRLEKGEEERNLYIIGRKRKTLQLSHKSDSVVLVSQSRQRTCRRKYPNYGRRNRSWRELSSGNESSSSVRHETSCDQSEGSGSSEEDEWRSDRKSESYSESSSDSSSRYSDWTADAGINLQPPLRTSCRRRITRFCSSSEDEISTENLSPPKRRRKRKKENKPKKENLRRMTPAELANMEHLYEFHPPVWITDTTLRKSPFVPQMGDEVIYFRQGHEAYIEAVRRNNIYELNPNKEPWRKMDLRDQELVKIVGIRYEVGPPTLCCLKLAFIDPATGKLMDKSFSIRYHDMPDVIDFLVLRQFYDEARQRNWQSCDRFRSIIDDAWWFGTVLSQEPYQPQYPDSHFQCYIVRWDNTEIEKLSPWDMEPIPDNVDPPEELGASISVTTDELEKLLYKPQAGEWGQKSRDEECDRIISGIDQLLNLDIAAAFAGPVDLCTYPKYCTVVAYPTDLYTIRMRLVNRFYRRLSALVWEVRYIEHNARTFNEPESVIARSAKKITDQLLKFIKNQHCTNISELSNTSENDEQNAEDLDDSDLPKTSSGRRRVHDGKKSIRATNYVESNWKKQCKELVNLIFQCEDSEPFRQPVDLVEYPDYRDIIDTPMDFGTVRETLDAGNYDSPLEFCKDIRLIFSNAKAYTPNKRSKIYSMTLRLSALFEEKMKKISSDFKIGQKFNEKLRRSQRFKQRQNCKGDSQPNKSIRNLKPKRLKSQTKIIPELVGSPTQSTSSRTAYLGTHKTSAGISSGVTSGDSSDSAESSERRKRNRPITNGSTLSESEVEDSLATSLSSSASSSSEESKESSRARESSSRSGLSRSSNLRVTRTRAAQRKTGPVSLANGCGRKATRKRVYLSDSDNNSLETGEILKARAGNNRKVLRKCAAVAANKIKLMSDVEENSSSESVCSGRKLPHRNASAVARKKLLHNSEDEQSLKSEIEEEELKDENQLLPVSSSHTAQSNVDESENRDSESESDLRVARKNWHANGYKSHTPAPSKTKFLKIESSEEDSKSHDSDHACNRTAGPSTSVQKLKAESISEEADSEPGRSGGRKYNTFHKNASFFKKTKILSDSEDSESEEQDREDGKCHKMEMNPISGNLNCDPIAMSQCSSDHGCETDLDSDDDKIEKPNNFMKDSASQDNGLSRKISRKRVCSSDSDSSLQVVKKSSKARTGLLRITRRCAATAANKIKLMSDVEDVSLENVHTRSKNGRKKPLHLACTTAKKKLSDCEGSVHCEVPSEQYACEGKPPDPDSEGSTKVLSQALNGDSDSEDMLNSEHKHRHTNIHKIDAPSKRKSSSVTSSGEDSKSHIPGSETDRTFSSESTLAQKATAENNFEVELNYGLRRWNGRRLRTYGKAPFSKTKVIHDSQETAEKEVKRKRSHPELENVKISETTGNSKFRPDTSSKSSDLGSVTESDIDCTDNTKTKRRKTKGKAKVVRKEFVPRDREPNTKVRTCMHNQKDAVQMPSETLKAKMVPEKVPRRCATVAANKIKIMSNLKETISGPENVWIRKSSRKLPHRNASAAAKKKLLNVYKEDDTTINSESEKELEDINRKMLFLRGFRSWKENAQ

SEQ ID NO: 5594 - protein, 532 aa, Homo sapiens
MMMVRRGLLAWISRVVVLLVLLCCAISVLYMLACTPKGDEEQLALPRANSPTGKEGYQAVLQEWEEQHRNYVSSLKRQIAQLKEELQERSEQLRNGQYQASDAAGLGLDRSPPEKTQADLLAFLHSQVDKAEVNAGVKLATEYAAVPFDSFTLQKVYQLETGLTRHPEEKPVRKDKRDELVEAIESALETLNSPAENSPNHRPYTASDFIEGIYRTERDKGTLYELTFKGDHKHEFKRLILFRPFGPIMKVKNEKLNMANTLINVIVPLAKRVDKFRQFMQNFREMCIEQDGRVHLTVVYFGKEEINEVKGILENTSKAANFRNFTFIQLNGEFSRGKGLDVGARFWKGSNVLLFFCDVDIYFTSEFLNTCRLNTQPGKKVFYPVLFSQYNPGIIYGHHDAVPPLEQQLVIKKETGFWRDFGFGMTCQYRSDFINIGGFDLDIKGWGGEDVHLYRKYLHSNLIVVRTPVRGLFHLWHEKRCMDELTPEQYKMCMQSKAMNEASHGQLGMLVFRHEIEAHLRKQKQKTSSKKT

SEQ ID NO: 5595 - protein, 477 aa, Homo sapiens
MWMFSWLCAILIILAIAGMNTIAKTTPHTKFTKKSEEREMPKGLKPSSGPPPEEEETLFTEMAEMAEPITKPSALDSVFGTATLSPFENFTLDPADFFLNCCDCCSPVPGQKGEPGETGQPGPKGEAGNLGIPGPPGVVGPQGPRGYKGEKGLKGERGDQGVPGYPGKPGAQGEPGPKGDKGNIGLGGVKGQKGSKGDTCGNCTKGEKGDQGAMGSPGLHGGPGAKGEKGEMGEKGEMGDKGCCGDSGERGGKGQKGEGGMKGEKGSKGDSGMEGKSGRNGLPGAKGDPGIKGEKGELGPPGLLGPTGPKGDIGNKGVRGPTGKKGSRGFKGSKGELARVPRSAFSAGLSKPFPPPNIPIKFEKILYNDQGNYSPVTGKFNCSIPGTYVFSYHITVRGRPARISLVAQNKKQFKSRETLYGQEIDQASLLVILKLSAGDQVWLEVSKDWNGVYVSAEDDSIFTGFLLYPEETSGISP

SEQ ID NO: 5596 - protein, 537 aa, Homo sapiens
MESGLAGNGTGAGLVMKVKQEKPERLLQTLAPQAMLVEKDKENIFQQHRGLPPRQTMGRPRALGGQEESGSPRWAPPTEQDAGLAGRAPGSASGPLSPSLSSGEGHFVCLDCGKRFSWWSSLKIHQRTHTGEKPYLCGKCGKSFSQKPNLARHQRHHTGERPFCCPECARRFSQKQHLLKHQKTHSRPATHSCPECERCFRHQVGLRIHQRAHARDRQGSRAGLHELIQDAAARRACRLQPGPPRGRPEWAWLGLCQGWWGQPGARAAVSGPEGPGEPRQFICNECGKSFTWWSSLNIHQRIHTGERPYACPECGRRFSQKPNLTRHLRNHTGERPHPCPHCGRGFRQKQHLLKHLRTHLPGAQAAPCPSCGKSCRSRAALRAHQRAHAVAEPAVPAGEPGDQPQAEAIPGLAARPRSSQRSPGARDTLWGRGQAGLAGPGEPRQFICNECGKSFSWWSALTIHQRIHTGERPYPCPECGRRFSQKPNLTRHRRNHTGERPYLCPACGRGFSQKQHLLKHQRVHRAAPACSPKEEAR

SEQ ID NO: 5597 - protein, 345 aa, Homo sapiens
MGVCGYLFLPWKCLVVVSLRLLFLVPTGVPVRSGDATFPKAMDNVTVRQGESATLRCTIDDRVTRVAWLNRSTILYAGNDKWSIDPRVIILVNTPTQYSIMIQNVDVYDEGPYTCSVQTDNHPKTSRVHLIVQVPPQIMNISSDITVNEGSSVTLLCLAIGRPEPTVTWRHLSVKEGQGFVSEDEYLEISDIKRDQSGEYECSALNDVAAPDVRKVKITVNYPPYISKAKNTGVSVGQKGILSCEASAVPMAEFQWFKEETRLATGLDGMRIENKGRMSTLTFFNVSEKDYGNYTCVATNKLGNTNASITLYGPGAVIDGVNSASRALACLWLSGTLLAHFFIKF

SEQ ID NO: 5598 - protein, 516 aa, Homo sapiens
MPTLDAPEERRRKFKYRGKDVSLRRQQRMAVSLELRKAKKDEQTLKRRNITSFCPDTPSEKTAKGVAVSLTLGEIIKGVNSSDPVLCFQATQTARKMLSQEKNPPLKLVIEAGLIPRMVEFLKSSLYPCLQFEAAWALTNIASGTSEQTRAVVEGGAIQPLIELLSSSNVAVCEQAVWALGNIAGDGPEFRDNVITSNAIPHLLALISPTLPITFLRNITWTLSNLCRNKNPYPCDTAVKQILPALLHLLQHQDSEVLSDACWALSYLTDGSNKRIGQVVNTGVLPRLVVLMTSSELNVLTPSLRTVGNIVTGTDEQTQMAIDAGMLNVLPQLLQHNKPSIQKEAAWALSNVAAGPCHHIQQLLAYDVLPPLVALLKNGEFKVQKEAVWMVANFATGATMDQLIQLVHSGVLEPLVNLLTAPDVKIVLIILDVISCILQAAEKRSEKENLCLLIEELGGIDRIEALQLHENRQIGQSALNIIEKHFGEEEDESQTLLSQVIDQDYEFIDYECLAKK

SEQ ID NO: 5599 - protein, 620 aa, Homo sapiens
MASTDYSTYSQAAAQQGYSAYTAQPTQGYAQTTQAYGQQSYGTYGQPTDVSYTQAQTTATYGQTAYATSYGQPPTGYTTPTAPQAYSQPVQGYGTGAYDTTTATVTTTQASYAAQSAYGTQPAYPAYGQQPAATAPTRPQDGNKPTETSQPQSSTGGYNQPSLGYGQSNYSYPQVPGSYPMQPVTAPPSYPPTSYSSTQPTSYDQSSYSQQNTYGQPSSYGQQSSYGQQSSYGQQPPTSYPPQTGSYSQAPSQYSQQSSSYGQQIYFVGSGRTKNGFETRAFSSLHGFQSAGERGGFNKPGGPMDEGPDLDLGPPVDPDEDSDNSAIYVQGLNDSVTLDDLADFFKQCGVVKMNKRTGQPMIHIYLDKETGKPKGDATVSYEDPPTAKAAVEWFDGKDFQGSKLKVSLARKKPPMNSMRGGLPPREGRGMPPPLRGGPGGPGGPGGPMGRMGGRGGDRGGFPPRGPRGSRGNPSGGGNVQHRAGDWQCPNPGCGNQNFAWRTECNQCKAPKPEGFLPPPFPPPGGDRGRGGPGGMRGGRGGLMDRGGPGGMFRGGRGGDRGGFRGGRGMDRGGFGGGRRGGPGGPPGPLMEQMGGRRGGRGGPGKMDKGEHRQERRDRPY

SEQ ID NO: 5600 - protein, 318 aa, Homo sapiens
MCSGNQTSQNQTASTDFTLTGLFAESKHAALLYTVTFLLFLMALTGNALLILLIHSEPRLHTPMYFFISQLALMDLMYLCVTVPKMLVGQVTGDDTISPSGCGIQMFFHLTLAGAEVFLLAAMAYDRYAAVCRPLHYPLLMNQRVCQLLVSACWVLGMVDGLLLTPITMSFPFCQSRKILSFFCETPALLKLSCSDVSLYKMLTYLCCILMLLTPIMVISSSYTLILHLIHRMNSAAGRRKALATCSSHMIIVLLLFGASFYTYMLRSSYHTAEQDMMVSAFYTIFTPVLNPLIYSLRNKDVTRALRSMMQSRMNQEK

SEQ ID NO: 5601 - protein, 321 aa, Homo sapiens
MAAAEAGGDDARCVRLSAERAQALLADVDTLLFDCDGVLWRGETAVPGAPEALRALRARGKRLGFITNNSSKTRAAYAEKLRRLGFGGPAGPGASLEVFGTAYCTALYLRQRLAGAPAPKAYVLGSPALAAELEAVGVASVGVGPEPLQGEGPGDWLHAPLEPDVRAVVVGFDPHFSYMKLTKALRYLQQPGCLLVGTNMDNRLPLENGRFIAGTGCLVRAVEMAAQRQADIIGKPSRFIFDCVSQEYGINPERTVMVGDRLDTDILLGATCGLKTILTLTGVSTLGDVKNNQESDCVSKKKMVPDFYVDSIADLLPALQG

SEQ ID NO: 5602 - protein, 335 aa, Homo sapiens
MIREWKNDCQRIEKQRASDTMVQERKNEKPVRIFNTNSSFQDQAPTCCQEDLSSASPLRIWSKFYRSDPRIALGKYSPLEKEILRLGGIHTIAARRLLAYKQEEECRMLKELQLLSPDYKQAMEYKKKHSSPCAICVPLEKIWTAKVIAPLEAFKMPQREQVNVSKHIERMRLARALGNHQPLPYIERFTRSSFLSGVGLGPMAKNKARRKEDNYDTHNCDDANQDKKEEAEGKNTKRREIKMNVVFKSKEPKKCLTYHGNDRKSFLPAKKPERSIAGLTNRNLFCISEFPGDLMLMNQDFISRRDHFSDLVKTYSLEEESIWKERMRKATPYHY

SEQ ID NO: 5603 - protein, 84 aa, Homo sapiens
MPLARDLLHPSLEEEKKKHKKKRLVQSPNSYFMDVKCPGCYKITTVFSHAQTVVLCVGCSTVLCQPTGGKARLTEGCSFRRKQH

SEQ ID NO: 5604 - protein, 470 aa, Homo sapiens
MDPGQQPPPQPAPQGQGQPPSQPPQGQGPPSGPGQPAPAATQAAPQAPPAGHQIVHVRGDSETDLEALFNAVMNPKTANVPQTVPMRLRKLPDSFFKPPEPKSHSRQASTDAGTAGALTPQHVRAHSSPASLQLGAVSPGTLTPTGVVSGPAATPTAQHLRQSSFEIPDDVPLPAGWEMAKTSSGQRYFLNHIDQTTTWQDPRKAMLSQMNVTAPTSPPVQQNMMNSASAMNQRISQSAPVKQPPPLAPQSPQGGVMGGSNSNQQQQMRLQQLQMEKERLRLKQQELLRQVRPQAMRNINPSTANSPKCQELALRSQLPTLEQDGGTQNPVSSPGMSQELRTMTTNSSDPFLNSGTYHSRDESTDSGLSMSSYSVPRTPDDFLNSVDEMDTGDTINQSTLPSQQNRFPDYLEAIPGTNVDLGTLEGDGMNIEGEELMPSLQEALSSDILNDMESVLAATKLDKESFLTWL

SEQ ID NO: 5605 - protein, 706 aa, Homo sapiens
MNPQQQRMAAIGTDKELSDLLDFSAMFSPPVNSGKTRPTTLGSSQFSGSGIDERGGTTSWGTSGQPSPSYDSSRGFTDSPHYSDHLNDSRLGAHEGLSPTPFMNSNLMGKTSERGSFSLYSRDTGLPGCQSSLLRQDLGLGSPAQLSSSGKPGTAYYSFSATSSRRRPLHDSAALDPLQAKKVRKVPPGLPSSVYAPSPNSDDFNRESPSYPSPKPPTSMFASTFFMQDGTHNSSDLWSSSNGMSQPGFGGILGTSTSHMSQSSSYGNLHSHDRLSYPPHSVSPTDINTSLPPMSSFHRGSTSSSPYVAASHTPPINGSDSILGTRGNAAGSSQTGDALGKALASIYSPDHTSSSFPSNPSTPVGSPSPLTGTSQWPRPGGQAPSSPSYENSLHSLKNRVEQQLHEHLQDAMSFLKDVCEQSRMEDRLDRLDDAIHVLRNHAVGPSTSLPAGHSDIHSLLGPSHNAPIGSLNSNYGGSSLVASSRSASMVGTHREDSVSLNGNHSVLSSTVTTSSTDLNHKTQENYRGGLQSQSGTVVTTEIKTENKEKDENLHEPPSSDDMKSDDESSQKDIKVSSRGRTSSTNEDEDLNPEQKIEREKERRMANNARERLRVRDINEAFKELGRMCQLHLKSEKPQTKLLILHQAVAVILSLEQQVRERNLNPKAACLKRREEEKVSAVSAEPPTTLPGTHPGLSETTNPMGHM

SEQ ID NO: 5606 - protein, 320 aa, Homo sapiens
MRLLALAAAALLARAPAPEVCAALNVTVSPGPVVDYLEGENATLLCHVSQKRRKDSLLAVRWFFAHSFDSQEALMVKMTKLRVVQYYGNFSRSAKRRRLRLLEEQRGALYRLSVLTLQPSDQGHYVCRVQEISRHRNKWTAWSNGSSATEMRVISLKASEESSFEKTKETWAFFEDLYVYAVLVCCVGILSILLFMLVIVWQSVFNKRKSRVRHYLVKCPQNSSGETVTSVTSLAPLQPKKGKRQKEKPDIPPAVPAKAPIAPTFHKPKLLKPQRKVTLPKIAEENLTYAELELIKPHRAAKGAPTSTVYAQILFEENKL

SEQ ID NO: 5607 - protein, 745 aa, Homo sapiens
MRRCRWAALALGLLRLCLAQANFAPHFFDNGVGSTNGNMALFSLPEDTPVGSHVYTLNGTDPEGDPISYHISFDPSTRSVFSVDPTFGNITLVEELDREREDEIEAIISISDGLNLVAEKVVILVTDANDEAPRFIQEPYVALVPEDIPAGSIIFKVHAVDRDTGSGGSVTYFLQNLHSPFAVDRHSGVLRLQAGATLDYERSRTHYITVVAKDGGGRLHGADVVFSATTTVTVNVEDVQDMAPVFVGTPYYGYVYEDTLPGSEVLKVVAMDGDRGKPNRILYSLVNGNDGAFEINETSGAISITQSPAQLQREVYELHVQVTEMSPAGSPAAQATVPVTIRIVDLNNHPPTFYGESGPQNRFELSMNEHPPQGEILRGLKITVNDSDQGANAKFNLQLVGPRGIFRVVPQTVLNEAQVTIIVENSAAIDFEKSKVLTFKLLAVEVNTPEKFSSTADVVIQLLDTNDNVPKFDSLYYVARIPENAPGGSSVVAVTAVDPDTGPWGEVKYSTYGTGADLFLIHPSTGLIYTQPWASLDAEATARYNFYVKAEDMEGKYSVAEVFITLLDVNDHPPQFGKSVQKKTMVLGTPVKIEAIDEDAEEPNNLVDYSITHAEPANVFDINSHTGEIWLKNSIRSLDALHNITPGRDCLWSLEVQAKDRGSPSFSTTALLKIDITDAEVRRLRYMKNSNFPGTTKSVRKPKFKPKKPHSSQGLFLHPHCEIALFNLSNVNLYSRVFQGAAQAS

SEQ ID NO: 5608 - protein, 113 aa, Homo sapiens
MENLTKHSIECSSFRGDWECKNQFERKQGSQEGHFSEMIFTPEDMPTFSIQHQRIHTDEKLLECKECGKDFSFVSVLVRHQRIHTGEKPYECKECGKAFGSGANLAYHQRIHT

SEQ ID NO: 5609 - protein, 1287 aa, Homo sapiens
MSKVIQKKNHWTSRVHECTVKRGPQGELGVTVLGGAEHGEFPYVGAVAAVEAAGLPGGGEGPRLGEGELLLEVQGVRVSGLPRYDVLGVIDSCKEAVTFKAVRQGGRLNKDLRHFLNQRFQKGSPDHELQQTIRDNLYRHAVPCTTRSPREGEVPGVDYNFLTVKEFLDLEQSGTLLEVGTYEGNYYGTPKPPSQPVSGKVITTDALHSLQSGSKQSTPKRTKSYNDMQNAGIVHAENEEEDDVPEMNSSFTADSGEQEEHTLQETALPPVNSSIIAAPITDPSQKFPQYLPLSAEDNLGPLPENWEMAYTENGEVYFIDHNTKTTSWLDPRCLNKQQKPLEECEDDEGVHTEELDSELELPAGWEKIEDPVYGIYYVDHINRKTQYENPVLEAKRKKQLEQQQQQQQQQQQQQQQQQQQQTEEWTEDHSALVPPVIPNHPPSNPEPAREVPLQGKPFFTRNPSELKGKFIHTKLRKSSRGFGFTVVGGDEPDEFLQIKSLVLDGPAALDGKMETGDVIVSVNDTCVLGHTHAQVVKIFQSIPIGASVDLELCRGYPLPFDPDDPNTSLVTSVAILDKEPIIVNGQETYDSPASHSSKTGKVNGMKDARPSSPADVASNSSHGYPNDTVSLASSIATQPELITVHIVKGPMGFGFTIADSPGGGGQRVKQIVDSPRCRGLKEGDLIVEVNKKNVQALTHNQVVDMLVECPKGSEVTLLVQRGGLPVPKKSPKSQPLERKDSQNSSQHSVSSHRSLHTASPSHSTQVLPEFPPAEAQAPDQTDSSGQKKPDPFKIWAQSRSMYENRPMSPSPASGLSKGEREREINSTNFGECPIPDYQEQDIFLWRKETGFGFRILGGNEPGEPIYIGHIVPLGAADTDGRLRSGDELICVDGTPVIGKSHQLVVQLMQQAAKQGHVNLTVRRKVVFAVPKTENEVPSPASSHHSSNQPASLTEEKRTPQGSQNSLNTVSSGSGSTSGIGSGGGGGSGVVSTVVQPYDVEIRRGENEGFGFVIVSSVSRPEAGTTFGNACVAMPHKIGRIIEGSPADRCGKLKVGDRILAVNGCSITNKSHSDIVNLIKEAGNTVTLRIIPGDESSNATLLTNAEKIATITTTHTPSQQGTQETRNTTKPKQESQFEFKAPQATQEQDFYTVELERGAKGFGFSLRGGREYNMDLYVLRLAEDGPAERCGKMRIGDEILEINGETTKNMKHSRAIELIKNGGRRVRLFLKRGDGSVPEYAMIPPNIAACMRNEKLGEACFYLMGHNQTTTPAATATAPPPVHKVFRK

SEQ ID NO: 5610 - protein, 777 aa, Homo sapiens
MGRGSGTFERLLDKATSQLLLETDWESILQICDLIRQGDTQAKYAVNSIKKKVNDKNPHVALYALEVMESVVKNCGQTVHDEVANKQTMEELKDLLKRQVEVNVRNKILYLIQAWAHAFRNEPKYKVVQDTYQIMKVEGHVFPEFKESDAMFAAERAPDWVDAEECHRCRVQFGVMTRKHHCRACGQIFCGKCSSKYSTIPKFGIEKEVRVCEPCYEQLNRKAEGKATSTTELPPEYLTSPLSQQSQLPPKRDETALQEEEELQLALALSQSEAEEKERLRQKSTYTSYPKAEPMPSASSAPPASSLYSSPVNSSAPLAEDIDPELARYLNRNYWEKKQEEARKSPTPSAPVPLTEPAAQPGEGHAAPTNVVENPLPETDSQPIPPSGGPFSEPQFHNGESEESHEQFLKALQNAVTTFVNRMKSNHMRGRSITNDSAVLSLFQSINGMHPQLLELLNQLDERRLYYEGLQDKLAQIRDARGALSALREEHREKLRRAAEEAERQRQIQLAQKLEIMRQKKQEYLEVQRQLAIQRLQEQEKERQMRLEQQKQTVQMRAQMPAFPLPYAQLQAMPAAGGVLYQPSGPASFPSTFSPAGSVEGSPMHGVYMSQPAPAAGPYPSMPSTAADPSMVSAYMYPAGATGAQAAPQAQAGPTASPAYSSYQPTPTAGYQNVASQAPQSLPAISQPPQSSTMGYMGSQSVSMGYQPYNMQNLMTTLPSQDASLPPQQPYIAGQQPMYQQMAPSGGPPQQQPPVAQQPQAQGPPAQGSEAQLISFD

SEQ ID NO: 5611 - protein, 911 aa, Homo sapiens
MAQLFLPLLAALVLAQAPAALADVLEGDSSEDRAFRVRIAGDAPLQGVLGGALTIPCHVHYLRPPPSRRAVLGSPRVKWTFLSRGREAEVLVARGVRVKVNEAYRFRVALPAYPASLTDVSLALSELRPNDSGIYRCEVQHGIDDSSDAVEVKVKGVVFLYREGSARYAFSFSGAQEACARIGAHIATPEQLYAAYLGGYEQCDAGWLSDQTVRYPIQTPREACYGDMDGFPGVRNYGVVDPDDLYDVYCYAEDLNGELFLGDPPEKLTLEEARAYCQERGAEIATTGQLYAAWDGGLDHCSPGWLADGSVRYPIVTPSQRCGGGLPGVKTLFLFPNQTGFPNKHSRFNVYCFRDSAQPSAIPEASNPASNPASDGLEAIVTVTETLEELQLPQEATESESRGAIYSIPIMEDGGGGSSTPEDPAEAPRTLLEFETQSMVPPTGFSEEEGKALEEEEKYEDEEEKEEEEEEEEVEDEALWAWPSELSSPGPEASLPTEPAAQEESLSQAPARAVLQPGASPLPDGESEASRPPRVHGPPTETLPTPRERNLASPSPSTLVEAREVGEATGGPELSGVPRGESEETGSSEGAPSLLPATRAPEGTRELEAPSEDNSGRTAPAGTSVQAQPVLPTDSASRGGVAVVPASGDCVPSPCHNGGTCLEEEEGVRCLCLPGYGGDLCDVGLRFCNPGWDAFQGACYKHFSTRRSWEEAETQCRMYGAHLASISTPEEQDFINNRYREYQWIGLNDRTIEGDFLWSDGVPLLYENWNPGQPDSYFLSGENCVVMVWHDQGQWSDVPCNYHLSYTCKMGLVSCGPPPELPLAQVFGRPRLRYEVDTVLRYRCREGLAQRNLPLIRCQENGRWEAPQISCVPRRPARALHPEEDPEGRQGRLLGRWKALLIPPSSPMPGP

SEQ ID NO: 5612 - protein, 357 aa, Homo sapiens
MASVLNVKESKAPERTVVVAGLPVDLFSDQLLAVLVKSHFQDIKNEGGDVEDVIYPTRTKGVAYVIFKEKKVAENVIRQKKHWLARKTRHAELTVSLRVSHFGDKIFSSVNAILDLSVFGKEVTLETLVKDLKKKIPSLSFSPLKPNGRISVEGSFLAVKRLRESLLARACSLLEKDRNFTSEERKWNRQNPQRNLQRSNNSLASVRTLVPETARSGEMLVLDTDVFLYLKHKCGSYESTLKKFHILSQEKVDGEITTICLKSIQVGSQPNNAKHVKELIEEWSHALYLKLRKETFILEGKENREKRMIKRACEQLSSRYLEVLINLYRTHIDIIGSSSDTYLFKKGVMKLIGQKVS

SEQ ID NO: 5613 - protein, 492 aa, Homo sapiens
MAPPAARLALLSAAALTLAARPAPSPGLGPGPECFTANGADYRGTQNWTALQGGKPCLFWNETFQHPYNTLKYPNGEGGLGEHNYCRNPDGDVSPWCYVAEHEDGVYWKYCEIPACQMPGNLGCYKDHGNPPPLTGTSKTSNKLTIQTCISFCRSQRFKFAGMESGYACFCGNNPDYWKYGEAASTECNSVCFGDHTQPCGGDGRIILFDTLVGACGGNYSAMSSVVYSPDFPDTYATGRVCYWTIRVPGASHIHFSFPLFDIRDSADMVELLDGYTHRVLARFHGRSRPPLSFNVSLDFVILYFFSDRINQAQGFAVLYQAVKEELPQERPAVNQTVAEVITEQANLSVSAARSSKVLYVITTSPSHPPQTVPGSNSWAPPMGAGSHRVEGWTVYGLATLLILTVTAIVAKILLHVTFKSHRVPASGDLRDCHQPGTSGEIWSIFYKPSTSISIFKKKLKGQSQQDDRNPLAIQDSEVTSLIWSQGQPRSI

SEQ ID NO: 5614 - protein, 289 aa, Homo sapiens
MQGDARRRRNENYFDDIPRSKLERQMAQSSVCEIWTNQNAGFPFSAIHQVHNTGDWGEPSITLRPPNEATASTPVQYWQHHPEKLIFQSCDYKAFYLGSMLIKELRGTESTQDACAKMRANCQKSTEQMKKVPTIILSVSYKGVKFIDATNKNIIAEHEIRNISCAAQDPEDLSTFAYITKDLKSNHHYCHVFTAFDVNLAYEIILTLGQAFEVAYQLALQARKGGHSSTLPESFENKPSKPIPKPRVSIRKSVIDPSEQKTLANLPWIVEPGQEAKRGINTKYETTIF

SEQ ID NO: 5615 - protein, 457 aa, Homo sapiens
MSGTRASNDRPPGAGGVKRGRLQQEAAATGSRVTVVLGAQWGDEGKGKVVDLLATDADIISRCQGGNNAGHTVVVDGKEYDFHLLPSGIINTKAVSFIGNGVVIHLPGLFEEAEKNEKKGLKDWEKRLIISDRAHLVFDFHQAVDGLQEVQRQAQEGKNIGTTKKGIGPTYSSKAARTGLRICDLLSDFDEFSSRFKNLAHQHQSMFPTLEIDIEGQLKRLKGFAERIRPMVRDGVYFMYEALHGPPKKILVEGANAALLDIDFGTYPFVTSSNCTVGGVCTGLGIPPQNIGDVYGVVKAYTTRVGIGAFPTEQINEIGGLLQTRGHEWGVTTGRKRRCGWLDLMILRYAHMVNGFTALALTKLDILDVLGEVKVGVSYKLNGKRIPYFPANQEMLQKVEVEYETLPGWKADTTGARRWEDLPPQAQNYIRFVENHVGVAVKWVGVGKSRESMIQLF

SEQ ID NO: 5616 - protein, 379 aa, Homo sapiens
MPHSSLHPSIPCPRGHGAQKAALVLLSACLVTLWGLGEPPEHTLRYLVLHLASLQLGLLLNGVCSLAEELRHIHSRYRGSYWRTVRACLGCPLRRGALLLLSIYFYYSLPNAVGPPFTWMLALLGLSQALNILLGLKGLAPAEISAVCEKGNFNVAHGLAWSYYIGYLRLILPELQARIRTYNQHYNNLLRGAVSQRLYILLPLDCGVPDNLSMADPNIRFLDKLPQQTGDHAGIKDRVYSNSIYELLENGQRAGTCVLEYATPLQTLFAMSQYSQAGFSREDRLEQAKLFCRTLEDILADAPESQNNCRLIAYQEPADDSSFSLSQEVLRHLRQEEKEEVTVGSLKTSAVPSTSTMSQEPELLISGMEKPLPLRTDFS

SEQ ID NO: 5617 - protein, 376 aa, Homo sapiens
MSTNNALRVFWKSREWNMKTSTFDSDEDILLLPKRKRFRKKKSRPVRHTKRHEEEQVYEQGTTLPCSICKHEIDLTGIFLHKKQHVALATLGFQWMGRKKPQPSVIAVQRQFMISKLLSSFMFTEKTLQSINNAFELLWKKQIPAYYKIFDNIDRSVIYSQKICHLLIKGVGICEDRNSTWKADMNDKFTVVSNFGNKPNVCFFGLFDGHHGASAAELTSMELPVLLLHQLSKFDPSYQMTTDEQQIINSFYTVFREEYAAIEDLFSAINKTEAVRCEYEDTHKAFAKAFWRMDRLLGLGRKEVSRVQWSGCSAVTCILEGKPKSPYAHKNWKRKNTHDGLAESSPSQEMPKIISGILHVANTGTRRNEHLPEYYG

SEQ ID NO: 5618 - protein, 753 aa, Homo sapiens
MAAGSTTLHAVEKLQVRLATKTEPKKLEKYLQKLSALPMTADILAETGIRKTVKRLRKHQHVGDFARDLAARWKKLVLVDRNTRPGPQDPEESASRQRFGEALQDQEKAWGFPENATAPRSPSHSPEHRRTARRTPPGQQRPHPRSHSREPRAERKCPRIAPADSGRYRASPTRTAPLRMPEGPEPAAPGKQPGRGHTHAAQGGPLLCPGCQGQPQGKAVVSHSKGHKSSRQEKRPLCAQGDWHSPTLIREKSCGACLREETPRMPSWASARDRQPSDFKTDKEGGQAGSGQRVPALEEAPDSHQKRPQHSHSNKKRPSLDGRDPGNGTHGLSPEEKEQLSNDRETQEGKPPTAHLDRTSVSSLSEVEEVDMAEEFEQPTLSCEKYLTYDQLRKQKKKTGKSATTALGDKQRKANESKGTRESWDSAKKLPPVQESQSERLQAAGADSAGPKTVPSHVFSELWDLSEAWMQANYDPLSDSDSMTSQAKPEALSSPKFREEAAFPGRRVNAKMPVYSGSRPACQLQVPTLRQQCAQVLRNNPDALSDVGEVPYWVLEPVLEGWRPDQLYRRKKDNHALVRETDELRRNHCFQDFKEEKPQENKTWREQYLRLPDAPEQRLRVMTTNIRSARGNNPNGREAKMICFKSVAKTPYDTSRRQEKSAGDADPENGEIKPASKPAGSSHTPSSQSSSGGGRDSSSSILRWLPEKRANPCLSSSNEHAAPAAKTRKQAAKKVAPLMAKAIRDYKRRFSRR

SEQ ID NO: 5619 - protein, 344 aa, Homo sapiens
MQLEIKVALNFIISYLYNKLPRRRADLFGEELERLLKKKYEGHWYPEKPLKGSGFRCVHIGEMVDPVVELAAKRSGLAVEDVRANVPEELSVWIDPFEVSYQIGEKGAVKVLYLDDSEGCGAPELDKEIKSSFNPDAQVFVPIGSQDSSLSNSPSPSFGQSPSPTFIPRSAQPITFTTASFAATKFGSTKMKKGGGAASGGGVASSGAGGQQPPQQPRMARSPTNSLLKHKSLSLSMHSLNFITANPAPQSQLSPNAKEFVYNGGGSPSLFFDAADGQGSGTPGPFGGSGAGTCNSSSFDMAQVFGGGANSLFLEKTPFVEGLSYNLNTMQYPSQQFQPVVLAN

SEQ ID NO: 5620 - protein, 178 aa, Homo sapiens
MEIKHLLFLVAAACLLPMLSMKKKSARDQFNKLVTDLPNVQEEIVNIHNALRRRVVPPASNMLKMSWSEEAAQNARIFSKYCDMTESNPLERRLPNTFCGENMHMTSYPVSWSSVIGVWYSESTSFKHGEWTTTDDDITTDHYTQIVWATSYLIGCAIASCRQQGSPRYLYVCHYCHD

SEQ ID NO: 5621 - protein, 1068 aa, Homo sapiens
MTTANCGAHDELDFKLVFGEDGAPAPPPPGSRPADLEPDDCASIYIFNVDPPPSTLTTPLCLPHHGLPSHSSVLSPSFQLQSHKNYEGTCEIPESKYSPLGGPKPFECPSIQITSISPNCHQELDAHEDDLQINDPEREFLERPSRDHLYLPLEPSYRESSLSPSPASSISSRSWFSDASSCESLSHIYDDVDSELNEAAARFTLGSPLTSPGGSPGGCPGEETWHQQYGLGHSLSPRQSPCHSPRSSVTDENWLSPRPASGPSSRPTSPCGKRRHSSAEVCYAGSLSPHHSPVPSPGHSPRGSVTEDTWLNASVHGGSGLGPAVFPFQYCVETDIPLKTRKTSEDQAAILPGKLELCSDDQGSLSPARETSIDDGLGSQYPLKKDSCGDQFLSVPSPFTWSKPKPGHTPIFRTSSLPPLDWPLPAHFGQCELKIEVQPKTHHRAHYETEGSRGAVKASTGGHPVVKLLGYNEKPINLQMFIGTADDRYLRPHAFYQVHRITGKTVATASQEIIIASTKVLEIPLLPENNMSASIDCAGILKLRNSDIELRKGETDIGRKNTRVRLVFRVHIPQPSGKVLSLQIASIPVECSQRSAQELPHIEKYSINSCSVNGGHEMVVTGSNFLPESKIIFLEKGQDGRPQWEVEGKIIREKCQGAHIVLEVPPYHNPAVTAAVQVHFYLCNGKRKKSQSQRFTYTPVLMKQEHREEIDLSSVPSLPVPHPAQTQRPSSDSGCSHDSVLSGQRSLICSIPQTYASMVTSSHLPQLQCRDESVSKEQHMIPSPIVHQPFQVTPTPPVGSSYQPMQTNVVYNGPTCLPINAASSQEFDSVLFQQDATLSGLVNLGCQPLSSIPFHSSNSGSTGHLLAHTPHSVHTLPHLQSMGYHCSNTGQRSLSSPVADQITGQPSSQLQPITYGPSHSGSATTASPAASHPLASSPLSGPPSPQLQPMPYQSPSSGTASSPSPATRMHSGQHSTQAQSTGQGGLSAPSSLICHSLCDPASFPPDGATVSIKPEPEDREPNFATIGLQDITLDDDQFISDLEHQPSGSAEKWPNHSVLSCPAPFWRI

SEQ ID NO: 5622 - protein, 502 aa, Homo sapiens
LDFLLLQDPASTCVPEPASQHTLRSGPGCLQQPEQQGVRDPGGIWAKLGAAEASAERLQGRRSRGASGSEPQQMGSDVRDLNALLPAVPSLGGGGGCALPVSGAAQWAPVLDFAPPGASAYGSLGGPAPPPAPPPPPPPPPHSFIKQEPSWGGAEPHEEQCLSAFTVHFSGQFTGTAGACRYGPFGPPPPSQASSGQARMFPNAPYLPSCLESQPAIRNQGYSTVTFDGTPSYGHTPSHHAAQFPNHSFKHEDPMGQQGSLGEQQYSVPPPVYGCHTPTDSCTGSQALLLRTPYSSDNLYQMTSQLECMTWNQMNLGATLKGHSTGYESDNHTTPILCGAQYRIHTHGVFRGIQDVRRVPGVAPTLVRSASETSEKRPFMCAYPGCNKRYFKLSHLQMHSRKHTGEKPYQCDFKDCERRFSRSDQLKRHQRRHTGVKPFQCKTCQRKFSRSDHLKTHTRTHTGEKPFSCRWPSCQKKFARSDELVRHHNMHQRNMTKLQLAL

SEQ ID NO: 5623 - protein, 830 aa, Homo sapiens
MGCAPSIHVSQSGVIYCRDSDESSSPRQTTSVSQGPAAPLPGLFVQTDAADAIPPSRASGPPSVARVRRARTELGSGSSAGSAAPAATTSRGRRRHCCSSAEAETQTCYTSVKQVSSAEVRIGPMRLTQDPIQVLLIFAKEDSQSDGFWWACDRAGYRCNIARTPESALECFLDKHHEIIVIDHRQTQNFDAEAVCRSIRATNPSEHTVILAVVSRVSDDHEEASVLPLLHAGFNRRFMENSSIIACYNELIQIEHGEVRSQFKLRACNSVFTALDHCHEAIEITSDDHVIQYVNPAFERMMGYHKGELLGKELADLPKSDKNRADLLDTINTCIKKGKEWQGVYYARRKSGDSIQQHVKITPVIGQGGKIRHFVSLKKLCCTTDNNKQIHKIHRDSGDNSQTEPHSFRYKNRRKESIDVKSISSRGSDAPSLQNRRYPSMARIHSMTIEAPITKDGLRRLSGNEYVFTKNVHQSHSHLAMPITINDVPPCISQLLDNEESWDFNIFELEAITHKRPLVYLGLKVFSRFGVCEFLNCSETTLRAWFQVIEANYHSSNAYHNSTHAADVLHATAFFLGKERVKGSLDQLDEVAALIAATVHDVDHPGRTNSFLCNAGSELAVLYNDTAVLESHHTALAFQLTVKDTKCNIFKNIDRNHYRTLRQAIIDMVLATEMTKHFEHVNKFVNSINKPMAAEIEGSDCECNPAGKNFPENQILIKRMMIKCADVANPCRPLDLCIEWAGRISEEYFAQTDEEKRQGLPVVMPVFDRNTCSIPKSQISFIDYFITDMFDAWDAFAHLPALMQHLADNYKHWKTLDDLKCKSLRLPSDS

SEQ ID NO: 5624 - protein, 1283 aa, Homo sapiens [sequence omitted]

SEQ ID NO: 5625 - protein, 627 aa, Homo sapiens
MERPEPPPGTAAGQEEQELRERAFFSWAEFSRFFDAWCQQRLALFFVKSSMHLARCRWASAPPLYTLIDVLKYSYVRLVCKDVRAPSRPAVGPPQPGCPAFIIVKLSPLRDRLVVTECQLTHSHPACPLEFAYYFRPGHLLANACLPVRTTNKISKQFVAPADVRRLLSYCKGRDHGVLDALHVLEGLFRTDPEAKVKLVFVEDQAVVETVFFLTSRTRALLRRFPRMLLVDRLPGLQGALDLLAVLCVDGSGRARQAACCVARPGTPSLLRFALASLLQSAPDVKGRVRCLTAGPEVAAQLPAVRQLLPCARVQICRAQGLETLFSKAQELGGAGREDPGLWSRLCRLAGASSPAAYDEALAELHAHGPAAFVDYFERNWEPRRDMWVRFRAFEAARDLDACALVRGHRRRLLRRLSPSRGVAQCLRDLVAMQWADAAGEAVPEGPDGGGPWLEDEPGRGAQGENERVRGLETGDWGGAPKEGSIWRGAQMEKEWARALETRDWGGAQFEGEKGRALQIRDWRGGRLENQKPRGLEGGVLRGSKLEKGHLRGPEIRDWRGPQLEGEKDWGLEGYVWRGSQLEDQALRGLEGYTWRVAQLEDRRSTTDLRGTQFDYERGKGESTEDR

SEQ ID NO: 5626 - protein, 374 aa, Homo sapiens
MDDLCEANGTFAISLFKILGEEDNSRNVFFSPMSISSALAMVFMGAKGSTAAQMSQALCLYKDGDIHRGFQSLLSEVNRTGTQYLLRTANRLFGEKTCDFLPDFKEYCQKFYQAELEELSFAEDTEECRKHINDWVAEKTEGKISEVLDAGTVDPLTKLVLVNAIYFKGKWNEQFDRKYTRGMLFKTNEEKKTVQMMFKEAKFKMGYADEVHTQVLELPYVEEELSMVILLPDDNTDLAVVEKALTYEKFKAWTNSEKLTKSKVQVFLPRLKLEESYDLEPFLRRLGMIDAFDEAKADFSGMSTEKNVPLSKVAHKCFVEVNEEGTEAAAATAVVRNSRCSRMEPRFCADHPFLFFIRHHKTNCILFCGRFSSP

SEQ ID NO: 5627 - protein, 332 aa, Homo sapiens
SIWRGPNVNCTDSSGYTALHHAALNGHKDIVLKLLQYEASTNVADNKGYFPIHLAAWKGDVEIVKILIHHGPSHSRVNEQNNENETALHCAAQYGHSEVVAVLLEELTDPTIRNSKLETPLDLAALYGRLRVVKMIISAHPNLMSCNTRKHTPLHLAARNGHKAVVQVLLEAGMDVSCQTEKGSALHEAALFGKVDVVRVLLETGIDANIKDSLGRTVLDILKEHPSQKSLQIATLLQEYLEGVGRSTVLEEPVQEDATQETHISSPVESPSQKTKSETVTGELSKLLDEIKLCQEKDYSFEDLCHTISDHYLDNLSKISEEELGKNGSQSV

SEQ ID NO: 5628 - protein, 324 aa, Homo sapiens
MDWDDEYSHNSFDLHCLLNSFPGDLEFEQIFSDIDEKIEQNAASIKHCIKEIQSEINKQCPGVQLQTTTDCFEWLTNYNYSTSESSFISHGDLIKFFKTLQDLLKNEQNQEEMTLDLLWDLSCHSSVSFPSTLSGTSFHFLSRTSLHSVEDNSSMDVKSMWDDIRLHLRRFLVSKLQSHNEINNSQQKILLKKQCLQQLLFLYPESEVIIKYQNIQNKLLANLLWNCFPSYNRDSNLDVIAHGYQSTMLKLYSVIKEDFNTLCEILAPSSMVKFIKETYLDTVTEEMAKFLENFCELQFRENAVRVVKTSKSSSKHRGAVHALG

SEQ ID NO: 5629 - protein, 439 aa, Homo sapiens
MVPSSPRALFLLLLILACPEPRASQNCLSKQQLLSAIRQLQQLLKGQETRFAEGIRHMKSRLAALQNSVGRVGPDALPVSCPALNTPADGRKFGSKYLVDHEVHFTCNPGFRLVGPSSVVCLPNGTWTGEQPHCRGISECSSQPCQNGGTCVEGVNQYRCICPPGRTGNRCQHQAQTAAPEGSVAGDSAFSRAPRCAQVERAQHCSCEAGFHLSGAAGDSVCQDVNECELYGQEGRPRLCMHACVNTPGSYRCTCPGGYRTLADGKSCEDVDECVGLQPVCPQGTTCINTGGSFQCVSPECPEGSGNVSYVKTSPFQCERNPCPMDSRPCRHLPKTISFHYLSLPSNLKTPITLFRMATASAPGRAGPNSLRFGIVGGNSRGHFVMQRSDRQTGDLILVQNLEGPQTLEVDVDMSEYLDRSFQANHVSKVTIFVSPYDF

SEQ ID NO: 5630 - protein, 1452 aa, Homo sapiens
MRGLGTCLATLAGLLLTAAGETFSGGCLFDEPYSTCGYSQSEGDDFNWEQVNTLTKPTSDPWMPSGSFMLVNASGRPEGQRAHLLLPQLKENDTHCIDFHYFVSSKSNSPPGLLNVYVKVNNGPLGNPIWNISGDPTRTWNRAELAISTFWPNFYQVIFEVITSGHQGYLAIDEVKVLGHPCTRTPHFLRIQNVEVNAGQFATFQCSAIGRTVAGDRLWLQGIDVRDAPLKEIKVTSSRRFIASFNVVNTTKRDAGKYRCMIRTEGGVGISNYAELVVKEPPVPIAPPQLASVGATYLWIQLNANSINGDGPIVAREVEYCTASGSWNDRQPVDSTSYKIGHLDPDTEYEISVLLTRPGEGGTGSPGPALRTRTKCADPMRGPRKLEVVEVKSRQITIRWEPFGYNVTRCHSYNLTVHYCYQVGGQEQVREEVSWDTENSHPQHTITNLSPYTNVSVKLILMNPEGRKESQELIVQTDEDLPGAVPTESIQGSTFEEKIFLQWREPTQTYGVITLYEITYKAVSSFDPEIDLSNQSGRVSKLGNETHFLFFGLYPGTTYSFTIRASTAKGFGPPATNQFTTKISAPSMPAYELETPLNQTDNTVTVMLKPAHSRGAPVSVYQIVVEEERPRRTKKTTEILKCYPVPIHFQNASLLNSQYYFAAEFPADSLQAAQPFTIGDNKTYNGYWNTPLLPYKSYRIYFQAASRANGETKIDCVQVATKGAATPKPVPEPEKQTDHTVKIAGVIAGILLFVIIFLGVVLVMKKRKLAKKRKETMSSTRQEMTVMVNSMDKSYAEQGTNCDEAFSFMDTHNLNGRSVSSPSSFTMKTNTLSTSVPNSYYPDETHTMASDTSSLVQSHTYKKREPADVPYQTGQLHPAIRVADLLQHITQMKCAEGYGFKEEYESFFEGQSAPWDSAKKDENRMKNRYGNIIAYDHSRVRLQTIEGDTNSDYINGNYIDGYHRPNHYIATQGPMQETIYDFWRMVWHENTASIIMVTNLVEVGRVKCCKYWPDDTEIYKDIKVTLIETELLAEYVIRTFAVEKRGVHEIREIRQFHFTGWPDHGVPYHATGLLGFVRQVKSKSPPSAGPLVVHCSAGAGRTGCFIVIDIMLDMAEREGVVDIYNCVRELRSRRVNMVQTEEQYVFIHDAILEACLCGDTSVPASQVRSLYYDMNKLDPQTNSSQIKEEFRTLNMVTPTLRVEDCSIALLPRNHEKNRCMDILPPDRCLPFLITIDGESSNYINAALMDSYKQPSAFIVTQHPLPNTVKDFWRLVLDYHCTSVVMLNDVDPAQLCPQYWPENGVHRHGPIQVEFVSADLEEDIISRIFRIYNAARPQDGYRMVQQFQFLGWPMYRDTPVSKRSFLKLIRQVDKWQEEYNGGEGRTVVHCLNGGGRSGTFCAISIVCEMLRHQRTVDVFHAVKTLRNNKPNMVDLLDQYKFCYEVALEYLNSG

SEQ ID NO: 5631 - protein, 408 aa, Homo sapiens
MSEHVEPAAPGPGPNGGGGGPAPARGPRTPNLNPNPLINVRDRLFHALFFKMAVTYSRLFPPAFRRLFEFFVLLKALFVLFVLAYIHIVFSRSPINCLEHVRDKWPREGILRVEVRHNSSRAPVFLQFCDSGGRGSFPGLAVEPGSNLDMEDEEEEELTMEMFGNSSIKFELDIEPKVFKPPSSTEALNDSQEFPFPETPTKVWPQDEYIVEYSLEYGFLRLSQATRQRLSIPVMVVTLDPTRDQCFGDRFSRLLLDEFLGYDDILMSSVKGLAENEENKGFLRNVVSGEHYRFVSMWMARTSYLAAFAIMVIFTLSVSMLLRYSHHQIFVFIVDLLQMLEMNMAIAFPAAPLLTVILALVGMEAIMSEFFNDTTTAFYIILIVWLADQYDAICCHTSTSKRHWLRIP

SEQ ID NO: 5632 - protein, 339 aa, Homo sapiens
MLPSAVAAHAGAYWDVVASSALLNLPAAPGFGNLGKSFLIENLLRVGGAPTPRLQPPAPHDPATALATAGAQLRPLPASPVPLKLCPAAEQVSPAGAPYGTRWAFQVLSPSADSARLPGRAPGDRDCTFQPSAPAPSKPFLLSTPPFYSACCGGSCRRPASSTAFPREESMLPLLTQDSNSKARRGILRRAVFSEDQRKALEKMFQKQKYISKTDRKKLAINLGLKESQVKIWFQNRRMKWRNSKEKEVLSNRCIQEVGLQEDPLSRSALGFPSPCPSIWDVPQQHSSPRWRENSPEPSERLIQESSGAPPPEANSLQGALYLCSEEEAGSKGVLTGAV

SEQ ID NO: 5633 - protein, 919 aa, Homo sapiens
MLIHKTEDVNTLDSEKRTPLHVAAFLGDAEIIELLILSGARVNAKDNMWLTPLHRAVASRSEEAVQVLIKHSADVNARDKNWQTPLHVAAANKAVKCAEVIIPLLSSVNVSDRGGRTALHHAALNGHVEMVNLLLAKGANINAFDKKDRRALHWAAYMGHLDVVALLINHGAEVTCKDKKGYTPLHAAASNGQINVVKHLLNLGVEIDEINVYGNTALHIACYNGQDAVVNELIDYGANVNQPNNNGFTPLHFAAASTHGALCLELLVNNGADVNIQSKDGKSPLHMTAVHGRFTRSQTLIQNGGEIDCVDKDGNTPLHVAARYGHELLINTLITSGADTAKCGIHSMFPLHLAALNAHSDCCRKLLSSGFEIDTPDKFGRTCLHAAAAGGNVECIKLLQSSGADFHKKDKCGRTPLHYAAANCHFHCIETLVTTGANVNETDDWGRTALHYAAASDMDRNKTILGNAHDNSEELERARELKEKEATLCLEFLLQNDANPSIRDKEGYNSIHYAAAYGHRQCLELLLERTNSGFEESDSGATKSPLHLAAYNGHHQALEVLLQSLVDLDIRDEKGRTALDLAAFKGHTECVEALINQGASIFVKDNVTKRTPLHASVINGHTLCLRLLLEIADNPEAVDVKDAKGQTPLMLAVAYGHIDAVSLLLEKEANVDTVDILGCTALHRGIMTGHEECVQMLLEQEVSILCKDSRGRTPLHYAAARGHATWLSELLQMALSEEDCCFKDNQGYTPLHWACYNGNENCIEVLLEQKCFRKFIGNPFTPLHCAIINDHGNCASLLLGAIDSSIVSCRDDKGRTPLHAAAFADHVECLQLLLRHSAPVNAVDNSGKTALMMAAENGQAGAVDILVNSAQADLTVKDKDLNTPLHLACSKGHEKCALLILDKIQDESLINEKNNALQT

SEQ ID NO: 5634 - protein, 536 aa, Homo sapiens
MAVGLLKAMYQELVTFRDVAVDFSQEEWDCLDSSQRHLYSNVMLENYRILVSLGLCFSKPSVILLLEQGKAPWMVKRELTKGLCSGWEPICETEELTPKQDFYEEHQSQKIIETLTSYNLEYSSLREEWKCEGYFERQPGNQKACFKEEIITHEEPLFDEREQEYKSWGSFHQNPLLCTQKIIPKEEKVHKHDTQKRSFKKNLMAIKPKSVCAEKKLLKCNDCEKVFSQSSSLTLHQRIHTGEKPYKCIECGKAFSQRSNLVQHQRIHTGEKPYECKECRKAFSQNAHLVQHLRVHTGEKPYECKVCRKAFSQFAYLAQHQRVHTGEKPYECIECGKAFSNRSSIAQHQRVHTGEKPYECNVCGKAFSLRAYLTVHQRIHTGERPYECKECGKAFSQNSHLAQHQRIHTGEKPYKCQECRKAFSQIAYLAQHQRVHTGEKPYECIECGKAFSNDSSLTQHQRVHTGEKPYECTVCGKAFSYCGSLAQHQRIHTGERPYECKECKKTFRQHAHLAHHQRIHIGESLSPPNPVNHQVL

SEQ ID NO: 5635 - protein, 703 aa, Homo sapiens
MERAAPSRRVPLPLLLLGGLALLAAGVDADVLLEACCADGHRMATHQKDCSLPYATESKECRMVQEQCCHSQLEELHCATGISLANEQDRCATPHGDNASLEATFVKRCCHCCLLGRAAQAQGQSCEYSLMVGYQCGQVFQACCVKSQETGDLDVGGLQETDKIIEVEEEQEDPYLNDRCRGGGPCKQQCRDTGDEVVCSCFVGYQLLSDGVSCEDVNECITGSHSCRLGESCINTVGSFRCQRDSSCGTGYELTEDNSCKDIDECESGIHNCLPDFICQNTLGSFRCRPKLQCKSGFIQDALGNCIDINECLSISAPCPIGHTCINTEGSYTCQKNVPNCGRGYHLNEEGTRCVDVDECAPPAEPCGKGHRCVNSPGSFRCECKTGYYFDGISRMCVDVNECQRYPGRLCGHKCENTLGSYLCSCSVGFRLSVDGRSCEDINECSSSPCSQECANVYGSYQCYCRRGYQLSDVDGVTCEDIDECALPTGGHICSYRCINIPGSFQCSCPSSGYRLAPNGRNCQDIDECVTGIHNCSINETCFNIQGGFRCLAFECPENYRRSAATLQQEKTDTVRCIKSCRPNDVTCVFDPVHTISHTVISLPTFREFTRPEEIIFLRAITPPHPASQANIIFDITEGNLRDSFDIIKRYMDGMTVGVVRQVRPIVGPFHAVLKLEMNYVVGGVVSHRNVVNVHIFVSEYWF

SEQ ID NO: 5636 - protein, 313 aa, Homo sapiens
MEGKNLTSISECFLLGFSEQLEEQKPLFGSFLFMYLVTVAGNLLIILVIITDTQLHTPMYFFLANLSLADACFVSTTVPKMLANIQIQSQAISYSGCLLQLYFFMLFVMLEAFLLAVMAYDCYVAICHPLHYILIMSPGLCIFLVSASWIMNALHSLLHTLLMNSLSFCANHEIPHFFCDINPLLSLSCTDPFTNELVIFITGGLTGLICVLCLIISYTNVFSTILKIPSAQGKRKAFSTCSSHLSVVSLFFGTSFCVDFSSPSTHSAQKDTVASVMYTVVTPMLNPFIYSLRNQEIKSSLRKLIWVRKIHSP

SEQ ID NO: 5637 - protein, 430 aa, Homo sapiens
MSLNNSSNVFLDSVPSNTNRFQVSVINENHESSAAADDNTDPPHYEETSFGDEAQKRLRISFRPGNQECYDNFLQSGETAKTDASFHAYDSHTNTYYLQTFGHNTMDAVPKIEYYRNTGSISGPKVNRPSLLEIHEQLAKNVAVTPSSADRVANGDGIPGDEQAENKEDDQAGVVKFGWVKGVLVRCMLNIWGVMLFIRLSWIVGEAGIGLGVLIILLSTMVTSITGLSTSAIATNGFVRGGGAYYLISRSLGPEFGGSIGLIFAFANAVAVAMYVVGFAETVVDLLKESDSMMVDPTNDIRIIGSITVVILLGISVAGMEWEAKAQVILLVILLIAIANFFIGTVIPSNNEKKSRGFFNYQASIFAENFGPRFTKGEGFFSVFAIFFPAATGILAGANISGDLEALRKQGASPLPQGAQSRRRRQTSLI

SEQ ID NO: 5638 - protein, 651 aa, Homo sapiens
MSLPRLLKVNIRTYDNSIPISESSRKSWNQKHFALTFPKPLQRGTNDKSRPLKSQITVTRHDKRKLEEGQKPAHKWIRHSFRKILQWPPIYTAAREQTPFRHLYTSKTHLKKAEYKKSKDEKGGTPLKKDSKKKGGSYATNPESKQIVEEKTKRQNEADKTPLKSSHENEQSKKSKSSSETNPESQNSKTVSKNCSQKDKKDSKNSKKTNTEFLHTKNNPKKDLKRSKTSNDPISEICSENSLNVDFLMLVGQSDDESINFDAWLRNYSQNNSKNYSLKYTKYTKKDTKKNAKKSSDAESEDSKDAKKDSKKVKKNVKKDDKKKDVKKDTESTDAESGDSKDERKDTKKDKKKLKKDDKKKDTKKYPESTDTESGDAKDARNDSRNLKKASKNDDKKKDAKKITFSTDSESELESKESQKDEKKDKKDSKTDNKKSVKNDEESTDADSEPKGDSKKGKKDEKKGKKDSKKDDKKKDAKKNAESTEMESDLELKKDKKHSKEKKGSKKDIKKDARKDTESTDAEFDESSKTGFKTSTKIKGSDTESEESLYKPGAKKKIDESDGTSANSKMEGLESKRGFRMSSKKTTFNEKGEKASTGRVPPSREKPPLPACEPSLPSPKVRRLCWCKMPPPPPKPRYAPLPEAPWIHKLL

SEQ ID NO: 5639 - protein, 315 aa, Homo sapiens
MTTHRNDTLSTEASDFLLNCFVRSPSWQHWLSLPLSLLFLLAVGANTTLLMTIWLEASLHQPLYYLLSLLSLLDIVLCLTVIPKVLTIFWFDLRPISFPACFLQMYIMNCFLAMESCTFMVMAYDRYVAICHPLRYPSIITDHFVVKAAMFILTRNVLMTLPIPILSAQLRYCGRNVIENCICANMSVSRLSCDDVTINHLYQFAGGWTLLGSDLILIFLSYTFILRAVLRLKAEGAVAKALSTCGSHFMLILFFSTILLVFVLTHVAKKKVSPDVPVLLNVLHHVIPAALNPIIYGVRTQEIKQGMQRLLKKGC

SEQ ID NO: 5640 - protein, 197 aa, Homo sapiens
MSARAPKELRLALPPCLLNRTFASPNASGSGNTGARGPGAVGSGTCITQVGQQLFQSFSSTLVLIVLVTLIFCLIVLSLSTFHIHKRRMKKRKMQRAQEEYERDHCSGSRGGGGLPRPGRQAPTHAKETRLERQPRDSPFCAPSNASSLSSSSPGLPCQGPCAPPPPPPASSPQGAHAASSCLDTAGEGLLQTVVLS

SEQ ID NO: 5641 - protein, 676 aa, Homo sapiens
MAPFLRIAFNSYELGSLQAEDEANQPFCAVKMKEALSTERGKTLVQKKPTMYPEWKSTFDAHIYEGRVIQIVLMRAAEEPVSEVTVGVSVLAERCKKNNGKAEFWLDLQPQAKVLMSVQYFLEDVDCKQSMRSEDEAKFPTMNRRGAIKQAKIHYIKNHEFIATFFGQPTFCSVCKDFVWGLNKQGYKCRQCNAAIHKKCIDKIIGRCTGTAANSRDTIFQKERFNIDMPHRFKVHNYMSPTFCDHCGSLLWGLVKQGLKCEDCGMNVHHKCREKVANLCGINQKLLAEALNQVTQRASRRSDSASSEPVGIYQGFEKKTGVAGEDMQDNSGTYGKIWEGSSKCNINNFIFHKVLGKGSFGKVLLGELKGRGEYFAIKALKKDVVLIDDDVECTMVEKRVLTLAAENPFLTHLICTFQTKDHLFFVMEFLNGGDLMYHIQDKGRFELYRATFYAAEIMCGLQFLHSKGIIYRDLKLDNVLLDRDGHIKIADFGMCKENIFGESRASTFCGTPDYIAPEILQGLKYTFSVDWWSFGVLLYEMLIGQSPFHGDDEDELFESIRVDTPHYPRWITKESKDILEKLFEREPTKRLGVTGNIKIHPFFKTINWTLLEKRRLEPPFRPKVKSPRDYSNFDQEFLNEKARLSYSDKNLIDSMDQSAFAGFSFVNPKFEHLLED

SEQ ID NO: 5642 - protein, 501 aa, Homo sapiens
MSFPQLGYQYIRPLYPSERPGAAGGSGGSAGARGGLGAGASELNASGSLSNVLSSVYGAPYAAAAAAAAAQGYGAFLPYAAELPIFPQLGAQYELKDSPGVQHPAAAAAFPHPHPAFYPYGQYQFGDPSRPKNATRESTSTLKAWLNEHRKNPYPTKGEKIMLAIITKMTLTQVSTWFANARRRLKKENKMTWAPRSRTDEEGNAYGSEREEEDEEEDEEDGKRELELEEEELGGEEEDTGGEGLADDDEDEEIDLENLDGAATEPELSLAGAARRDGDLGLGPISDSKNSDSEDSSEGLEDRPLPVLSLAPAPPPVAVASPSLPSPPVSLDPCAPAPAPASALQKPKIWSLAETATSPDNPRRSPPGAGGSPPGAAVAPSALQLSPAAAAAAAHRLVSAPLGKFPAWTNRPFPGPPPGPRLHPLSLLGSAPPHLLGLPGAAGHPAAAAAFARPAEPEGGTDRCSALEVEKKLLKTAFQPVPRRPQNHLDAALVLSALSSS

SEQ ID NO: 5643 - protein, 519 aa, Homo sapiens
MDADEGQDMSQVSGKESPPVSDTPDEGDEPMPIPEDLSTTSGGQQSSKSDRVVASNVKVETQSDEENGRACEMNGEECAEDLRMLDASGEKMNGSHRDQGSSALSGVGGIRLPNGKLKCDICGIICIGPNVLMVHKRSHTGERPFQCNQCGASFTQKGNLLRHIKLHSGEKPFKCHLCNYACRRRDALTGHLRTHSVGKPHKCGYCGRSYKQRSSLEEHKERCHNYLESMGLPGTLYPVIKEETNHSEMAEDLCKIGSERSLVLDRLASNVAKRKSSMPQKFLGDKGLSDTPYDSSASYEKENEMMKSHVMDQAINNAINYLGAESLRPLVQTPPGGSEVVPVISPMYQLHKPLAEGTPRSNHSAQDSAVENLLLLSKAKLVPSEREASPSNSCQDSTDTESNNEEQRSGLIYLTNHIAPHARNGLSLKEEHRAYDLLRAASENSQDALRVVSTSGEQMKVYKCEHCRVLFLDHVMYTIHMGCHGFRDPFECNMCGYHSQDRYEFSSHITRGEHRFHMS

SEQ ID NO: 5644 - protein, 967 aa, Homo sapiens
MAVALDSQIDAPLEVEGCLIMKVEKDPEWASEPILEGSDSSETFRKCFRQFCYEDVTGPHEAFSKLWELCCRWLKPEMRSKEQILELLVIEQFLTILPEKIQAWAQKQCPQSGEEAVALVVHLEKETGRLRQQVSSPVHREKHSPLGAAWEVADFQPEQVETQPRAVSREEPGSLHSGHQEQLNRKRERRPLPKNARPSPWVPALADEWNTLDQEVTTTRLPAGSQEPVKDVHVARGFSYRKSVHQIPAQRDLYRDFRKENVGNVVSLGSAVSTSNKITRLEQRKEPWTLGLHSSNKRSILRSNYVKEKSVHAIQVPARSAGKTWREQQQWGLEDEKIAGVHWSYEETKTFLAILKESRFYETLQACPRNSQVYGAVAEWLRECGFLRTPEQCRTKFKSLQKSYRKVRNGHMLEPCAFFEDMDALLNPAARAPSTDKPKEMIPVPRLKRIAISAKEHISLVEEEEAAEDSDDDEIGIEFIRKSEIHGAPVLFQNLSGVHWGYEETKTFLDILRETRFYEALQACHRKSKLYGAVAEQLRECGFLRTPEQCRTKFKSLQKSYRKVKNGHVLESCAFYKEMDALINSRASAPSPSTPEEVPSPSRQERGGIEVEPQEPTGWEPEETSQEAVIEDSCSERMSEEEIVQEPEFQGPPGLLQSPNDFEIGSSIKEDPTQIVYKDMEQHRALIEKSKRVVSQSTDPSKYRKRECISGRQWENLQGIRQGKPMSQPRDLGKAVVHQRPFVGKRPYRLLKYGESFGRSTRLMCRMTHHKENPYKCGVCGKCFGRSRSLIRHQRIHTGEKPFKCLDCGKSFNDSSNFGAHQRIHTGEKPYRCGECGKCFSQSSSLIIHQRTHTGEKPYQCGECGKSFTNSSHFSAHRRVHTGENPYKCVDCEKSFNNCTRFREHRRIHTGEKPYGCAQCGKRFSKSSVLTKHREVHVREKPLPHPPSLYCPENPHKGKTDEFRKTF

SEQ ID NO: 5645 - protein, 719 aa, Homo sapiens
MASSSGRVTIQLVDEEAGVGAGRLQLFRGQSYEAIRAACLDSGILFRDPYFPAGPDALGYDQLGPDSEKAKGVKWMRPHEFCAEPKFICEDMSRTDVCQGSLGNCWFLAAAASLTLYPRLLRRVVPPGQDFQHGYAGVFHFQLWQFGRWMDVVVDDRLPVREGKLMFVRSEQRNEFWAPLLEKAYAKLHGSYEVMRGGHMNEAFVDFTGGVGEVLYLRQNSMGLFSALRHALAKESLVGATALSDRGEYRTEEGLVKGHAYSITGTHKVFLGFTKVRLLRLRNPWGCVEWTGAWSDSCPRWDTLPTECRDALLVKKEDGEFWMELRDFLLHFDTVQICSLSPEVLGPSPEGGGWHVHTFQGRWVRGFNSGGSQPNAETFWTNPQFRLTLLEPDEEDDEDEEGPWGGWGAAGARGPARGGRTPKCTVLLSLIQRNRRRLRAKGLTYLTVGFHVFQIPEELLGLWDSPRSHALLPRLLRADRSPLSARRDVTRRCCLRPGHYLVVPSTAHAGDEADFTLRVFSERRHTAVEIDDVISADLQSLQGPYLPLELGLEQLFQELAGEEEELNASQLQALLSIALEPARAHTSTPREIGLRTCEQLLQCFGHGQSLALHHFQQLWGYLLEWQAIFNKFDEDTSGTMNSYELRLALNAAGFHLNNQLTQTLTSRYRDSRLRVDFERFVSCVAHLTCIFCHCSQHLDGGEGVICLTHRQWMEVATFS

SEQ ID NO: 5646 - protein, 1170 aa, Homo sapiens
MDEETRHSLECIQANQIFPRKQLIREDENLQVPFLELHGESTEFVGRAEDAIIALSNYRLHIKFKESLVNVPLQLIESVECRDIFQLHLTCKDCKVIRCQFSTFEQCQEWLKRLNNAIRPPAKIEDLFSFAYHAWCMEVYASEKEQHGDLCRPGEHVTSRFKNEVERMGFDMNNAWRISNINEKYKLCGSYPQELIVPAWITDKELESVSSFRSWKRIPAVIYRHQSNGAVIARCGQPEVSWWGWRNADDEHLVQSVAKACASDSRSSGSKLSTRNTSRDFPNGGDLSDVEFDSSLSNASGAESLAIQPQKLLILDARSYAAAVANRAKGGGCECPEYYPNCEVVFMGMANIHSIRRSFQSLRLLCTQMPDPGNWLSALESTKWLHHLSVLLKSALLVVHAVDQDQRPVLVHCSDGWDRTPQIVALAKLLLDPYYRTIEGFQVLVEMEWLDFGHKFADRCGHGENSDDLNERCPVFLQWLDCVHQLQRQFPCSFEFNEAFLVKLVQHTYSCLFGTFLCNNAKERGEKHTQERTCSVWSLLRAGNKAFKNLLYSSQSEAVLYPVCHVRNLMLWSAVYLPCPSPTTPVDDSCAPYPAPGTSPDDPPLSRLPKTRSYDNLTTACDNTVPLASRRCSDPSLNEKWQEHRRSLELSSLAGPGEDPLSADSLGKPTRVPGGAELSVAAGVAEGQMENILQEATKEESGVEEPAHRAGIEIQEGKEDPLLEKESRRKTPEASAIGLHQDPELGDAALRSHLDMSWPLFSQGISEQQSGLSVLLSSLQVPPRGEDSLEVPVEQFRIEEIAEGREEAVLPIPVDAKVGYGTSQSCSLLPSQVPFETRGPNVDSSTDMLVEDKVKSVSGPQGHHRSCLVNSGKDRLPQTMEPSPSETSLVERPQVGSVVHRTSLGSTLSLTRSPCALPLAECKEGLVCNGAPETENRASEQPPGLSTLQMYPTPNGHCANGEAGRSKDSLSRQLSAMSCSSAHLHSRNLHHKWLHSHSGRPSATSSPDQPSRSHLDDDGMSVYTDTIQQRLRQIESGHQQEVETLKKQVQELKSRLESQYLTSSLHFNGDFGDEVMTRWLPDHLAAHCYACDSAFWLASRKHHCRDTDRVDQTWNCGNVFCSSCCNQKVPVPSQQLFEPSRVCKSCYSSLHPTSSSIDLELDKPIAATSN

SEQ ID NO: 5647 - protein, 797 aa, Homo sapiens
MQDGNFLLSALQPEAGVCSLALPSDLQLDRRGAEGPEAERLRAARVQEQVRARLLQLGQQPRHNGAAEPEPEAETARGTSRGQYHTLQAGFSSRSQGLSGDKTSGFRPIAKPAYSPASWSSRSAVDLSCSRRLSSAHNGGSAFGAAGYGGAQPTPPMPTRPVSFHERGGVGSRADYDTLSLRSLRLGPGGLDDRYSLVSEQLEPAATSTYRAFAYERQASSSSSRAGGLDWPEATEVSPSRTIRAPAVRTLQRFQSSHRSRGVGGAVPGAVLEPVARAPSVRSLSLSLADSGHLPDVHGFNSYGSHRTLQRLSSGFDDIDLPSAVKYLMASDPNLQVLGAAYIQHKCYSDAAAKKQARSLQAVPRLVKLFNHANQEVQRHATGAMRNLIYDNADNKLALVEENGIFELLRTLREQDDELRKNVTGILWNLSSSDHLKDRLARDTLEQLTDLVLSPLSGAGGPPLIQQNASEAEIFYNATGFLRNLSSASQATRQKMRECHGLVDALVTSINHALDAGKCEDKSVENAVCVLRNLSYRLYDEMPPSALQRLEGRGRRDLAGAPPGEVVGCFTPQSRRLRELPLAADALTFAEVSKDPKGLEWLWSPQIVGLYNRLLQRCELNRHTTEAAAGALQNITAGDRRWAGVLSRLALEQERILNPLLDRVRTADHHQLRSLTGLIRNLSRNARNKDEMSTKVVSHLIEKLPGSVGEKSPPAEVLVNIIAVLNNLVVASPIAARDLLYFDGLRKLIFIKKKRDSPDSEKSSRAASSLLANLWQYNKLHRDFRAKGYRKEDFLGP

SEQ ID NO: 5648 - protein, 375 aa, Homo sapiens
MDAIHIGMSSTPLVKHTAGAGLKANRPRVMSKSGHSNVRIDKVDGIYLLYLQDLWTTVIDMKWRYKLTLFAATFVMTWFLFGVIYYAIAFIHGDLEPGEPISNHTPCIMKVDSLTGAFLFSLESQTTIGYGVRSITEECPHAIFLLVAQLVITTLIEIFITGTFLAKIARPKKRAETIKFSHCAVITKQNGKLCLVIQVANMRKSLLIQCQLSGKLLQTHVTKEGERILLNQATVKFHVDSSSESPFLILPMTFYHVLDETSPLRDLTPQNLKEKEFELVVLLNATVESTSAVCQSRTSYIPEEIYWGFEFVPVVSLSKNGKYVADFSQFEQIRKSPDCTFYCADSEKQQLEEKYRQEDQRERELRTLLLQQSNV

SEQ ID NO: 5649 - protein, 600 aa, Homo sapiens
MASTDYSTYSQAAAQQGYSAYTAQPTQGYAQTTQAYGQQSYGTYGQPTDVSYTQAQTTATYGQTAYATSYGQPPTGYTTPTAPQAYSQPVQGYGTGAYDTTTATVTTTQASYAAQSAYGTQPAYPAYGQQPAATAPTSYSSTQPTSYDQSSYSQQNTYGQPSSYGQQSSYGQQSSYGQQPPTSYPPQTGSYSQAPSQYSQQSSSYGQQSSFRQDHPSSMGVYGQESGGFSGPGENRSMSGPDNRGRGRGGFDRGGMSRGGRGGGRGGMGSAGERGGFNKPGGPMDEGPDLDLGPPVDPDEDSDNSAIYVQGLNDSVTLDDLADFFKQCGVVKMNKRTGQPMIHIYLDKETGKPKGDATVSYEDPPTAKAAVEWFDGKDFQGSKLKVSLARKKPPMNSMRGGLPPREGRGMPPPLRGGPGGPGGPGGPMGRMGGRGGDRGGFPPRGPRGSRGNPSGGGNVQHRAGDWQCPNPGCGNQNFAWRTECNQCKAPKPEGFLPPPFPPPGGDRGRGGPGGMRGGRGGLMDRGGPGGMFRGGRGGDRGGFRGGRGMDRGGFGGGRRGGPGGPPGPLMEQMGGRRGGRGGPGKMDKGEHRQERRDRPY

SEQ ID NO: 5650 - protein, 1196 aa, Homo sapiens
MPVRRGHVAPQNTFLGTIIRKFEGQNKKFIIANARVQNCAIIYCNDGFCEMTGFSRPDVMQKPCTCDFLHGPETKRHDIAQIAQALLGSEERKVEVTYYHKNGSTFICNTHIIPVKNQEGVAMMFIINFEYVTDNENAATPERVNPILPIKTVNRKFFGFKFPGLRVLTYRKQSLPQEDPDVVVIDSSKHSDDSVAMKHFKSPTKESCSPSEADDTKALIQPSKCSPLVNISGPLDHSSPKRQWDRLYPDMLQSSSQLSHSRSRESLCSIRRASSVHDIEGFGVHPKNIFRDRHASEDNGRNVKGPFNHIKSSLLGSTSDSNLNKYSTINKIPQLTLNFSEVKTEKKNSSPPSSDKTIIAPKVKDRTHNVTEKVTQVLSLGADVLPEYKLQTPRINKFTILHYSPFKAVWDWLILLLVIYTAIFTPYSAAFLLNDREEQKRRECGYSCSPLNVVDLIVDIMFIIDILINFRTTYVNQNEEVVSDPAKIAIHYFKGWFLIDMVAAIPFDLLIFGSGSDETTTLIGLLKTARLLRLVRVARKLDRYSEYGAAVLMLLMCIFALIAHWLACIWYAIGNVERPYLTDKIGWLDSLGQQIGKRYNDSDSSSGPSIKDKYVTALYFTFSSLTSVGFGNVSPNTNSEKIFSICVMLIGSLMYASIFGNVSAIIQRLYSGTARYHMQMLRVKEFIRFHQIPNPLRQRLEEYFQHAWTYTNGIDMNMVLKGFPECLQADICLHLNQTLLQNCKAFRGASKGCLRALAMKFKTTHAPPGDTLVHCGDVLTALYFLSRGSIEILKDDIVVAILGKNDIFGEMVHLYAKPGKSNADVRALTYCDLHKIQREDLLEVLDMYPEFSDHFLTNLELTFNLRHESAKADLLRSQSMNDSEGDNCKLRRRKLSFESEGEKENSTNDPEDSADTIRHYQSSKRHFEEKKSRSSSFISSIDDEQKPLFSGIVDSSPGIGKASGLDFEETVPTSGRMHIDKRSHSCKDITDMRSWERENAHPQPEDSSPSALQRAAWGISETESDLTYGEVEQRLDLLQEQLNRLESQMTTDIQTILQLLQKQTTVVPPAYSMVTAGSEYQRPIIQLMRTSQPEASIKTDRSFSPSSQCPEFLDLEKSKLKSKESLSSGVHLNTASEDNLTSLLKQDSDLSLELHLRQRKTYVHPIRHPSLPDSSLSTVGIVGLHRHVSDPGLPGK

SEQ ID NO: 5651 - protein, 190 aa, Homo sapiens
MEPEAAAGARKARGRGCHCPGDAPWRPPPPRGPESPAPWRPWIQTPGDAELTRTGRPLEPRADQHTFGSKGAFGFQHPVRVYLPMSKRQEYLRSSGEQVLASFPVQATIDFYDDESTESASEAEEPEEGPPPLHLLPQEVGGRQENGPGGKGRDQGINQGQRSSGGGDHWGEGPLPQGVSSRGGKCSSSK

SEQ ID NO: 5652 - protein, 610 aa, Homo sapiens
MIASQFLSALTLVLLIKESGAWSYNTSTEAMTYDEASAYCQQRYTHLVAIQNKEEIEYLNSILSYSPSYYWIGIRKVNNVWVWVGTQKPLTEEAKNWAPGEPNNRQKDEDCVEIYIKREKDVGMWNDERCSKKKLALCYTAACTNTSCSGHGECVETINNYTCKCDPGFSGLKCEQIVNCTALESPEHGSLVCSHPLGNFSYNSSCSISCDRGYLPSSMETMQCMSSGEWSAPIPACNVVECDAVTNPANGFVECFQNPGSFPWNTTCTFDCEEGFELMGAQSLQCTSSGNWDNEKPTCKAVTCRAVRQPQNGSVRCSHSPAGEFTFKSSCNFTCEEGFMLQGPAQVECTTQGQWTQQIPVCEAFQCTALSNPERGYMNCLPSASGSFRYGSSCEFSCEQGFVLKGSKRLQCGPTGEWDNEKPTCEAVRCDAVHQPPKGLVRCAHSPIGEFTYKSSCAFSCEEGFELHGSTQLECTSQGQWTEEVPSCQVVKCSSLAVPGKINMSCSGEPVFGTVCKFACPEGWTLNGSAARTCGATGHWSGLLPTCEAPTESNIPLVAGLSAAGLSLLTLAPFLLWLRKCLRKAKKFVPASSCQSLESDGSYQKPSYIL

SEQ ID NO: 5653 - protein, 364 aa, Homo sapiens
MLRFLPDLAFSFLLILALGQAVQFQEYVFLQFLGLDKAPSPQKFQPVPYILKKIFQDREAAATTGVSRDLCYVKELGVRGNVLRFLPDQGFFLYPKKISQASSCLQKLLYFNLSAIKEREQLTLAQLGLDLGPNSYYNLGPELELALFLVQEPHVWGQTTPKPGKMFVLRSVPWPQGAVHFNLLDVAKDWNDNPRKNFGLFLEILVKEDRDSGVNFQPEDTCARLRCSLHASLLVVTLNPDQCHPSRKRRAAIPVPKLSCKNLCHRHQLFINFRDLGWHKWIIAPKGFMANYCHGECPFSLTISLNSSNYAFMQALMHAVDPEIPQAVCIPTKLSPISMLYQDNNDNVILRHYEDMVVDECGCG

SEQ ID NO: 5654 - protein, 329 aa, Homo sapiens
MPKLNSTFVTEFLFEGFSSFRRQHKLVFFVVFLTLYLLTLSGNVIIMTIIRLDHHLHTPMYFFLCMLSISETCYTVAIIPHMLSGLLNPHQPIATQSCATQLFFYLTFGINNCFLLTVMGYDRYVAICNPLRYSVIMGKRACIQLASGSLGIGLGMAIVQVTSVFGLPFCDAFVISHFFCDVRHLLKLACTDTTVNEIINFVVSVCVLVLPMGLVFISYVLIISTILKIASAEGQKKAFATCASHLTVVIIHYGCASIIYLKPKSQSSLGQDRLISVTYTHHSPTEPCCVQPEEQGGQRCSAQSRGAKNSVSLMKRGCEGFSFAFINMY

SEQ ID NO: 5655 - protein, 474 aa, Homo sapiens
MALAPERAAPRVLFGEWLLGEISSGCYEGLQWLDEARTCFRVPWKHFARKDLSEADARIFKAWAVARGRWPPSSRGGGPPPEAETAERAGWKTNFRCALRSTRRFVMLRDNSGDPADPHKVYALSRELCWREGPGTDQTEAEAPAAVPPPQGGPPGPFLAHTHAGLQAPGPLPAPAGDKGDLLLQAVQQSCLADHLLTASWGADPVPTKAPGEGQEGLPLTGACAGGEAAAPESPHQAEPYLSPSPSACTAVQEPSPGALDVTIMYKGRTVLQKVVGHPSCTFLYGPPDPAVRATDPQQVAFPSPAELPDQKQLRYTEELLRHVAPGLHLELRGPQLWARRMGKCKVYWEVGGPPGSASPSTPACLLPRNCDTPIFDFRVFFQELVEFRARQRRGSPRYTIYLGFGQDLSAGRPKEKSLVLVKLEPWLCRVHLEGTQREGVSSLDSSSLSLCLSSANSLYDDIECFLMELEQPA

SEQ ID NO: 5656 - protein, 322 aa, Homo sapiens
MNSLKDGNHTALTGFILLGLTDDPILRVILFMIILSGNLSIIILIRISSQLHHPMYFFLSHLAFADMAYSSSVTPNMLVNFLVERNTVSYLGCAIQLGSAAFFATVECVLLAAMAYDRFVAICSPLLYSTKMSTQVSVQLLLVVYIAGFLIAVSYTTSFYFLLFCGPNQVNHFFCDFAPLLELSCSDISVSTVVLSFSSGSIIVVTVCVIAVCYIYILITILKMRSTEGHHKAFSTCTSHLTVVTLFYGTITFIYVMPNFSYSTDQNKVVSVLYTVVIPMLNPLIYSLRNKEIKGALKRELVRKILSHDACYFSRTSNNDIT

SEQ ID NO: 5657 - protein, 678 aa, Homo sapiens
MAPSLSPGPAALRRAPQLLLLLLAAECALAALLPAREATQFLRPRQRRAFQVFEEAKQGHLERECVEELCSREEAREVFENDPETDYFYPRYLDCINKYGSPYTKNSGFATCVQNLPDQCTPNPCDRKGTQACQDLMGNFFCLCKAGWGGRLCDKDVNECSQENGGCLQICHNKPGSFHCSCHSGFELSSDGRTCQDIDECADSEACGEARCKNLPGSYSCLCDEGFAYSSQEKACRDVDECLQGRCEQVCVNSPGSYTCHCDGRGGLKLSQDMDTCEDILPCVPFSVAKSVKSLYLGRMFSGTPVIRLRFKRLQPTRLVAEFDFRTFDPEGILLFAGGHQDSTWIVLALRAGRLELQLRYNGVGRVTSSGPVINHGMWQTISVEELARNLVIKVNRDAVMKIAVAGDLFQPERGLYHLNLTVGGIPFHEKDLVQPINPRLDGCMRSWNWLNGEDTTIQETVKVNTRMQCFSVTERGSFYPGSGFAFYSLDYMRTPLDVGTESTWEVEVVAHIRPAADTGVLFALWAPDLRAVPLSVALVDYHSTKKLKKQLVVLAVEHTALALMEIKVCDGQEHVVTVSLRDGEATLEVDGTRGQSEVSAAQLQERLAVLERHLRSPVLTFAGGLPDVPVTSAPVTAFYRGCMTLEVNRRLLDLDEAAYKHSDITAHSCPPVEPAAA

SEQ ID NO: 5658 - protein, 514 aa, Homo sapiens
MAAAESGNSGTPARSPVLPRVCDPGGLTQSADSWGLRAPGTSSPARLRETVPTQVDKGDLVALSLPAGHGDTDGPISLDVPDGAPDPQRTKAAIDHLHQKILKITEQIKIEQEARDDNVAEYLKLANNADKQQVSRIKQVFEKKNQKSAQTIAQLHKKLEHYRRRLKEIEQNGPSRQPKDVLRDMQQGLKDVGANVRAGISGFGGGVVEGVKGSLSGLSQATHTAVVSKPREFASLIRNKFGSADNIAHLKDPLEDGPPEEAARALSGSATLVSSPKYGSDDECSSASASSAGAGSNSGAGPGGALGSPKSNALYGAPGNLDALLEELREIKEGQSHLEDSMEDLKTQLQRDYTYMTQCLQEERYRYERLEEQLNDLTELHQNEMTNLKQELASMEEKVAYQSYERARDIQEAVESCLTRVTKLELQQQQQQVVQLEGVENANARALLGKFINVILALMAVLLVFVSTIANFITPLMKTRLRITSTTLLVLVLFLLWKHWDSLTYLLEHVLLPS

SEQ ID NO: 5659 - protein, 2151 aa, Homo sapiens
MLSSGVETQPVPLDSSMSAVVQELYSELPVSVSRELHADPEPSVIPDVKPGASSSLLSQNRALPLELQRTHVESCCEETYETLDHGSEPGRCGLVDSTAGGSVASGILDRAKRSESMEPKVFRDPGGQAGIIREPSEGAKEDPHQHSTAAEEKTSPSQEDLLMQSSKELSHVDLPEDFLRSKEGNVQITAETLLKSAEVQGMKVNGTKTDNNEGHKNGNVSKDLSAGCGEFQEVDKIMTSDEVSETSTLVTPEPLTFVDPVLTEATPKEKECEELKSCPWLSLPGNSAISNVDNGKEELCKPNLVCEADDNHQQLHGHHNEQPSSTHDSPTATSPLKENSEVSCFTSDLSGPESRTISLENCGFEGGGLLKRSAEKTDSSYFYRGDDQGKNLASREENEERLLIPRSERGGPFLFNAREPEKEISGRCSGEKEPVVSPKENIHNNCIQDSLHTGNSSSLMPNSFTEATEVMLNKNDLKITVHVQGNLTNPEDHKETFTNMSHPGGHSEESSFSSLMQIEEAGQTTPVEPNILSKSFYTKDCNSLVSIQRNLEGNTQLNEASCNDFLFERKSIVSLMPEDQISPVSEVLKPKQGTALLLPSPEFDYRPESEKVIQTSHDDIPLLDEQSIACEMNELSCTNELVVNKVESECVLNQQVSLNSQEHANLPTDSLLHLNKEMPLATGRDAHQSHHPPLEGRADVIADIQTIPIQTKIKDISPPGNQTCGASSNCPTLNIKPVSLERKKEMADSGTKALHSRLRSNKREAAGFPQVVSVIECHSVQSQDISSCHRVRKNVSQENMCSASAAFKSSKISLQVDNSLITKYENAFQHRDHCCQGTGHSVEKSSCKVSYTSQERELDGKETNGSLPGDKIRNKMVAGLLNSGISNKTIHTSSSIKLSEEGLEGKEQDVSKETVFCKYNISDHAIQELNQTVNIPGPEKVLDQSPTVMFSSFKNVKSVETLDQKADEVLDCQSNQNRPDECKSEGQSAKEMLSSDQRETVTEPHGEVNHNQKDLLVSSGSNNSLPCGSPKKCNLKGAFVKMSGCDESTEGMVDIVYTDCSNKLAEGVLDVKASNLLDCGARQEKLAFQEDSRSTLSRRELDAAHTGTTGQDSDFPVTAASTVDFLKIKKSCEENVCRSLKDCEMEKCPDSCAHEMESVADHEPNKRILGRVNLSLNDSHYGQQDKGTSLRETQEMTEGSRLEPNSEFGKESTFGISSKESMSCHDESSVSLRSLKSIEIMPSQENSETNVNSEETDLKNLCKPKDGEMLCENVKDCTVLPEMKEIVSRDWSNSSDRDSVCTCVEKNACKACHPHENSSDRHLPLTVKTDIKVKGEETEEHQRGRLGYLTVGEQSEELVTRETGDGDPVSNISQTHFKCRGILNHAEKQQSPEVLDYMLQKEEKYIRQQKAHTISQQCISSSLLLDDAQNQNQPKADKDESTMINEITLAKLAKDSIVAQTQKLEDQKEERLHHPLRKDTESCTSPCLLGAPRKAQDPSSAGCDQIHGAFAKKGVLPLKKQPHRTCKKVSYQEQIIVGRKIGKIRSSAFLKSSSNPIPTKAHRLLSLCTLSAPTRLEPETAPTKSLVSHIPKQMSTPCHPLRSLNFRKTTKESALLNKLSILASKLAPAMKTQKLRYRRCSSELLPMAKSYKRLRYKRLLDGFSSSTEQLNPYLAASGWDKRPNSKPMALYSLESIKMTFIDLSNKMPSLLFGSEIFPVSFHVKSSSSDCTTESSRTFPEHCAPARLALGEALQCPSQPPKWTFSFFLSHGCPGMATFREDTGVHSQTHTQAPPQPPAPLQDYGGTAIVQTRADCSVLGLHTLLALCSPGCYRIWTKKRSFSSHMPTMQRLFMTQFTQGLKGLRSPASIADKVFCSLPYSVGRVLSIWSQHGPSVCSFEISSLHSPHCKRQPSLGTTSSHTMLPYVPLPGMEATYNTSGSQTRLEPPFPALVPKSCLVAESAVSKLLLSASEFQVRGLDELDGVKAACPCPQSSPPEQKEAEPEKRPKKVSQIRIRKTIPRPDPNLTPMGLPRPKRLKKKEFSLEEIYTNKNYKSPPANRCLETIFEEPKERNGTLISISQQKRKRVLEFQDFTVPRKRRARGKVKVAGSFTRAQKAAVQSRELDALLIQKLMELETFFAKEEEQEQSSGC

SEQ ID NO: 5660 - protein, 991 aa, Homo sapiens
MAESFFSDFGLLWYLKELRKEEFWKFKELLKQPLEKFELKPIPWAELKKASKEDVAKLLDKHYPGKQAWEVTLNLFLQINRKDLWTKAQEEMRNKLNPYRKHMKETFQLIWEKETCLHVPEHFYKETMKNEYKELNDAYTAAARRHTVVLEGPDGIGKTTLLRKVMLDWAEGNLWKDRFTFVFFLNVCEMNGIAETSLLELLSRDWPESSEKIEDIFSQPERILFIMDGFEQLKFNLQLKADLSDDWRQRQPMPIILSSLLQKKMLPESSLLIALGKLAMQKHYFMLRHPKLIKLLGFSESEKKSYFSYFFGEKSKALKVFNFVRDNGPLFILCHNPFTCWLVCTCVKQRLERGEDLEINSQNTTYLYASFLTTVFKAGSQSFPPKVNRARLKSLCALAAEGIWTYTFVFSHGDLRRNGLSESEGVMWVGMRLLQRRGDCFAFMHLCIQEFCAAMFYLLKRPKDDPNPAIGSITQLVRASVVQPQTLLTQVGIFMFGISTEEIVSMLETSFGFPLSKDLKQEITQCLESLSQCEADREAIAFQELFIGLFETQEKEFVTKVMNFFEEVFIYIGNIEHLVIASFCLKHCQHLTTLRMCVENIFPDDSGCISDYNEKLVYWRELCSMFITNKNFQILDMENTSLDDPSLAILCKALAQPVCKLRKLIFTSVYFGHDSELFKAVLHNPHLKLLSLYGTSLSQSDIRHLCETLKHPMCKIEELILGKCDISSEVCEDIASVLACNSKLKHLSLVENPLRDEGMTLLCEALKHSHCALERLMLMYCCLTSVSCDSISEVLLCSKSLSLLDLGSNALEDNGVASLCAALKHPGCSIRELWLMGCFLTSDSCKDIAAVLICNGKLKTLKLGHNEIGDTGVRQLCAALQHPHCKLECLGLQTCPITRACCDDIAAALIACKTLRSLNLDWIALDADAVVVLCEALSHPDCALQMLGLHKSGFDEETQKILMSVEEKIPHLTISHGPWIDEEYKIRGVLL

SEQ ID NO: 5661 - protein, 841 aa, Homo sapiens
MLLCTARLVGLQLLISCCWAFACHSTESSPDFTLPGDYLLAGLFPLHSGCLQVRHRPEVTLCDRSCSFNEHGYHLFQAMRLGVEEINNSTALLPNITLGYQLYDVCSDSANVYATLRVLSLPGQHHIELQGDLLHYSPTVLAVIGPDSTNRAATTAALLSPFLVPMISYAASSETLSVKRQYPSFLRTIPNDKYQVETMVLLLQKFGWTWISLVGSSDDYGQLGVQALENQATGQGICIAFKDIMPFSAQVGDERMQCLMRHLAQAGATVVVVFSSRQLARVFFESVVLTNLTGKVWVASEAWALSRHITGVPGIQRIGMVLGVAIQKRAVPGLKAFEEAYARADKKAPRPCHKGSWCSSNQLCRECQAFMAHTMPKLKAFSMSSAYNAYRAVYAVAHGLHQLLGCASGACSRGRVYPWQLLEQIHKVHFLLHKDTVAFNDNRDPLSSYNIIAWDWNGPKWTFTVLGSSTWSPVQLNINETKIQWHGKDNQVPKSVCSSDCLEGHQRVVTGFHHCCFECVPCGAGTFLNKSDLYRCQPCGKEEWAPEGSQTCFPRTVVFLALREHTSWVLLAANTLLLLLLLGTAGLFAWHLDTPVVRSAGGRLCFLMLGSLAAGSGSLYGFFGEPTRPACLLRQALFALGFTIFLSCLTVRSFQLIIIFKFSTKVPTFYHAWVQNHGAGLFVMISSAAQLLICLTWLVVWTPLPAREYQRFPHLVMLECTETNSLGFILAFLYNGLLSISAFACSYLGKDLPENYNEAKCVTFSLLFNFVSWIAFFTTASVYDGKYLPAANMMAGLSSLSSGFGGYFLPKCYVILCRPDLNSTEHFQASIQDYTRRCGST

SEQ ID NO: 5662 - protein, 531 aa, Homo sapiens
MCSLASGATGGRGAVENEEDLPELSDSGDEAAWEDEDDADLPHGKQQTPCLFCNRLFTSAEETFSHCKSEHQFNIDSMVHKHGLEFYGYIKLINFIRLKNPTVEYMNSIYNPVPWEKEEYLKPVLEDDLLLQFDVEDLYEPVSVPFSYPNGLSENTSVVEKLKHMEARALSAEAALARAREDLQKMKQFAQDFVMHTDVRTCSSSTSVIADLQEDEDGVYFSSYGHYGIHEEMLKDKIRTESYRDFIYQNPHIFKDKVVLDVGCGTGILSMFAAKAGAKKVLGVDQSEILYQAMDIIRLNKLEDTITLIKGKIEEVHLPVEKVDVIISEWMGYFLLFESMLDSVLYAKNKYLAKGGSVYPDICTISLVAVSDVNKHADRIAFWDDVYGFKMSCMKKAVIPEAVVEVLDPKTLISEPCGIKHIDCHTTSISDLEFSSDFTLKITRTSMCTAIAGYFDIYFEKNCHNRVVFSTGPQSTKTHWKQTVFLLEKPFSVKAGEALKGKVTVHKNKKDPRSLTVTLTLNNSTQTYGLQ

SEQ ID NO: 5663 - protein, 452 aa, Homo sapiens
MAGYLRVVRSLCRASGSRPAWAPAALTAPTSQEQPRRHYADKRIKVAKPVVEMDGDEMTRIIWQFIKEKLILPHVDIQLKYFDLGLPNRDQTDDQVTIDSALATQKYSVAVKCATITPDEARVEEFKLKKMWKSPNGTIRNILGGTVFREPIICKNIPRLVPGWTKPITIGRHAHGDQYKATDFVADRAGTFKMVFTPKDGSGVKEWEVYNFPAGGVGMGMYNTDESISGFAHSCFQYAIQKKWPLYMSTKNTILKAYDGRFKDIFQEIFDKHYKTDFDKNKIWYEHRLIDDMVAQVLKSSGGFVWACKNYDGDVQSDILAQGFGSLGLMTSVLVCPDGKTIEAEAAHGTVTRHYREHQKGRPTSTNPIASIFAWTRGLEHRGKLDGNQDLIRFAQMLEKVCVETVESGAMTKDLAGCIHGLSNVKLNEHFLNTTDFLDTIKSNLDRALGRQ

SEQ ID NO: 5664 - protein, 437 aa, Homo sapiens
MAAGTLYTYPENWRAFKALIAAQYSGAQVRVLSAPPHFHFGQTNRTPEFLRKFPAGKVPAFEGDDGFCVFESNAIAYYVSNEELRGSTPEAAAQVVQWVSFADSDIVPPASTWVFPTLGIMHHNKQATENAKEEVRRILGLLDAYLKTRTFLVGERVTLADITVVCTLLWLYKQVLEPSFRQAFPNTNRWFLTCINQPQFRAVLGEVKLCEKMAQFDAKKFAETQPKKDTPRKEKGSREEKQKPQAERKEEKKAAAPAPEEEMDECEQALAAEPKAKDPFAHLPKSTFVLDEFKRKYSNEDTLSVALPYFWEHFDKDGWSLWYSEYRFPEELTQTFMSCNLITGMFQRLDKLRKNAFASVILFGTNNSSSISGVWVFRGQELAFPLSPDWQVDYESYTWRKLDPGSEETQTLVREYFSWEGAFQHVGKAFNQGKIFK

SEQ ID NO: 5665 - protein, 1691 aa, Homo sapiens
MKLRGVSLAAGLFLLALSLWGQPAEAAACYGCSPGSKCDCSGIKGEKGERGFPGLEGHPGLPGFPGPEGPPGPRGQKGDDGIPGPPGPKGIRGPPGLPGFPGTPGLPGMPGHDGAPGPQGIPGCNGTKGERGFPGSPGFPGLQGPPGPPGIPGMKGEPGSIIMSSLPGPKGNPGYPGPPGIQGLPGPTGIPGPIGPPGPPGLMGPPGPPGLPGPKGNMGLNFQGPKGEKGEQGLQGPPGPPGQISEQKRPIDVEFQKGDQGLPGDRGPPGPPGIRGPPGPPGGEKGEKGEQGEPGKRGKPGKDGENGQPGIPGLPGDPGYPGEPGRDGEKGQKGDTGPPGPPGLVIPRPGTGITIGEKGNIGLPGLPGEKGERGFPGIQGPPGLPGPPGAAVMGPPGPPGFPGERGQKGDEGPPGISIPGPPGLDGQPGAPGLPGPPGPAGPHIPPSDEICEPGPPGPPGSPGDKGLQGEQGVKGDKGDTCFNCIGTGISGPPGQPGLPGLPGPPGSLGFPGQKGEKGQAGATGPKGLPGIPGAPGAPGFPGSKGEPGDILTFPGMKGDKGELGSPGAPGLPGLPGTPGQDGLPGLPGPKGEPGGITFKGERGPPGNPGLPGLPGNIGPMGPPGFGPPGPVGEKGIQGVAGNPGQPGIPGPKGDPGQTITQPGKPGLPGNPGRDGDVGLPGDPGLPGQPGLPGIPGSKGEPGIPGIGLPGPPGPKGFPGIPGPPGAPGTPGRIGLEGPPGPPGFPGPKGEPGFALPGPPGPPGLPGFKGALGPKGDRGFPGPPGPPGRTGLDGLPGPKGDVGPNGQPGPMGPPGLPGIGVQGPPGPPGIPGPIGQPGLHGIPGEKGDPGPPGLDVPGPPGERGSPGIPGAPGPIGPPGSPGLPGKAGASGFPGTKGEMGMMGPPGPPGPLGIPGRSGVPGLKGDDGLQGQPGLPGPTGEKGSKGEPGLPGPPGPMDPNLLGSKGEKGEPGLPGIPGVSGPKGYQGLPGDPGQPGLSGQPGLPGPPGPKGNPGLPGQPGLIGPPGLKGTIGDMGFPGPQGVEGPPGPSGVPGQPGSPGLPGQKGDKGDPGISSIGLPGLPGPKGEPGLPGYPGNPGIKGSVGDPGLPGLPGTPGAKGQPGLPGFPGTPGPPGPKGISGPPGNPGLPGEPGPVGGGGHPGQPGPPGEKGKPGQDGIPGPAGQKGEPGQPGFGNPGPPGLPGLSGQKGDGGLPGIPGNPGLPGPKGEPGFHGFPGVQGPPGPPGSPGPALEGPKGNPGPQGPPGRPGPTGFQGLPGPEGPPGLPGNGGIKGEKGNPGQPGLPGLPGLKGDQGPPGLQGNPGRPGLNGMKGDPGLPGVPGFPGMKGPSGVPGSAGPEGEPGLIGPPGPPGLPGPSGQSIIIKGDAGPPGIPGQPGLKGLPGPQGPQGLPGPTGPPGDPGRNGLPGFDGAGGRKGDPGLPGQPGTRGLDGPPGPDGLQGPPGPPGTSSVAHGFLITRHSQTTDAPQCPQGTLQVYEGFSLLYVQGNKRAHGQDLGTAGSCLRRFSTMPFMFCNINNVCNFASRNDYSYWLSTPEPMPMSMQPLKGQSIQPFISRCAVCEAPAVVIAVHSQTIQIPHCPQGWDSLWIGYSFMMHTSAGAEGSGQALASPGSCLEEFRSAPFIECHGRGTCNYYANSYSFWLATVDVSDMFSKPQSETLKAGDLRTRISRCQVCMKRT

SEQ ID NO: 5666 - protein, 1143 aa, Homo sapiens
MPPPRTREGRDRRDHHRAPSEEEALEKWDWNCPETRRLLEDAFFREEDYIRQGSEECQKFWTFFERLQRFQNLKTSRKEEKDPGQPKHSIPALADLPRTYDPRYRINLSVLGPATRGSQGLGRHLPAERVAEFRRALLHYLDFGQKQAFGRLAKLQRERAALPIAQYGNRILQTLKEHQVVVVAGDTGCGKSTQVPQYLLAAGFSHVACTQPRRIACISLAKRVGFESLSQYGSQVGYQIRFESTRSAATKIVFLTVGLLLRQIQREPSLPQYEVLIVDEVHERHLHNDFLLGVLQRLLPTRPDLKVILMSATINISLFSSYFSNAPVVQVPGRLFPITVVYQPQEAEPTTSKSEKLDPRPFLRVLESIDHKYPPEERGDLLVFLSGMAEISAVLEAAQTYASHTQRWVVLPLHSALSVADQDKVFDVAPPGVRKCILSTNIAETSVTIDGIRFVVDSGKVKEMSYDPQAKLQRLQEFWISQASAEQRKGRAGRTGPGVCFRLYAESDYDAFAPYPVPEIRRVALDSLVLQMKSMSVGDPRTFPFIEPPPPASLETAILYLRDQGALDSSEALTPIGSLLAQLPVDVVIGKMLILGSMFSLVEPVLTIAAALSVQSPFTRSAQSSPECAAARRPLESDQGDPFTLFNVFNAWVQVKSERSRNSRKWCRRRGIEEHRLYEMANLRRQFKELLEDHGLLAGAQAAQVGDSYSRLQQRRERRALHQLKRQHEEGAGRRRKVLRLQEEQDGGSSDEDRAGPAPPGASDGVDIQDVKFKLRHDLAQLQAAASSAQDLSREQLALLKLVLGRGLYPQLAVPDAFNSSRKDSDQIFHTQAKQGAVLHPTCVFAGSPEVLHAQELEASNCDGSRDDKDKMSSKHQLLSFVSLLETNKPYLVNCVRIPALQSLLLFSRSLDTNGDCSRLVADGWLELQLADSESAIRLLAASLRLRARWESALDRQLAHQAQQQLEEEEEDTPVSPKEVATLSKELLQFTASKIPYSLRRLTGLEVQNMYVGPQTIPATPHLPGLFGSSTLSPHPTKGGYAVTDFLTYNCLTNDTDLYSDCLRTFWTCPHCGLHAPLTPLERIAHENTCPQAPQDGPPGAEEAALETLQKTSVLQRPYHCEACGKDFLFTPTEVLRHRKQHV

SEQ ID NO: 5667 - protein, 288 aa, Homo sapiens
MDEHSCPLIFSSYGYPKEEMIYRWRKNSVEAADQKSWRLYQFDFMGLRNTTEIVTTSAGDYVVMTIYFELSRRMGYFTIQTYIPCILTVVLSWVSFWIKKDATPARTALGITTVLTMTTLSTIARKSLPRVSYVTAMDLFVTVCFLFVFAALMEYATLNYYSSCRKPTTTKKTTSLLHPDSSRWIPERISLQAPSNYSLLDMRPPPTAMITLNNSVYWQEFEDTCVYECLDGKDCQSFFCCYEECKSGSWRKGRIHIDILELDSYSRVFFPTSFLLFNLVYWVGYLYL

SEQ ID NO: 5668 - protein, 425 aa, Homo sapiens
MFPPARGKELLSFEDVAMYFTREEWGHLNWGQKDLYRDVMLENYRNMVLLGFQFPKPEMICQLENWDEQWILDLPRTGNRKASGSACPGSEARHKMKKLTPKQKFSEDLESYKISVVMQESAEKLSEKLHKCKEFVDSCRLTFPTSGDEYSRGFLQNLNLIQDQNAQTRWKQGRYDEDGKPFNQRSLLLGHERILTRAKSYECSECGKVIRRKAWFDQHQRIHFLENPFECKVCGQAFRQRSALTVHKQCHLQNKPYRCHDCGKCFRQLAYLVEHKRIHTKEKPYKCSKCEKTFSQNSTLIRHQVIHSGEKRHKCLECGKAFGRHSTLLCHQQIHSKPNTHKCSECGQSFGRNVDLIQHQRIHTKEEFFQCGECGKTFSFKRNLFRHQVIHTGSQPYQCVICGKSFKWHTSFIKHQGTHKGQIST

SEQ ID NO: 5669 - protein, 565 aa, Homo sapiens
MAKLWFKFQRYFRRKPVRFFTFLALYLTAGSLVFLHSGFVGQPAVSGNQANPAAAGGPAEGAELSFLGDMHLGRGFRDTGEASSIARRYGPWFKGKDGNERAKLGDYGGAWSRALKGRVVREKEEERAKYIGCYLDDTQSRALRGVSFFDYKKMTIFRCQDNCAERGYLYGGLEFGAECYCGHKIQATNVSEAECDMECKGERGSVCGGANRLSVYRLQLAQESARRYGSAVFRGCFRRPDNLSLALPVTAAMLNMSVDKCVDFCTEKEYPLAALAGTACHCGFPTTRFPLHDREDEQLCAQKCSAEEFESCGTPSYFIVYQTQVQDNRCMDRRFLPGKSKQLIALASFPGAGNTWARHLIELATGFYTGSYYFDGSLYNKGFKGERDHWRSGRTICIKTHESGQKEIEAFDAAILLIRNPYKALMAEFNRKYGGHIGFAAHAHWKGKEWPEFVRNYAPWWATHTLDWLKFGKKVLVVHFEDLKQDLFVQLGRMVSLLGVAVREDRLLCVESQKDGNFKRSGLRKLEYDPYTADMQKTISAYIKMVDAALKGRNLTGVPDDYYPR

SEQ ID NO: 5670 - protein, 325 aa, Homo sapiens
MVPREAPESAQCLCPSLTIPNAKDVLRKRHKRRSRQHQRFMARKALLQEQGLLSMPPEPGSSPLPTPFGAATATEAASSGKQCLRAGSGSAPCSRRPAPGKASGPLPSKCVAIDCEMVGTGPRGRVSELARCSIVSYHGNVLYDKYIRPEMPIADYRTRWSGITRQHMRKAVPFQVAQKEILKLLKGKVVVGHALHNDFQALKYVHPRSQTRDTTYVPNFLSEPGLHTRARVSLKDLALQLLHKKIQVGQHGHSSVEDATTAMELYRLVEVQWEQQEARSLWTCPEDREPDSSTDMEQYMEDQYWPDDLAHGSRGGAREAQDRRN

SEQ ID NO: 5671 - protein, 612 aa, Homo sapiens
MENQLAKSTEERTFQYQDSLPSLPVPSLEESLKKYLESVKPFANQEEYKKTEEIVQKFQSGIGEKLHQKLLERAKGKRNWLEEWWLNVAYLDVRIPSQLNVNFAGPAAHFEHYWPPKEGTQLERGSITLWHNLNYWQLLRKEKVPVHKVGNTPLDMNQFRMLFSTCKVPGITRDSIMNYFRTESEGRSPNHIVVLCRGRAFVFDVIHEGCLVTPPELLRQLTYIHKKCHSEPDGPGIAALTSEERTRWAKAREYLIGLDPENLALLEKIQSSLLVYSMEDSSPHVTPEDYSEIIAAILIGDPTVRWGDKSYNLISFSNGVFGCNCDHAPFDAMIMVNISYYVDEKIFQNEGRWKGSEKVRDIPLPEELIFIVDEKVLNDINQAKAQYLREASDLQIAAYAFTSFGKKLTKNKMLHPDTFIQLALQLAYYRLHGHPGCCYETAMTRHFYHGRTETMRSCTVEAVRWCQSMQDPSVNLRERQQKMLQAFAKHNKMMKDCSAGKGFDRHLLGLLLIAKEEGLPVPELFTDPLFSKSGGGGNFVLSTSLVGYLRVQGVVVPMVHNGYGFFYHIRDDRFVVACSAWKSCPETDAEKLVQLTFCAFHDMIQLMNSTHL

SEQ ID NO: 5672 - protein, 1371 aa, Homo sapiens
MTEESSDVPRELIESIKDVIGRKIKISVKKKVKLEVKGDKVENKVLVLTSCRAFLVTARIPTKLELTFSYLEIHGVVCSKSAQMIVETEKCSISMKMASPEDVSEVLAHIGTCLRKIFPGLSPVRIMKKVSMEPSERLASLQALWDSQTVAEQGPCGGFSQMYACVCDWLGFSYREEVQWDVDTIYLTQDTRELNLQDFSHLDHRDLIPIIAALEYNQWFTKLSSKDLKLSTDVCEQILRVVSRSNRLEELVLENAGLRTDFAQKLASALAHNPNSGLHTINLAGNPLEDRGVSSLSIQFAKLPKGLKHLNLSKTSLSPKGVNSLSQSLSANPLTASTLVHLDLSGNVLRGDDLSHMYNFLAQPNAIVHLDLSNTECSLDMVCGALLRGCLQYLAVLNLSRTVFSHRKGKEVPPSFKQFFSSSLALMHINLSGTKLSPEPLKALLLGLACNHNLKGVSLDLSNCELRSGGAQVLEGCIAEIHNITSLDISDNGLESDLSTLIVWLSKNRSIQHLALGKNFNNMKSKNLTPVLDNLVQMIQDEESPLQSLSLADSKLKTEVTIIINALGSNTSLTKVDISGNGMGDMGAKMLAKALQINTKLRTVIWDKNNITAQGFQDIAVAMEKNYTLRFMPIPMYDASQALKTNPEKTEDALQKIENYLLRNHETRKYLQEQAYRLQQGIVTSTTQQMIDRICVKVQDHLNSLRNCGGDAIQEDLKSAERLMRDAKNSKTLLPNLYHVGGASWAGASGLLSSPIQETLESMAGEVTRVVDEQLKALLESMVDAAENLCPNVMKKAHIRQDLIHASTEKISIPRTFVKNVLLEQSGIDILNKISEVKLTVASFLSDRIVDEILDALSHCHHKLADHFSRRGKTLPQQESLEIELAEEKPVKRSIITVEELTEIERLEDLDTCMMTPKSKRKSIHSRMLRPVSRAFEMEFDLDKALEEVPIHIEDPPFPSLRQEKRSSGFISELPSEEGKKLEHFTKLRPKRNKKQQPTQAAVCAANIVSQDGEQNGLMGRVDEGVDEFFTKKVTKMDSKKWSTRGSESHELNEGGDEKKKRDSRKSSGFLNLIKSRSKSERPPTILMTEEPSSPKGAVRSPPVDCPRKDTKAAEHNGNSERIEEIKTPDSFEESQGEEIGKVERSDSKSSPQAGRRYGVQVMGSGLLAEMKAKQEKRAACAQKKLGNDAVSQDSSSPALSGVERSDGGGAVPKLHPGLPENRFGLGTPEKNTKAEPKAEAGSRSRSSSSTPTSPKPLLQSPKPSLAARPVIPQKPRTASRPDDIPDSPSSPKVALLPPVLKKVPSDKERDGQSSPQPSPRTFSQEVSRRSWGQQAQEYQEQKQRSSSKDGHQGSKSNDSGEEAEKEFIFV

SEQ ID NO: 5673 - protein, 531 aa, Homo sapiens
MDEESLESALQTYRAQLQQVELALGAGLDSSEQADLRQLQGDLKELIELTEASLVSVRKSSLLAALDEERPGRQEDAEYQAFREAITEAVEAPAAARGSGSETVPKAEAGPESAAGGQEEEEGEDEEELSGTKVSAPYYSSWGTLEYHNAMVVGTEEAEDGSAGVRVLYLYPTHKSLKPCPFFLEGKCRFKENCRFSHGQVVSLDELRPFQDPDLSSLQAGSACLAKHQDGLWHAARITDVDNGYYTVKFDSLLLREAVVEGDGILPPLRTEATESDSDSDGTGDSSYARVVGSDAVDSAQSSALCPSLAVVGSDAVDSGTCSSAFAGWEVHTRGIGSRLLTKMGYEFGKGLGRHAEGRVEPIHAVVLPRGKSLDQCVETLQKQTRVGKAGTNKPPRCRGRGARPGGRPAPRNVFDFLNEKLQGQAPGALEAGAAPAGRRSKDMYHASKSAKRALSLRLFQTEEKIERTQRDIRSIQEALARNAGRHSVASAQLQEKLAGAQRQLGQLRAQEAGLQQEQRKADTHKKMTEF

SEQ ID NO: 5674 - protein, 944 aa, Homo sapiens
MDKKSFEMVLDEIRKAVLTEYKLKAIEYVHGYFSSEQVVDLLRYFSWAEPQLKAMKALQHKMVAVQPTEVVNILNCFTFSKDKLVALELLASNIIDAQNSRPIEDLFRVNMSEKKRCKRILEQAFKGGCKAPHAMISSCGTIPGNPYPKGRPSRINGIFPGTPLKKDGEECTNEGKGIAARILGPSKPPPSTYNPHKPVPYPIPPCRPHATIAPSAYNNAGLVPLANVIAPPPPPYTPNPVGTENEDLSNPSKPIQNQTFSTPASQLFSPHGSNPSTPAATPVPTASPVKAINHPSASAAATVSGMNLLNTVLPVFPGQVSSAVHTPQPSIPNPTVIRTPSLPTAPVTSIHSTTTTPVPSIFSGLVSLPGPSATPTAATPTPGPTPRSTLGSSEAFASTSAPFTSLPFSTSSSAASTSNPNSASLSSVFAGLPLPLPPTSQGLSNPTPVIAGGSTPSVAGPLGVNSPLLSALKGFLTSNDTNLINSSALSSAVTSGLASLSSLTLQNSDSSASAPNKCYAPSAIPTPQRTSTPGLALFPGLPSPVANSTSTPLTLPVQSPLATAASASTSVPVSCGSSASLLRGPHPGTSDLHISSTPAATTLPVMIKTEPTSPTPSAFKGPSHSGNPSHGTLGLSGTLGRAYTSTSVPISLSACLNPALSGLSSLSTPLNGSNPLSSISLPPHGSSTPIAPVFTALPSFTSLTNNFPLTGNPSLNPSVSLPGSLIATSSTAATSTSLPHPSSTAAVLSGLSASAPVSAAPFPLNLSTAVPSLFSVTQGPLSSSNPSYPGFSVSNTPSVTPALPSFPGLQAPSTVAAVTPLPVAATAPSPAPVLPGFASAFSSNFNSALVAQAGLSSGLQAAGSSVFPGLLSLPGIPGFPQNPSQSSLQELQHNAAAQSALLQQVHSASALESYPAQPDGFPSYPSAPGTPFSLQPSLSQSGWQ

SEQ ID NO: 5675 - protein, 329 aa, Homo sapiens
MDPQCTMGLSNILFVMAFLLSGAAPLKIQAYFNETADLPCQFANSQNQSLSELVVFWQDQENLVLNEVYLGKEKFDSVHSKYMGRTSFDSDSWTLRLHNLQIKDKGLYQCIIHHKKPTGMIRIHQMNSELSVLANFSQPEIVPISNITENVYINLTCSSIHGYPEPKKMSVLLRTKNSTIEYDGVMQKSQDNVTELYDVSISLSVSFPDVTSNMTIFCILETDKTRLLSSPFSIELEDPQPPPDHIPWITAVLPTVIICVMVFCLILWKWKKKKRPRNSYKCGTNTMEREESEQTKKREKIHIPERSDEAQRVFKSSKTSSCDKSDTCF

SEQ ID NO: 5676 - protein, 664 aa, Homo sapiens
MPPRAPPAPGPRPPPRAAAATDTAAGAGGAGGAGGAGGPGFRPLAPRPWRWLLLLALPAACSAPPPRPVYTNHWAVQVLGGPAEADRVAAAHGYLNLGQIGNLEDYYHFYHSKTFKRSTLSSRGPHTFLRMDPQVKWLQQQEVKRRVKRQVRSDPQALYFNDPIWSNMWYLHCGDKNSRCRSEMNVQAAWKRGYTGKNVVVTILDDGIERNHPDLAPNYDSYASYDVNGNDYDPSPRYDASNENKHGTRCAGEVAASANNSYCIVGIAYNAKIGGIRMLDGDVTDVVEAKSLGIRPNYIDIYSASWGPDDDGKTVDGPGRLAKQAFEYGIKKGRQGLGSIFVWASGNGGREGDYCSCDGYTNSIYTISVSSATENGYKPWYLEECASTLATTYSSGAFYERKIVTTDLRQRCTDGHTGTSVSAPMVAGIIALALEANSQLTWRDVQHLLVKTSRPAHLKASDWKVNGAGHKVSHFYGFGLVDAEALVVEAKKWTAVPSQHMCVAASDKRPRSIPLVQVLRTTALTSACAEHSDQRVVYLEHVVVRTSISHPRRGDLQIYLVSPSGTKSQLLAKRLLDLSNEGFTNWEFMTVHCWGEKAEGQWTLEIQDLPSQVRNPEKQGDLETPVANQLTTEERFVSTLSILFHWSVYLSWSQYHIVLITVAL

SEQ ID NO: 5677 - protein, 316 aa, Homo sapiens
MASPEHPGSPGCMGPITQCTARTQQEAPATGPDLPHPGPDGHLDTHSGLSSNSSMTTRELQQYWQNQKCRWKHVKLLFEIASARIEERKVSKFVVYQIIVIQTGSFDNNKAVLERRYSDFAKLQKALLKTFREEIEDVEFPRKHLTGNFAEEMICERRRALQEYLGLLYAIRCVRRSREFLDFLTRPELREAFGCLRAGQYPRALELLLRVLPLQEKLTAHCPAAAVPALCAVLLCHRDLDRPAEAFAAGERALQRLQAREGHRYYAPLLDAMVRLAYALGKDFVTLQERLEESQLRRPTPRGITLKELTVREYLH

SEQ ID NO: 5678 - protein, 308 aa, Homo sapiens
METQNLTVVTEFILLGLTQSQDAQLLVFVLVLIFYLIILPGNFLIIFTIKSDPGLTAPLYFFLGNLALLDASYSFIVVPRMLVDFLSEKKVISYRSCITQLFFLHFLGAGEMFLLVVMAFDRYIAICRPLHYSTIMNPRACYALSLVLWLGGFIHSIVQVALILHLPFCGPNQLDNFFCDVPQVIKLACTNTFVVELLMVSNSGLLSLLCFLGLLASYAVILCRIREHSSEGKSKAISTCTTHIIIIFLMFGPAIFIYTCPFQAFPADKVVSLFHTVIFPLMNPVIYTLRNQEVKASMRKLLSQHMFC

SEQ ID NO: 5679 - protein, 973 aa, Homo sapiens
METKVHLFCQAEENIDLLDDGSNSFATDLSSGTINHKKYIKFSKTIEKEISPEIRSLSPEYKKIFETSIIFCGEEKSSDFSGEKKVGRKSLQVQQHSKRTEIIPPFLKLSKEKVTRKENSLCKLPNQYSVHKTSSPLCTSSAITREKEMLSNLYMTLYDEVTHGYLHSKELSALHKACKIFSKIRSGKIYVNDLPVILCILRISISDLEMRQALKTVDIDAFQDALKIFCRIKGGRVSTDDVFAVLDSMGIPINREILEEVTKHTYIDSNHMVDIGDIIFTLNELQEQYEDVSITEGSPLNEITSDRKLSSVAGCYLKYKKKNSLSSKLPEPSISKKLNKKSNQYYSKIMENDDLESKRPKNTWQIRKFLGGVGSSNVGVQEPYSKNGINFKKHSEKGEIHDSKSKPQSLKSSTSLSKSLDKSDISSIPKLQKPAVRKHSSLQKQVSSTEKTAISTLENFCEAISKLQENYIAAEELQSILPSTGINLLDEEFQKIVTDTSRNENGMVELDDFVNALAKERSFPECNALPGVIKAIDKIKDKNVDYEDLNTCLQNFGIYLSKPEFKKITELTEAGETKKVNFKEFIDTMMSNTECFSEKLVLPDAIETLDDLRKETMSVSDLWNTLSSLNSNLKKDEFLAALELVTVDEGDKVQFEEFAKVVRNMRDAARLEELQEVVLAADLLEGDMIAGKNLEDFLRNVGIKSPKEEVEKILQSDFVSEDNMVNIKDCMRALRDTQKFSNYIDFRKEASNLKLPKVNEIKEAANILSHVDNGKIGIPDLEHALKCLNVNLTEEDFNEALNCCNVSDNMEVDLKDFLMKMKESPHFQKSKATQILLATTQILQNDLVDVSDLKTLLMDKDLHTANAILTVMLRHVPEHESGKVSIQEFMTKLSDILTIPKAAGKFYLICTYCPDLERQAVVYMLKTIQDSIVKAQVSKKQYNMNIKQHKISLHNFCLNSKANIAKLNPNSKF

SEQ ID NO: 5680 - protein, 736 aa, Homo sapiens
MKKSRSVMTVMADDNVKDYFECSLSKSYSSSSNTLGIDLWRGRRCCSGNLQLPPLSQRQSERARTPEGDGISRPTTLPLTTLPSIAITTVSQECFDVENGPSPGRSPLDPQASSSAGLVLHATFPGHSQRRESFLYRSDSDYDLSPKAMSRNSSLPSEQHGDDLIVTPFAQVLASLRSVRNNFTILTNLHGTSNKRSPAASQPPVSRVNPQEESYQKLAMETLEELDWCLDQLETIQTYRSVSEMASNKFKRMLNRELTHLSEMSRSGNQVSEYISNTFLDKQNDVEIPSPTQKDREKKKKQQLMTQISGVKKLMHSSSLNNTSISRFGVNTENEDHLAKELEDLNKWGLNIFNVAGYSHNRPLTCIMYAIFQERDLLKTFRISSDTFITYMMTLEDHYHSDVAYHNSLHAADVAQSTHVLLSTPALDAVFTDLEILAAIFAAAIHDVDHPGVSNQFLINTNSELALMYNDESVLENHHLAVGFKLLQEEHCDIFMNLTKKQRQTLRKMVIDMVLATDMSKHMSLLADLKTMVETKKVTSSGVLLLDNYTDRIQVLRNMVHCADLSNPTKSLELYRQWTDRIMEEFFQQGDKERERGMEISPMCDKHTASVEKSQVGFIDYIVHPLWETWADLVQPDAQDILDTLEDNRNWYQSMIPQSPSPPLDEQNRDCQGLMEKFQFELTLDEEDSEGPEKEGEGHSYFSSTKTLCVIDPENRDSLGETDIDIATEDKSPVDT

SEQ ID NO: 5681 - protein, 998 aa, Homo sapiens
MARARPPPPPSPPPGLLPLLPPLLLLPLLLLPAGCRALEETLMDTKWVTSELAWTSHPESGWEEVSGYDEAMNPIRTYQVCNVRESSQNNWLRTGFIWRRDVQRVYVELKFTVRDCNSIPNIPGSCKETFNLFYYEADSDVASASSPFWMENPYVKVDTIAPDESFSRLDAGRVNTKVRSFGPLSKAGFYLAFQDQGACMSLISVRAFYKKCASTTAGFALFPETLTGAEPTSLVIAPGTCIPNAVEVSVPLKLYCNGDGEWMVPVGACTCATGHEPAAKESQCRPCPPGSYKAKQGEGPCLPCPPNSRTTSPAASICTCHNNFYRADSDSADSACTTVPSPPRGVISNVNETSLILEWSEPRDLGGRDDLLYNVICKKCHGAGGASACSRCDDNVEFVPRQLGLTERRVHISHLLAHTRYTFEVQAVNGVSGKSPLPPRYAAVNITTNQAAPSEVPTLRLHSSSGSSLTLSWAPPERPNGVILDYEMKYFEKSEGIASTVTSQMNSVQLDGLRPDARYVVQVRARTVAGYGQYSRPAEFETTSERGSGAQQLQEQLPLIVGSATAGLVFVVAVVVIAIVCLRKQRHGSDSEYTEKLQQYIAPGMKVYIDPFTYEDPNEAVREFAKEIDVSCVKIEEVIGAGEFGEVCRGRLKQPGRREVFVAIKTLKVGYTERQRRDFLSEASIMGQFDHPNIIRLEGVVTKSRPVMILTEFMENCALDSFLRLNDGQFTVIQLVGMLRGIAAGMKYLSEMNYVHRDLAARNILVNSNLVCKVSDFGLSRFLEDDPSDPTYTSSLGGKIPIRWTAPEAIAYRKFTSASDVWSYGIVMWEVMSYGERPYWDMSNQDVINAVEQDYRLPPPMDCPTALHQLMLDCWVRDRNLRPKFSQIVNTLDKLIRNAASLKVIASAQSGMSQPLLDRTVPDYTTFTTVGDWLDAIKMGRYKESFVSAGFASFDLVAQMTAEDLLRIGVTLAGHQKKILSSIQDMRLQMNQTLPVQV

SEQ ID NO: 5682 - protein, 567 aa, Homo sapiens
MPDSPAEVKTQPRSTPPSMPPPPPAASQGATRPPSFTPHTLMNGSSHSPTAINGAPCTPNGFSNGPATSSTASLSTQHLPPACGARQLSKLKRFLTTLQQFGSDISPEIGERVRTLVLGLVNSTLTIEEFHSKLQEATNFPLRPFVIPFLKANLPLLQRELLHCARLAKQTPAQYLAQHEQLLLDASASSPIDSSELLLEVNENGKRRTPDRTKENGSDRDPLHPEHLSKRPCTLNPAQRYSPSNGPPQPTPPPHYRLEDIAMAHHFRDAYRHPDPRELRERHRPLVVPGSRQEEVIDHKLTEREWAEEWKHLNNLLNCIMDMVEKTRRSLTVLRRCQEADREELNHWARRYSDAEDTKKGPAPAAARPRSSSAGPEGPQLDVPREFLPRTLTGYVPEDIWRKAEEAVNEVKRQAMSELQKAVSDAERKAHELITTERAKMERALAEAKRQASEDALTVINQQEDSSESCWNCGRKASETCSGCNAARYCGSFCQHRDWEKHHHVCGQSLQGPTAVVADPVPGPPEAAHSLGPSLPVGAASPSEAGSAGPSRPGSPSPPGPLDTVPR

SEQ ID NO: 5683 - protein, 673 aa, Homo sapiens
MAKLETLPVRADPGRDPLLAFAPRPSELGPPDPRLAMGSVGSGVAHAQEFAMKSVGTRTGGGGSQGSFPGPRGSGSGASRERPGRYPSEDKGLANSLYLNGELRGSDHTDVCGNVVGSSGGSSSSGGSDKAPPQYREPSHPPKLLATSGKLDQCSEPLVRPSAFKPVVPKNFHSMQNLCPPQTNGTPEGRQGPGGLKGGLDKSRTMTPAGGSGSGLSDSGRNSLTSLPTYSSSYSQHLAPLSASTSHINRIGTASYGSGSGGSSGGGSGYQDLGTSDSGRASSKSGSSSSMGRPGHLGSGEGGGGGLPFAACSPPSPSALIQELEERLWEKEQEVAALRRSLEQSEAAVAQVLEERQKAWERELAELRQGCSGKLQQVARRAQRAQQGLQLQVLRLQQDKKQLQEEAARLMRQREELEDKVAACQKEQADFLPRIEETKWEVCQKAGEISLLKQQLKDSQADVSQKLSEIVGLRSQLREGRASLREKEEQLLSLRDSFSSKQASLELGEGELPAACLKPALTPVDPAEPQDALATCESDEAKMRRQAGVAAAASLVSVDGEAEAGGESGTRALRREVGRLQAELAAERRARERQGASFAEERRVWLEEKEKVIEYQKQLQLSYVEMYQRNQQLERRLRERGAAGGASTPTPQHGEEKKAWTPSRLERIESTEI

SEQ ID NO: 5684 - protein, 767 aa, Homo sapiens
MQSPAATAEGLSGPLFGAYTFPTFKFQPRHDSMDWRRISTLDVDRVARELDVATLQENIAGITFCNLDREVCSRCGQPVDPALLKVLRLAQLIIEYLLHCQDCLSASVAQLEARLQTSLGQQQRGQQELGRQADELKGVREESRRRRKMISTLQQLLMQTGTHSYHTCHLCDKTFMNATFLRGHIQRRHAGVAEGGKQKKQEQPVEEVLEELRAKLKWTQGELEAQREAERQRQLQEAELIHQREIEAKKEFDKWKEQEWTKLYGEIDKLKKLFWDEFKNVAKQNSTLEEKLRALQSHSVMESKLGSLRDEESEEWLRQARELQALREKTEIQKTEWKRKVKELHEEHMAEKKELQEENQRLQASLSQDQKKAAAQSQCQISTLRAQLQEQARIIASQEEMIQSLSLRKVEGIHKVPKAVDTEEDSPEEEMEDSQDEQHKVLAALRRNPTLLKHFRPILEDTLEEKLESMGIRKDAKGISIQTLRHLESLLRVQREQKARKFSEFLSLRGKLVKEVTSRAKERQENGAVVSQPDGQPSVKSQQSTLVTREAQPKTRTLQVALPSTPAEPPPPTRQSHGSHGSSLTQVSAPAPRPGLHGPSSTPPSSGPGMSTPPFSSEEDSEGDRVQRVSLQPPKVPSRMVPRPKDDWDWSDTETSEENAQPPGQGSGTLVQSMVKNLEKQLEAPAKKPAGGVSLFFMPNAGPQRAATPGRKPQLSEDESDLEISSLEDLPLDLDQREKPKPLSRSKLPEKFGTGPQSSGQPRVPAW

SEQ ID NO: 5685 - protein, 1530 aa, Homo sapiens
MAPGWAGVGAAVRARLALALALASVLSGPPAVACPTKCTCSAASVDCHGLGLRAVPRGIPRNAERLDLDRNNITRITKMDFAGLKNLRVLHLEDNQVSVIERGAFQDLKQLERLRLNKNKLQVLPELLFQSTPKLTRLDLSENQIQGIPRKAFRGITDVKNLQLDNNHISCIEDGAFRALRDLEILTLNNNNISRILVTSFNHMPKIRTLRLHSNHLYCDCHLAWLSDWLRQRRTVGQFTLCMAPVHLRGFNVADVQKKEYVCPAPHSEPPSCNANSISCPSPCTCSNNIVDCRGKGLMEIPANLPEGIVEIRLEQNSIKAIPAGAFTQYKKLKRIDISKNQISDIAPDAFQGLKSLTSLVLYGNKITEIVKGLFDGLVSLQLLLLNANKINCLRVNTFQDLQNLNLLSLYDNKLQTISKGLFAPLQSIQTLHLAQNPFVCDCHLKWLADYLQDNPIETSGARCSSPRRLANKRISQIKSKKFRCSGSEDYRSRFSSECFMDLVCPEKCRCEGTIVDCSNQKLVRIPSHLPEYVTDLRLNDNEVSVLEATGIFKKLPNLRKINLSNNKIKEVREGAFDGAASVQELMLTGNQLETVHGRVFRGLSGLKTLMLRSNLIGCVSNDTFAGLSSVRLLSLYDNRITTITPGAFTTLVSLSTINLLSNPFNCNCHLAWLGKWLRKRRIVSGNPRCQKPFFLKEIPIQDVAIQDFTCDGNEESSCQLSPRCPEQCTCMETVVRCSNKGLRALPRGMPKDVTELYLEGNHLTAVPRELSALRHLTLIDLSNNSISMLTNYTFSNMSHLSTLILSYNRLRCIPVHAFNGLRSLRVLTLHGNDISSVPEGSFNDLTSLSHLALGTNPLHCDCSLRWLSEWVKAGYKEPGIARCSSPEPMADRLLLTTPTHRFQCKVLWFCCPGPVDINIVAKCNACLSSPCKNNGTCTQDPVELYRCACPYSYKGKDCTVPINTCIQNPCQHGGTCHLSDSHKDGFSCSCPLGFEGQRCEINPDDCEDNDCENNATCVDGINNYVCICPPNYTGELCDEVIDHCVPELNLCQHEAKCIPLDKGFSCECVPGYSGKLCETDNDDCVAHKCRHGAQCVDTINGYTCTCPQGFSGPFCEHPPPMVLLQTSPCDQYECQNGAQCIVVQQEPTCRCPPGFAGPRCEKLITVNFVGKDSYVELASAKVRPQANISLQVATDKDNGILLYKGDNDPLALELYQGHVRLVYDSLSSPPTTVYSVETVNDGQFHSVELVTLNQTLNLVVDKGTPKSLGKLQKQPAVGINSPLYLGGIPTSTGLSALRQGTDRPLGGFHGCIHEVRINNELQDFKALPPQSLGVSPGCKSCTVCKHGLCRSVEKDSVVCECRPGWTGPLCDQEARDPCLGHRCHHGKCVATGTSYMCKCAEGYGGDLCDNKNDSANACSAFKCHHGQCHISDQGEPYCLCQPGFSGEHCQQENPCLGQVVREVIRRQKGYASCATASKVPIMECRGGCGPQCCQPTRSKRRKYVFQCTDGSSFVEEVERHLECGCLACS

SEQ ID NO: 5686 - protein, 544 aa, Homo sapiens
MGPGARLAALLAVLALGTGDPERAAARGDTFSALTSVARALAPERRLLGLLRRYLRGEEARLRDLTRFYDKVLSLHEDSTTPVANPLLAFTLIKRLQSDWRNVVHSLEASENIRALKDGYEKVEQDLPAFEDLEGAARALMRLQDVYMLNVKGLARGVFQRVTGSAITDLYSPKRLFSLTGDDCFQVGKVAYDMGDYYHAIPWLEEAVSLFRGSYGEWKTEDEASLEDALDHLAFAYFRAGNVSCALSLSREFLLYSPDNKRMARNVLKYERLLAESPNHVVAEAVIQRPNIPHLQTRDTYEGLCQTLGSQPTLYQIPSLYCSYETNSNAYLLLQPIRKEVIHLEPYIALYHDFVSDSEAQKIRELAEPWLQRSVVASGEKQLQVEYRISKSAWLKDTVDPKLVTLNHRIAALTGLDVRPPYAEYLQVVNYGIGGHYEPHFDHATSPSSPLYRMKSGNRVATFMIYLSSVEAGGATAFIYANLSVPVVRNAALFWWNLHRSGEGDSDTLHAGCPVLVGDKWVANKWIHEYGQEFRRPCSSSPED

SEQ ID NO: 5687 - protein, 760 aa, Homo sapiens
MSTVEEDSDTVTVETVNSVTLTQDTEGNLILHCPQNEADEIDSEDSIEPPHKRLCLSSEDDQSIDDSTPCISVVALPLSENDQSFEVTMTATTEVADDEVTEGTVTQIQILQNEQLDEISPLGNEEVSAVSQAWFTTKEDKDSLTNKGHKWKQGMWSKEEIDILMNNIERYLKARGIKDATEIIFEMSKDERKDFYRTIAWGLNRPLFAVYRRVLRMYDDRNHVGKYTPEEIEKLKELRIKHGNDWATIGAALGRSASSVKDRCRLMKDTCNTGKWTEEEEKRLAEVVHELTSTEPGDIVTQGVSWAAVAERVGTRSEKQCRSKWLNYLNWKQSGGTEWTKEDEINLILRIAELDVADENDINWDLLAEGWSSVRSPQWLRSKWWTIKRQIANHKDVSFPVLIKGLKQLHENQKNNPTLLENKSGSGVPNSNTNSSVQHVQIRVARLEDNTAISSSPMAALQIPVQITHVSSADSPATVDSETITLNSGTLQTFEILPSFHLQPTGTPGTYLLQTSSSQGLPLTLTASPTVTLTAAAPASPEQIIVHALSPEHLLNTSDNVTVQCHTPRVIIQTVATEDITSSISQAELTVDSDIQSSDFPEPPDALEADTFPDEIHHPKMTVEPSFNDAHVSKFSDQNSTELMNSVMVRTEEEISDTDLKQEESPSDLASAYVTEGLESPTIEEQVDQTIDDETILIVPSPHGFIQASDVIDTESVLPLTTLTDPILQHHQEESNIIGSSLGSPVSEDSKDVEDLVNCH

SEQ ID NO: 5688 - protein, 783 aa, Homo sapiens
MARLGNCSLTWAALIILLLPGSLEECGHISVSAPIVHLGDPITASCIIKQNCSHLDPEPQILWRLGAELQPGGRQQRLSDGTQESIITLPHLNHTQAFLSCCLNWGNSLQILDQVELRAGYPPAIPHNLSCLMNLTTSSLICQWEPGPETHLPTSFTLKSFKSRGNCQTQGDSILDCVPKDGQSHCCIPRKHLLLYQNMGIWVQAENALGTSMSPQLCLDPMDVVKLEPPMLRTMDPSPEAAPPQAGCLQLCWEPWQPGLHINQKCELRHKPQRGEASWALVGPLPLEALQYELCGLLPATAYTLQIRCIRWPLPGHWSDWSPSLELRTTERAPTVRLDTWWRQRQLDPRTVQLFWKPVPLEEDSGRIQGYVVSWRPSGQAGAILPLCNTTELSCTFHLPSEAQEVALVAYNSAGTSRPTPVVFSESRGPALTRLHAMARDPHSLWVGWEPPNPWPQGYVIEWGLGPPSASNSNKTWRMEQNGRATGFLLKENIRPFQLYEIIVTPLYQDTMGPSQHVYAYSQEMAPSHAPELHLKHIGKTWAQLEWVPEPPELGKSPLTHYTIFWTNAQNQSFSAILNASSRGFVLHGLEPASLYHIHLMAASQAGATNSTVLTLMTLTPEGSELHIILGLFGLLLLLTCLCGTAWLCCSPNRKNPLWPSVPDPAHSSLGSWVPTIMEEDAFQLPGLGTPPITKLTVLEEDEKKPVPWESHNSSETCGLPTLVQTYVLQGDPRAVSTQPQSQSGTSDQAGPPRRSAYFKDQIMLHPAPPNGLLCLFPITSVL

SEQ ID NO: 5689 - protein, 837 aa, Homo sapiens
MLRTAMGLRSWLAAPWGALPPRPPLLLLLLLLLLLQPPPPTWALSPRISLPLGSEERPFLRFEAEHISNYTALLLSRDGRTLYVGAREALFALSSNLSFLPGGEYQELLWGADAEKKQQCSFKGKDPQRDCQNYIKILLPLSGSHLFTCGTAAFSPMCTYINMENFTLARDEKGNVLLEDGKGRCPFDPNFKSTALVVDGELYTGTVSSFQGNDPAISRSQSLRPTKTESSLNWLQDPAFVASAYIPESLGSLQGDDDKIYFFFSETGQEFEFFENTIVSRIARICKGDEGGERVLQQRWTSFLKAQLLCSRPDDGFPFNVLQDVFTLSPSPQDWRDTLFYGVFTSQWHRGTTEGSAVCVFTMKDVQRVFSGLYKEVNRETQQWYTVTHPVPTPRPGACITNSARERKINSSLQLPDRVLNFLKDHFLMDGQVRSRMLLLQPQARYQRVAVHRVPGLHHTYDVLFLGTGDGRLHKAVSVGPRVHIIEELQIFSSGQPVQNLLLDTHRGLLYAASHSGVVQVPMANCSLYRSCGDCLLARDPYCAWSGSSCKHVSLYQPQLATRPWIQDIEGASAKDLCSASSVVSPSFVPTGEKPCEQVQFQPNTVNTLACPLLSNLATRLWLRNGAPVNASASCHVLPTGDLLLVGTQQLGEFQCWSLEEGFQQLVASYCPEVVEDGVADQTDEGGSVPVIISTSRVSAPAGGKASWGADRSYWKEFLVMCTLFVLAVLLPVLFLLYRHRNSMKVFLKQGECASVHPKTCPVVLPPETRPLNGLGPPSTPLDHRGYQSLSDSPPGSRVFTESEKRPLSIQDSFVEVSPVCPRPRVRLGSEIRDSVV

SEQ ID NO: 5690 - protein, 928 aa, Homo sapiens
MAKVPELEDTFLQAQPAPQLSPGIQEDCCVQLLGKGLLVYPEETVYLAAEGQPGGEQGGGEKGEDPELPGAVKSEMHLNNGNFSSEEEDADNHDSKTKAADQYLSQKKTITQIVKDKKKQTQLTLQWLEENYIVCEGVCLPRCILYAHYLDFCRKEKLEPACAATFGKTIRQKFPLLTTRRLGTRGHSKYHYYGIGIKESSAYYHSVYSGKGLTRFSGSKLKNEGGFTRKYSLSSKTGTLLPEFPSAQHLVYQGCISKDKVDTLIMMYKTHCQCILDNAINGNFEEIQHFLLHFWQGMPDHLLPLLENPVIIDIFCVCDSILYKVLTDVLIPATMQEMPESLLADIRNFAKNWEQWVVSSLENLPEALTDKKIPIVRRFVSSLKRQTSFLHLAQIARPALFDQHVVNSMVSDIERVDLNSIGSQALLTISGSTDTESGIYTEHDSITVFQELKDLLKKNATVEAFIEWLDTVVEQRVIKTSKQNGRSLKKRAQDFLLKWSFFGARVMHNLTLNNASSFGSFHLIRMLLDEYILLAMETQFNNDKEQELQNLLDKYMKNSDASKAAFTASPSSCFLANRNKGSMVSSDAVKNESHVETTYLPLPSSQPGGLGPALHQFPAGNTDNMPLTGQMELSQIAGHLMTPPISPAMASRGSVINQGPMAGRPPSVGPVLSAPSHCSTYPEPIYPTLPQANHDFYSTSSNYQTVFRAQPHSTSGLYPHHTEHGRCMAWTEQQLSRDFFSGSCAGSPYNSRPPSSYGPSLQAQDSHNMQFLNTGSFNFLSNTGAASCQGATLPPNSPNGYYGSNINYPESHRLGSMVNQHVSVISSIRSLPPYSDIHDPLNILDDSGRKQTSSFYTDTSSPVACRTPVLASSLQTPIPSSSSQCMYGTSNQYPAQETLDSHGTSSREMVSSLPPINTVFMGTAAGGT

SEQ ID NO: 5691 - protein, 428 aa, Homo sapiens
MGPLSAPPCTQRITWKGLLLTALLLNFWNLPTTAQVTIEAEPTKVSKGKDVLLLVHNLPQNLAGYIWYKGQMKDLYHYITSYVVDGQIIIYGPAYSGRETVYSNASLLIQNVTREDAGSYTLHIVKRGDGTRGETGHFTFTLYLETPKPSISSSNLYPREDMEAVSLTCDPETPDASYLWWMNGQSLPMTHSLQLSKNKRTLFLFGVTKYTAGPYECEIRNPVSASRSDPVTLNLLPKLPKPYITINNLNPRENKDVLAFTCEPKSENYTYIWWLNGQSLPVSPRVKRPIENRILILPSVTRNETGPYQCEIQDRYGGIRSYPVTLNVLYGPDLPRIYPSFTYYHSGENLYLSCFADSNPPAEYSWTINGKFQLSGQKLFIPQITTKHSGLYACSVRNSATGMESSKSMTVKVSAPSGTGHLPGLNPL

SEQ ID NO: 5692 - protein, 512 aa, Homo sapiens
MATANGAVENGQPDRKPPALPRPIRNLEVKFTKIFINNEWHESKSGKKFATCNPSTREQICEVEEGDKPDVDKAVEAAQVAFQRGSPWRRLDALSRGRLLHQLADLVERDRATLAALETMDTGKPFLHAFFIDLEGCIRTLRYFAGWADKIQGKTIPTDDNVVCFTRHEPIGVCGAITPWNFPLLMLVWKLAPALCCGNTMVLKPAEQTPLTALYLGSLIKEAGFPPGVVNIVPGFGPTVGAAISSHPQINKIAFTGSTEVGKLVKEAASRSNLKRVTLELGGKNPCIVCADADLDLAVECAHQGVFFNQGQCCTAASRVFVEEQVYSEFVRRSVEYAKKRPVGDPFDVKTEQGPQIDQKQFDKILELIESGKKEGAKLECGGSAMEDKGLFIKPTVFSEVTDNMRIAKEEIFGPVQPILKFKSIEEVIKRANSTDYGLTAAVFTKNLDKALKLASALESGTVWINCYNALYAQAPFGGFKMSGNGRELGEYALAEYTEVKTVTIKLGDKNP

SEQ ID NO: 5693 - protein, 2352 aa, Homo sapiens
MEKATVPVAAATAAEGEGSPPAVAAVAGPPAAAEVGGGVGGSSRARSASSPRGMVRVCDLLLKKKPPQQQHHKAKRNRTCRPPSSSESSSDSDNSGGGGGGGGGGGGGGGTSSNNSEEEEDDDDEEEEVSEVESFILDQDDLENPMLETASKLLLSGTADGADLRTVDPETQARLEALLEAAGIGKLSTADGKAFADPEVLRRLTSSVSCALDEAAAALTRMRAESTANAGQSDNRSLAEACSEGDVNAVRKLLIEGRSVNEHTEEGESLLCLACSAGYYELAQVLLAMHANVEDRGIKGDITPLMAAANGGHVKIVKLLLAHKADVNAQSSTGNTALTYACAGGYVDVVKVLLESGASIEDHNENGHTPLMEAGSAGHVEVARLLLENGAGINTHSNEFKESALTLACYKGHLEMVRFLLEAGADQEHKTDEMHTALMEACMDGHVEVARLLLDSGAQVNMPADSFESPLTLAACGGHVELAALLIERGASLEEVNDEGYTPLMEAAREGHEEMVALLLGQGANINAQTEETQETALTLACCGGFLEVADFLIKAGADIELGCSTPLMEAAQEGHLELVKYLLAAGANVHATTATGDTALTYACENGHTDVADVLLQAGADLEHESEGGRTPLMKAARAGHVCTVQFLISKGANVNRTTANNDHTVLSLACAGGHLAVVELLLAHGADPTHRLKDGSTMLIEAAKGGHTSVVCYLLDYPNNLLSAPPPDVTQLTPPSHDLNRAPRVPVQALPMVVPPQEPDKPPANVATTLPIRNKAVSGRASAMSNTPTHSIAASISQPQTPTPSPIISPSAMLPIYPAIDIDAQTESNHDTALTLACAGGHEELVQTLLERGASIEHRDKKGFTPLILAATAGHVGVVEILLDNGADIEAQSERTKDTPLSLACSGGRQEVVELLLARGANKEHRNVSDYTPLSLAASGGYVNIIKILLNAGAEINSRTGSKLGISPLMLAAMNGHTAAVKLLLDMGSDINAQIETNRNTALTLACFQGRTEVVSLLLDRKANVEHRAKTGLTPLMEAASGGYAEVGRVLLDKGADVNAPPVPSSRDTALTIAADKGHYKFCELLIGRGAHIDVRNKKGNTPLWLAANGGHLDVVQLLVQAGADVDAADNRKITPLMAAFRKGHVKVVRYLVKEVNQFPSDSECMRYIATITDKEMLKKCHLCMESIVQAKDRQAAEANKNASILLEELDLEKLREESRRLALAAKREKRKEKRRKKKEEQRRKLEEIEAKNKENFELQAAQEKEKLKVEDEPEVLTEPPSATTTTTIGISATWTTLAGSHGKRNNTITTTSSKRKNRKNKITPENVQIIFDDPLPISYSQPEKVNGESKSSSTSESGDSDNMRISSCSDESSNSNSSRKSDNHSPAVVTTTVSSKKQPSVLVTFPKEERKSVSGKASIKLSETISEGTSNSLSTCTKSGPSPLSSPNGKLTVASPKRGQKREEGWKEVVRRSKKVSVPSTVISRVIGRGGCNINAIREFTGAHIDIDKQKDKTGDRIITIRGGTESTRQATQLINALIKDPDKEIDELIPKNRLKSSSANSKIGSSAPTTTAANTSLMGIKMTTVALSSTSQTATALTVPAISSASTHKTIKNPVNNVRPGFPVSLPLAYPPPQFAHALLAAQTFQQIRPPRLPMTHFGGTFPPAQSTWGPFPVRPLSPARATNSPKPHMVPRHSNQNSSGSQVNSAGSLTSSPTTTTSSSASTVPGTSTNGSPSSPSVRRQLFVTVVKTSNATTTTVTTTASNNNTAPTNATYPMPTAKEHYPVSSPSSPSPPAQPGGVSRNSPLDCGSASPNKVASSSEQEAGSPPVVETTNTRPPNSSSSSGSSSAHSNQQQPPGSVSQEPRPPLQQSQVPPPEVRMTVPPLATSSAPVAVPSTAPVTYPMPQTPMGCPQPTPKMETPAIRPPPHGTTAPHKNSASVQNSSVAVLSVNHIKRPHSVPSSVQLPSTLSTQSACQNSVHPANKPIAPNFSAPLPFGPFSTLFENSPTSAHAFWGGSVVSSQSTPESMLSGKSSYLPNSDPLHQSDTSKAPGFRPPLQRPAPSPSGIVNMDSPYGSVTPSSTHLGNFASNISGGQMYGPGAPLGGAPAAANFNRQHFSPLSLLTPCSSASNDSSAQSVSSGVRAPSPAPSSVPLGSEKPSNVSQDRKVPVPIGTERSARIRQTGTSAPSVIGSNLSTSVGHSGIWSFEGIGGNQDKVDWCNPGMGNPMIHRPMSDPGVFSQHQAMERDSTGIVTPSGTFHQHVPAGYMDFPKVGGMPFSVYGNAMIPPVAPIPDGAGGPIFNGPHAADPSWNSLIKMVSSSTENNGPQTVWTGPWAPHMNSVHMNQLG

SEQ ID NO: 5694 - protein, 448 aa, Homo sapiens
MFDCMDVLSVSPGQILDFYTASPSSCMLQEKALKACFSGLTQTEWQHRHTAQSIETQSTSSEELVPSPPSPLPPPRVYKPCFVCQDKSSGYHYGVSACEGCKGFFRRSIQKNMIYTCHRDKNCVINKVTRNRCQYCRLQKCFEVGMSKESVRNDRNKKKKETSKQECTESYEMTAELDDLTEKIRKAHQETFPSLCQLGKYTTNSSADHRVRLDLGLWDKFSELATKCIIKIVEFAKRLPGFTGLTIADQITLLKAACLDILILRICTRYTPEQDTMTFSDGLTLNRTQMHNAGFGPLTDLVFTFANQLLPLEMDDTETGLLSAICLICGDRQDLEEPTKVDKLQEPLLEALKIYIRKRRPSKPHMFPKILMKITDLRSISAKGAERVITLKMEIPGSMPPLIQEMLENSEGHEPLTPSSSGNTAEHSPSISPSSVENSGVSQSPLVQ

SEQ ID NO: 5695 - protein, 241 aa, Homo sapiens
MSASLNYKSFSKEQQTMDNLEKQLICPICLEMFTKPVVILPCQHNLCRKCASDIFQASNPYLPTRGGTTMASGGRFRCPSCRHEVVLDRHGVYGLQRNLLVENIIDIYKQESTRPEKKSDQPMCEEHEEERINIYCLNCEVPTCSLCKVFGAHKDCQVAPLTHVFQRQKSELSDGIAILVGSNDRVQGVISQLEDTCKTIEIGFEAPPLQGQAAAPASGSGADSEPARHIFSFSWLNSLNE

SEQ ID NO: 5696 - protein, 654 aa, Homo sapiens
MSEASSEDLVPPLEAGAAPYREEEEAAKKKKEKKKKSKGLANVFCVFTKGKKKKGQPSSAEPEDAAGSRQGLDGPPPTVEELKAALERGQLEAARPLLALERELAAAAAAGGVSEEELVRRQSKVEALYELLRDQVLGVLRRPLEAPPERLRQALAVVAEQEREDRQAAAAGPGTSGLAATRPRRWLQLWRRGVAEAAEERMGQRPAAGAEVPESVFLHLGRTMKEDLEAVVERLKPLFPAEFGVVAAYAESYHQHFAAHLAAVAQFELCERDTYMLLLWVQNLYPNDIINSPKLVGELQGMGLGSLLPPRQIRLLEATFLSSEAANVRELMDRALELEARRWAEDVPPQRLDGHCHSELAIDIIQITSQAQAKAESITLDLGSQIKRVLLVELPAFLRSYQRAFNEFLERGKQLTNYRANVIANINNCLSFRMSMEQNWQVPQDTLSLLLGPLGELKSHGFDTLLQNLHEDLKPLFKRFTHTRWAAPVETLENIIATVDTRLPEFSELQGCFREELMEALHLHLVKEYIIQLSKGRLVLKTAEQQQQLAGYILANADTIQHFCTQHGSPATWLQPALPTLAEIIRLQDPSAIKIEVATYATCYPDFSKGHLSAILAIKGNLSNSEVKRIRSILDVSMGAQEPSRPLFSLIKVG

SEQ ID NO: 5697 - protein, 1447 aa, Homo sapiens
MASAGNAAEPQDRGGGGSGCIGAPGRPAGGGRRRRTGGLRRAAAPDRDYLHRPSYCDAAFALEQISKGKATGRKAPLWLRAKFQRLLFKLGCYIQKNCGKFLVVGLLIFGAFAVGLKAANLETNVEELWVEVGGRVSRELNYTRQKIGEEAMFNPQLMIQTPKEEGANVLTTEALLQHLDSALQASRVHVYMYNRQWKLEHLCYKSGELITETGYMDQIIEYLYPCLIITPLDCFWEGAKLQSGTAYLLGKPPLRWTNFDPLEFLEELKKINYQVDSWEEMLNKAEVGHGYMDRPCLNPADPDCPATAPNKNSTKPLDMALVLNGGCHGLSRKYMHWQEELIVGGTVKNSTGKLVSAHALQTMFQLMTPKQMYEHFKGYEYVSHINWNEDKAAAILEAWQRTYVEVVHQSVAQNSTQKVLSFTTTTLDDILKSFSDVSVIRVASGYLLMLAYACLTMLRWDCSKSQGAVGLAGVLLVALSVAAGLGLCSLIGISFNAATTQVLPFLALGVGVDDVFLLAHAFSETGQNKRIPFEDRTGECLKRTGASVALTSISNVTAFFMAALIPIPALRAFSLQAAVVVVFNFAMVLLIFPAILSMDLYRREDRRLDIFCCFTSPCVSRVIQVEPQAYTDTHDNTRYSPPPPYSSHSFAHETQITMQSTVQLRTEYDPHTHVYYTTAEPRSEISVQPVTVTQDTLSCQSPESTSSTRDLLSQFSDSSLHCLEPPCTKWTLSSFAEKHYAPFLLKPKAKVVVIFLFLGLLGVSLYGTTRVRDGLDLTDIVPRETREYDFIAAQFKYFSFYNMYIVTQKADYPNIQHLLYDLHRSFSNVKYVMLEENKQLPKMWLHYFRDWLQGLQDAFDSDWETGKIMPNNYKNGSDDGVLAYKLLVQTGSRDKPIDISQLTKQRLVDADGIINPSAFYIYLTAWVSNDPVAYAASQANIRPHRPEWVHDKADYMPETRLRIPAAEPIEYAQFPFYLNGLRDTSDFVEAIEKVRTICSNYTSLGLSSYPNGYPFLFWEQYIGLRHWLLLFISVVLACTFLVCAVFLLNPWTAGIIVMVLALMTVELFGMMGLIGIKLSAVPVVILIASVGIGVEFTVHVALAFLTAIGDKNRRAVLALEHMFAPVLDGAVSTLLGVLMLAGSEFDFIVRYFFAVLAILTILGVLNGLVLLPVLLSFFGPYPEVSPANGLNRLPTPSPEPPPSVVRFAMPPGHTHSGSDSSDSEYSSQTTVSGLSEELRHYEAQQGAGGPAHQVIVEATENPVFAHSTVVHPESRHHPPSNPRQQPHLDSGSLPPGRQGQQPRRDPPREGLWPPPYRPRRDAFEISTEGHSGPSNRARWGPRGARSHNPRNPASTAMGSSVPGYCQPITTVTASASVTVAVHPPPVPGPGRNPRGGLCPGYPETDHGLFEDPHVPFHVRCERRDSKVEVIELQDVECEERPRGSSSN

SEQ ID NO: 5698 - protein, 2944 aa, Homo sapiens
MTLRLLVAALCAGILAEAPRVRAQHRERVTCTRLYAADIVFLLDGSSSIGRSNFREVRSFLEGLVLPFSGAASAQGVRFATVQYSDDPRTEFGLDALGSGGDVIRAIRELSYKGGNTRTGAAILHVADHVFLPQLARPGVPKVCILITDGKSQDLVDTAAQRLKGQGVKLFAVGIKNADPEELKRVASQPTSDFFFFVNDFSILRTLLPLVSRRVCTTAGGVPVTRPPDDSTSAPRDLVLSEPSSQSLRVQWTAASGPVTGYKVQYTPLTGLGQPLPSERQEVNVPAGETSVRLRGLRPLTEYQVTVIALYANSIGEAVSGTARTTALEGPELTIQNTTAHSLLVAWRSVPGATGYRVTWRVLSGGPTQQQELGPGQGSVLLRDLEPGTDYEVTVSTLFGRSVGPATSLMARTDASVEQTLRPVILGPTSILLSWNLVPEARGYRLEWRRETGLEPPQKVVLPSDVTRYQLDGLQPGTEYRLTLYTLLEGHEVATPATVVPTGPELPVSPVTDLQATELPGQRVRVSWSPVPGATQYRIIVRSTQGVERTLVLPGSQTAFDLDDVQAGLSYTVRVSARVGPREGSASVLTVRREPETPLAVPGLRVVVSDATRVRVAWGPVPGASGFRISWSTGSGPESSQTLPPDSTATDITGLQPGTTYQVAVSVLRGREEGPAAVIVARTDPLGPVRTVHVTQASSSSVTITWTRVPGATGYRVSWHSAHGPEKSQLVSGEATVAELDGLEPDTEYTVHVRAHVAGVDGPPASVVVRTAPEPVGRVSRLQILNASSDVLRITWVGVTGATAYRLAWGRSEGGPMRHQILPGNTDSAEIRGLEGGVSYSVRVTALVGDREGTPVSIVVTTPPEAPPALGTLHVVQRGEHSLRLRWEPVPRAQGFLLHWQPEGGQEQSRVLGPELSSYHLDGLEPATQYRVRLSVLGPAGEGPSAEVTARTESPRVPSIELRVVDTSIDSVTLAWTPVSRASSYILSWRPLRGPGQEVPGSPQTLPGISSSQRVTGLEPGVSYIFSLTPVLDGVRGPEASVTQTPVCPRGLADVVFLPHATQDNAHRAEATRRVLERLVLALGPLGPQAVQVGLLSYSHRPSPLFPLNGSHDLGIILQRIRDMPYMDPSGNNLGTAVVTAHRYMLAPDAPGRRQHVPGVMVLLVDEPLRGDIFSPIREAQASGLNVVMLGMAGADPEQLRRLAPGMDSVQTFFAVDDGPSLDQAVSGLATALCQASFTTQPRPEPCPVYCPKGQKGEPGEMGLRGQVGPPGDPGLPGRTGAPGPQGPPGSATAKGERGFPGADGRPGSPGRAGNPGTPGAPGLKGSPGLPGPRGDPGERGPRGPKGEPGAPGQVIGGEGPGLPGRKGDPGPSGPPGPRGPLGDPGPRGPPGLPGTAMKGDKGDRGERGPPGPGEGGIAPGEPGLPGLPGSPGPQGPVGPPGKKGEKGDSEDGAPGLPGQPGSPGEQGPRGPPGAIGPKGDRGFPGPLGEAGEKGERGPPGPAGSRGLPGVAGRPGAKGPEGPPGPTGRQGEKGEPGRPGDPAVVGPAVAGPKGEKGDVGPAGPRGATGVQGERGPPGLVLPGDPGPKGDPGDRGPIGLTGRAGPPGDSGPPGEKGDPGRPGPPGPVGPRGRDGEVGEKGDEGPPGDPGLPGKAGERGLRGAPGVRGPVGEKGDQGDPGEDGRNGSPGSSGPKGDRGEPGPPGPPGRLVDTGPGAREKGEPGDRGQEGPRGPKGDPGLPGAPGERGIEGFRGPPGPQGDPGVRGPAGEKGDRGPPGLDGRSGLDGKPGAAGPSGPNGAAGKAGDPGRDGLPGLRGEQGLPGPSGPPGLPGKPGEDGKPGLNGKNGEPGDPGEDGRKGEKGDSGASGREGRDGPKGERGAPGILGPQGPPGLPGPVGPPGQGFPGVPGGTGPKGDRGETGSKGEQGLPGERGLRGEPGSVPNVDRLLETAGIKASALREIVETWDESSGSFLPVPERRRGPKGDSGEQGPPGKEGPIGFPGERGLKGDRGDPGPQGPPGLALGERGPPGPSGLAGEPGKPGIPGLPGRAGGVGEAGRPGERGERGEKGERGEQGRDGPPGLPGTPGPPGPPGPKVSVDEPGPGLSGEQGPPGLKGAKGEPGSNGDQGPKGDRGVPGIKGDRGEPGPRGQDGNPGLPGERGMAGPEGKPGLQGPRGPPGPVGGHGDPGPPGAPGLAGPAGPQGPSGLKGEPGETGPPGRGLTGPTGAVGLPGPPGPSGLVGPQGSPGLPGQVGETGKPGAPGRDGASGKDGDRGSPGVPGSPGLPGPVGPKGEPGPTGAPGQAVVGLPGAKGEKGAPGGLAGDLVGEPGAKGDRGLPGPRGEKGEAGRAGEPGDPGEDGQKGAPGPKGFKGDPGVGVPGSPGPPGPPGVKGDLGLPGLPGAPGVVGFPGQTGPRGEMGQPGPSGERGLAGPPGREGIPGPLGPPGPPGSVGPPGASGLKGDKGDPGVGLPGPRGERGEPGIRGEDGRPGQEGPRGLTGPPGSRGERGEKGDVGSAGLKGDKGDSAVILGPPGPRGAKGDMGERGPRGLDGDKGPRGDNGDPGDKGSKGEPGDKGSAGLPGLRGLLGPQGQPGAAGIPGDPGSPGKDGVPGIRGEKGDVGFMGPRGLKGERGVKGACGLDGEKGDKGEAGPPGRPGLAGHKGEMGEPGVPGQSGAPGKEGLIGPKGDRGFDGQPGPKGDQGEKGERGTPGIGGFPGPSGNDGSAGPPGPPGSVGPRGPEGLQGQKGERGPPGERVVGAPGVPGAPGERGEQGRPGPAGPRGEKGEAALTEDDIRGFVRQEMSQHCACQGQFIASGSRPLPSYAADTAGSQLHAVPVLRVSHAEEEERVPPEDDEYSEYSEYSVEEYQDPEAPWDSDDPCSLPLDEGSCTAYTLRWYHRAVTGSTEACHPFVYGGCGGNANRFGTREACERRCPPRVVQSQGTGTAQD

SEQ ID NO: 5699 - protein, 1030 aa, Homo sapiens
MAARRITQETFDAVLQEKAKRYHMDASGEAVSETLQFKAQDLLRAVPRSRAEMYDDVHSDGRYSLSGSVAHSRDAGREGLRSDVFPGPSFRSSNPSISDDSYFRKECGRDLEFSHSDSRDQVIGHRKLGHFRSQDWKFALRGSWEQDFGHPVSQESSWSQEYSFGPSAVLGDFGSSRLIEKECLEKESRDYDVDHPGEADSVLRGGSQVQARGRALNIVDQEGSLLGKGETQGLLTAKGGVGKLVTLRNVSTKKIPTVNRITPKTQGTNQIQKNTPSPDVTLGTNPGTEDIQFPIQKIPLGLDLKNLRLPRRKMSFDIIDKSDVFSRFGIEIIKWAGFHTIKDDIKFSQLFQTLFELETETCAKMLASFKCSLKPEHRDFCFFTIKFLKHSALKTPRVDNEFLNMLLDKGAVKTKNCFFEIIKPFDKYIMRLQDRLLKSVTPLLMACNAYELSVKMKTLSNPLDLALALETTNSLCRKSLALLGQTFSLASSFRQEKILEAVGLQDIAPSPAAFPNFEDSTLFGREYIDHLKAWLVSSGCPLQVKKAEPEPMREEEKMIPPTKPEIQAKAPSSLSDAVPQRADHRVVGTIDQLVKRVIEGSLSPKERTLLKEDPAYWFLSDENSLEYKYYKLKLAEMQRMSENLRGADQKPTSADCAVRAMLYSRAVRNLKKKLLPWQRRGLLRAQGLRGWKARRATTGTQTLLSSGTRLKHHGRQAPGLSQAKPSLPDRNDAAKDCPPDPVGPSPQDPSLEASGPSPKPAGVDISEAPQTSSPCPSADIDMKTMETAEKLARFVAQVGPEIEQFSIENSTDNPDLWFLHDQNSSAFKFYRKKVFELCPSICFTSSPHNLHTGGGDTTGSQESPVDLMEGEAEFEDEPPPREAELESPEASSGTCFPRKRISSKSLKVGMIPAPKRVCLIQEPKVHEPVRIAYDRPRGRPMSKKKKPKDLDFAQQKLTDKNLGFQMLQKMGWKEGHGLGSLGKGIREPVSVGTPSEGEGLGADGQEHKEDTFDVFRQRMMQMYRHKRANK

SEQ ID NO: 5700 - protein, 668 aa, Homo sapiens
MTVTYSSKVANATFFGFHRLLLKWRGSIYKLLYREFIVFAVLYTAISLVYRLLLTGVQKRYFEKLSIYCDRYAEQIPVTFVLGFYVTLVVNRWWNQFVNLPWPDRLMFLISSSVHGSDEHGRLLRRTLMRYVNLTSLLIFRSVSTAVYKRFPTMDHVVEAGFMTTDERKLFNHLKSPHLKYWVPFIWFGNLATKARNEGRIRDSVDLQSLMTEMNRYRSWCSLLFGYDWVGIPLVYTQVVTLAVYTFFFACLIGRQFLDPTKGYAGHDLDLYIPIFTLLQFFFYAGWLKVAEQLINPFGEDDDDFETNWCIDRNLQVSLLAVDEMHMSLPKMKKDIYWDDSAARPPYTLAAADYCIPSFLGSTVQMGLSGSDFPDEEWLWDYEKHGHRHSMIRRVKRFLSAHEHPSSPRRRSYRRQTSDSSMFLPRDDLSPARDLLDVPSRNPPRASPTWKKSCFPEGSPTLHFSMGELSTIRETSQTSTLQSLTPQSSVRTSPIKMPLVPEVLITAAEAPVPTSGGYHHDSATSILSSEFTGVQPSKTEQQQGPMGSILSPSEKETPPGGPSPQTVSASAEENIFNCEEDPGDTFLKRWSLPGFLGSSHTSLGNLSPDPMSSQPALLIDTETSSEISGINIVAGSRVSSDMLYLMENLDTKETDIIELNKETEESPK

SEQ ID NO: 5701 - protein, 1364 aa, Homo sapiens
SSPPKSRVELGKIHFKKHLLHVTSRPLLATTTAVASPPTHAAPLPAVIAESTTVDSPPSSPPPPPPPAQATTLSSPAPVTEPVALPHTPITVLMAAPVPLPVDVAVRSLKEPPIIIVPESLEADTKQDTISNSLEEHVTQILNEQADISSKKEDSHIGKDEEIPDSSKISLSCKKTGSKKKSSQSEGIFLGSESDEDSVRTSSSQRSHDLKFSASIEKERDFKKSSAPLKSEDLGKPSRSKTDRDDKYFSYSKLERDTRYVSSRCRSERERRRSRSHSRSERGSRTNLSYSRSERSHYYDSDRRYHRSSPYRERTRYSRPYTDNRARESSDSEEEYKKTYSRRTSSHSSSYRDLRTSSYSKSDRDCKTETSYLEMERRGKYSSKLERESKRTSENEAIKRCCSPPNELGFRRGSSYSKHDSSASRYKSTLSKPIPKSDKFKNSFCCTELNEEIKQSHSFSLQTPCSKGSELRMINKNPEREKAGSPAPSNRLNDSPTLKKLDELPIFKSEFITHDSHDSIKELDSLSKVKNDQLRSFCPIELNINGSPGAESDLATFCTSKTDAVLMTSDDSVTGSELSPLVKACMLSSNGFQNISRCKEKDLDDTCMLHKKSESPFRETEPLVSPHQDKLMSMPVMTVDYSKTVVKEPVDTRVSCCKTKDSDIYCTLNDSNPSLCNSEAENIEPSVMKISSNSFMNVHLESKPVICDSRNLTDHSKFACEEYKQSIGSTSSASVNHFDDLYQPIGSSGIASSLQSLPPGIKVDSLTLLKCGENTSPVLDAVLKSKKSSEFLKHAGKETIVEVGSDLPDSGKGFASRENRRNNGLSGKCLQEAQEEGNSILPERRGRPEISLDERGEGGHVHTSDDSEVVFSSCDLNLTMEDSDGVTYALKCDSSGHAPEIVSTVHEDYSGSSESSNDESDSEDTDSDDSSIPRNRLQSVVVVPKNSTLPMEETSPCSSRSSQSYRHYSDHWEDERLESRRHLYEEKFESIASKACPQTDKFFLHKGTEKNPEISFTQSSRKQIDNRLPELSHPQSDGVDSTSHTDVKSDPLGHPNSEETVKAKIPSRQQEELPIYSSDFEDVPNKSWQQTTFQNRPDSRLGKTELSFSSSCEIPHVDGLHSSEELRNLGWDFSQEKPSTTYQQPDSSYGACGGHKYQQNAEQYGGTRDYWQGNGYWDPRSGRPPGTGVVYDRTQGQVPDSLTDDREEEENWDQQDGSHFSDQSDKFLLSLQKDKGSVQAPEISSNSIKDTLAVNEKKDFSKNLEKNDIKDRGPLKKRRQEIESDSESDGELQDRKKVRVEVEQGETSVPPGSALVGPSCVMDDFRDPQRWKECAKQGKMPCYFDLIEENVYLTERMKYLWVLY

SEQ ID NO: 5702 - protein, 491 aa, Homo sapiens
MAIPKHSLSPVPWEEDSFLQVKVEEEEEASLSQGGESSHDHIAHSEAARLRFRHFRYEEASGPHEALAHLRALCCQWLQPEAHSKEQILELLVLEQFLGALPPEIQAWVGAQSPKSGEEAAVLVEDLTQVLDKRGWDPGAEPTEASCKQSDLGESEPSNVTETLMGGVSLGPAFVKACEPEGSSERSGLSGEIWTKSVTQQIHFKKTSGPYKDVPTDQRGRESGASRNSSSAWPNLTSQEKPPSEDKFDLVDAYGTEPPYTYSGKRSSKCRECRKMFQSASALEAHQKTHSRKTPYACSECGKAFSRSTHLAQHQVVHTGAKPHECKECGKAFSRVTHLTQHQRIHTGEKPYKCGECGKTFSRSTHLTQHQRVHTGERPYECDACGKAFSQSTHLTQHQRIHTGEKPYKCDACGRAFSDCSALIRHLRIHSGEKPYQCKVCPKAFAQSSSLIEHQRIHTGEKPYKCSDCGKAFSRSSALMVHLRIHITVLQ

SEQ ID NO: 5703 - protein, 616 aa, Homo sapiens
MSSLAVRDPAMDRSLRSVFVGNIPYEATEEQLKDIFSEVGSVVSFRLVYDRETGKPKGYGFCEYQDQETALSAMRNLNGREFSGRALRVDNAASEKNKEELKSLGPAAPIIDSPYGDPIDPEDAPESITRAVASLPPEQMFELMKQMKLCVQNSHQEARNMLLQNPQLAYALLQAQVVMRIMDPEIALKILHRKIHVTPLIPGKSQSVSVSGPGPGPGPGLCPGPNVLLNQQNPPAPQPQHLARRPVKDIPPLMQTPIQGGIPAPGPIPAAVPGAGPGSLTPGGAMQPQLGMPGVGPVPLERGQVQMSDPRAPIPRGPVTPGGLPPRGLLGDAPNDPRGGTLLSVTGEVEPRGYLGPPHQGPPMHHASGHDTRGPSSHEMRGGPLGDPRLLIGEPRGPMIDQRGLPMDGRGGRDSRAMETRAMETEVLETRVMERRGMETCAMETRGMEARGMDARGLEMRGPVPSSRGPMTGGIQGPGPINIGAGGPPQGPRQVPGISGVGNPGAGMQGTGIQGTGMQGAGIQGGGMQGAGIQGVSIQGGGIQGGGIQGASKQGGSQPSSFSPGQSQVTPQDQEKAALIMQVLQLTADQIAMLPPEQRQSILILKEQIQKSTGAS

SEQ ID NO: 5704 - protein, 784 aa, Homo sapiens
MEGDGGTPWALALLRTFDAGEFTGWEKVGSGGFGQVYKVRHVHWKTWLAIKCSPSLHVDDRERMELLEEAKKMEMAKFRYILPVYGICREPVGLVMEYMETGSLEKLLASEPLPWDLRFRIIHETAVGMNFLHCMAPPLLHLDLKPANILLDAHYHVKISDFGLAKCNGLSHSHDLSMDGLFGTIAYLPPERIREKSRLFDTKHDVYSFAIVIWGVLTQKKPFADEKNILHIMVKVVKGHRPELPPVCRARPRACSHLIRLMQRCWQGDPRVRPTFQEITSETEDLCEKPDDEVKETAHDLDVKSPPEPRSEVVPARLKRASAPTFDNDYSLSELLSQLDSGVSQAVEGPEELSRSSSESKLPSSGSGKRLSGVSSVDSAFSSRGSLSLSFEREPSTSDLGTTDVQKKKLVDAIVSGDTSKLMKILQPQDVDLALDSGASLLHLAVEAGQEECAKWLLLNNANPNLSNRRGSTPLHMAVERRVRGVVELLLARKISVNAKDEDQWTALHFAAQNGDESSTRLLLEKNASVNEVDFEGRTPMHVACQHGQENIVRILLRRGVDVSLQGKDAWLPLHYAAWQGHLPIVKLLAKQPGVSVNAQTLDGRTPLHLAAQRGHYRVARILIDLCSDVNVCSLLAQTPLHVAAETGHTSTARLLLHRGAGKEAMTSDGYTALHLAARNGHLATVKLLVEEKADVLARGPLNQTALHLAAAHGHSEVVEELVSADVIDLFDEQGLSALHLAAQGRHAQTVETLLRHGAHINLQSLKFQGGHGPAATLLRRSKT

SEQ ID NO: 5705 - protein, 684 aa, Homo sapiens
MACLGFLLPVGFLLLISTVAGGKYGVAHVVSENWSKDYCILFSSDYITLPRDLHHAPLLPLYDGTKAPWCPGEDSPHQAQLRSPSQRPLRQTTAMVMRGNCSFHTKGWLAQGQGAHGLLIVSRVSDQQCSDTTLAPQDPRQPLADLTIPVAMLHYADMLDILSHTRGEAVVRVAMYAPPEPIIDYNMLVIFILAVGTVAAGGYWAGLTEANRLQRRRARRGGGSGGHHQLQEAAAAEGAQKEDNEDIPVDFTPAMTGVVVTLSCSLMLLLYFFYDHFVYVTIGIFGLGAGIGLYSCLSPLVCRLSLRQYQRPPHSLWASLPLPLLLLASLCATVIIFWVAYRNEDRWAWLLQDTLGISYCLFVLHRVRLPTLKNCSSFLLALLAFDVFFVFVTPFFTKTGESIMAQVALGPAESSSHERLPMVLKVPRLRVSALTLCSQPFSILGFGDIVVPGFLVAYCCRFDVQVCSRQIYFVACTVAYAVGLLVTFMAMVLMQMGQPALLYLVSSTLLTSLAVAACRQELSLFWTGQGRAKMCGLGCAPSAGSRQKQEGAADAHTASTLERGTSRGAGDLDSNPGEDTTEIVTISENEATNPEDRSDSSEGWSDAHLDPNELPFIPPGASEELMPLMPMAMLIPLMPLMPPPSELGHVHAQAQAHETGLPWAGLHKRKGLKVRKSMSTQAPL

SEQ ID NO: 5706 - protein, 219 aa, Homo sapiens
MPFHHVTAGLLYKGNYLNRSLSAGSDSEQLANISVEELDEIREAFRVLDRDGNGFISKQELGMAMRSLGYMPSEVELAIIMQRLDMDGDGQVDFDEFMTILGPKLVSSEGRDGFLGNTIDSIFWQFDMQRITLEELKHILYHAFRDHLTMKDIENIIINEEESLNETSGNCQTEFEGVHSQKQNRQTCVRKSLICAFAMAFIISVMLIAANQILRSGME

SEQ ID NO: 5707 - protein, 402 aa, Homo sapiens
MMVALRGASALLVLFLAAFLPPPQCTQDPAMVHYIYQRFRVLEQGLEKCTQATRAYIQEFQEFSKNISVMLGRCQTYTSEYKSAVGNLALRVERAQREIDYIQYLREADECIESEDKTLAEMLLQEAEEEKKIRTLLNASCDNMLMGIKSLKIVKKMMDTHGSWMKDAVYNSPKVYLLIGSRNNTVWEFANIRAFMEDNTKPAPRKQILTLSWQGTGQVIYKGFLFFHNQATSNEIIKYNLQKRTVEDRMLLPGGVGRALVYQHSPSTYIDLAVDEHGLWAIHSGPGTHSHLVLTKIEPGTLGVEHSWDTPCRSQDAEASFLLCGVLYVVYSTGGQGPHRITCIYDPLGTISEEDLPNLFFPKRPRSHSMIHYNPRDKQLYAWNEGNQIIYKLQTKRKLPLK

SEQ ID NO: 5708 - protein, 562 aa, Homo sapiens
MSEELAQGPKESPPAPRAGPREVWKKGGRLLSVLLAVNVLLLACTLISGGAFNKVAVYDTDVFALLTAMMLLATLWILFYLLRTVRCPCAVPYRDAHAGPIWLRGGLVLFGICTLIMDVFKTGYYSSFFECQSAIKILHPLIQAVFVIIQTYFLWVSAKDCVHVHLDLTWCGLMFTLTTNLAIWMAAVVDESVHQSHSYSSSHSNASHARLISDQHADNPVGGDSCLCSTAVCQIFQQGYFYLYPFNIEYSLFASTMLYVMWKNVGRFLASTPGHSHTPTPVSLFRETFFAGPVLGLLLFVVGLAVFIIYEVQVSGDGSRTRQALVIYYSFNIVCLGLTTLVSLSGSIIYRFDRRAMDHHKNPTRTLDVALLMGAALGQYAISYYSIVAVVAGTPQDLLAGLNLTHALLMIAQHTFQNMFIIESLHRGPPGAEPHSTHPKEPCQDLTFTNLDALHTLSACPPNPGLVSPSPSDQREAVAIVSTPRSQWRRQCLKDISLFLLLCNVILWIMPAFGARPHFSNTVEVDFYGYSLWAVIVNICLPFGIFYRMHAVSSLLEVYVLS

SEQ ID NO: 5709 - protein, 1464 aa, Homo sapiens [sequence omitted]

SEQ ID NO: 5710 - protein, 381 aa, Homo sapiens
MGPIGAEADENQTVEEMKVEQYGPQTTPRGELVPDPEPELIDSTKLIEVQVVLILAYCSIILLGVIGNSLVIHVVIKFKSMRTVTNFFIANLAVADLLVNTLCLPFTLTYTLMGEWKMGPVLCHLVPYAQGLAVQVSTITLTVIALDRHRCIVYHLESKISKRISFLIIGLAWGISALLASPLAIFREYSLIEIIPDFEIVACTEKWPGEEKSIYGTVYSLSSLLILYVLPLGIISFSYTRIWSKLKNHVSPGAANDHYHQRRQKTTKMLVCVVVVFAVSWLPLHAFQLAVDIDSQVLDLKEYKLIFTVFHIIAMCSTFANPLLYGWMNSNYRKAFLSAFRCEQRLDAIHSEVSVTFKAKKNLEVRKNSGPNDSFTEATNV

SEQ ID NO: 5711 - protein, 631 aa, Homo sapiens
MAAQRGMPSSAVRVLEEALGMGLTAAGDARDTADAVAAEGAYYLEQVTITEASEDDYEYEEIPDDNFSIPEGEEDLAKAIQMAQEQATDTEILERKTVLPSKHAVPEVIEDFLCNFLIKMGMTRTLDCFQSEWYELIQKGVTELRTVGNVPDVYTQIMLLENENKNLKKDLKHYKQAADKAREDLLKIQKERDFHRMHHKRIVQEKNKLINDLKGLKLHYASYEPTIRVLHEKHHTLLKEKMLTSLERDKVVGQISGLQETLKKLQRGHSYHGPQIKVDHSREKENAPEGPTQKGLREAREQNKCKTKMKGNTKDSEFPIDMQPNPNLNVSKESLSPAKFDYKLKNIFRLHELPVSCVSMQPHKDILVSCGEDRLWKVLGLPKCNVLLTGFGHTDWLSDCCFHPSGDKLATSSGDTTVKLWDLCKGDCILTFEGHSRAVWSCTWHSCGNFVASSSLDKTSKIWDVNSERCRCTLYGHTDSVNSIEFFPFSNTLLTSSADKTLSIWDARTGICEQSLYGHMHSINDAIFDPRGHMIASCDACGVTKLWDFRKLLPIVSIDIGPSPGNEVNFDSSGRVLAQASGNGVIHLLDLKSGEIHKLMGHENEAHTVVFSHDGEILFSGGSDGTVRTWS

SEQ ID NO: 5712 - protein, 586 aa, Homo sapiens
MGPLTFRDVKIEFSLEEWQCLDTAQRNLYRDVMLENYRNLVFLGIAVSKPDLITWLEQGKEPWNLKRHEMVDKTPVMCSHFAQDVWPEHSIKDSFQKVILRTYGKYGHENLQLRKDHKSVDACKVYKGGYNGLNQCLTTTDSKIFQCDKYVKVFHKFPNVNRNKIRHTGKKPFKCKNRGKSFCMLSQLTQHKKIHTREYSYKCEECGKAFNWSSTLTKHKIIHTGEKPYKCEECGKAFNRSSNLTKHKIIHTGEKPYKCEECGKAFNRSSTLTKHKRIHTEEKPYKCEECGKAFNQFSILNKHKRIHMEDKPYKCEECGKAFRVFSILKKHKIIHTGEKPYKCEECGKAFNQFSNLTKHKIIHTGEKPYKCDECGKAFNQSSTLTKHKRIHTGEKPYKCEECGKAFKQSSTLTEHKIIHTGEKPYKCEKCGKAFSWSSAFTKHKRNHMEDKPYKCEECGKAFSVFSTLTKHKIIHTREKPYKCEECGKAFNQSSIFTKHKIIHTEGKSYKCEKCGNAFNQSSNLTARKIIYTGEKPYKYEECDKAFNKFSTLITHQIIYTGEKPCKHECGRAFNKSSNYTKEKLQT

SEQ ID NO: 5713 - protein, 2000 aa, Homo sapiens
MKAADTVILWARSKNDQLRISFPPGLCWGDRMPDKDDIRLLPSALGVKKRKRGPKKQKENKPGKPRKRKKRDSEEEFGSERDEYREKSESGGSEYGTGPGRKRRRKHREKKEKKTKRRKKGEGDGGQKQVEQKSSATLLLTWGLEDVEHVFSEEDYHTLTNYKAFSQFMRPLIAKKNPKIPMSKMMTILGAKWREFSANNPFKGSAAAVAAAAAAAAAAVAEQVSAAVSSATPIAPSGPPALPPPPAADIQPPPIRRAKTKEGKGPGHKRRSKSPRVPDGRKKLRGKKMAPLKIKLGLLGGKRKKGGSYVFQSDEGPEPEAEESDLDSGSVHSASGRPDGPVRTKKLKRGRPGRKKKKVLGCPAVAGEEEVDGYETDHQDYCEVCQQGGEIILCDTCPRAYHLVCLDPELDRAPEGKWSCPHCEKEGVQWEAKEEEEEYEEEGEEEGEKEEEDDHMEYCRVCKDGGELLCCDACISSYHIHCLNPPLPDIPNGEWLCPRCTCPVLKGRVQKILHWRWGEPPVAVPAPQQADGNPDVPPPRPLQGRSEREFFVKWVGLSYWHCSWAKELQLEIFHLVMYRNYQRKNDMDEPPPLDYGSGEDDGKSDKRKVKDPHYAEMEEKYYRFGIKPEWMTVHRIINHSVDKKGNYHYLVKWRDLPYDQSTWEEDEMNIPEYEEHKQSYWRHRELIMGEDPAQPRKYKKKKKELQGDGPPSSPTNDPTVKYETQPRFITATGGTLHMYQLEGLNWLRFSWAQGTDTILADEMGLGKTIQTIVFLYSLYKEGHTKGPFLVSAPLSTIINWEREFQMWAPKFYVVTYTGDKDSRAIIRENEFSFEDNAIKGGKKAFKMKREAQVKFHVLLTSYELITIDQAALGSIRWACLVVDEAHRLKNNQSKFFRVLNGYKIDHKLLLTGTPLQNNLEELFHLLNFLTPERFNNLEGFLEEFADISKEDQIKKLHDLLGPHMLRRLKADVFKNMPAKTELIVRVELSPMQKKYYKYILTRNFEALNSRGGGNQVSLLNIMMDLKKCCNHPYLFPVAAMESPKLPSGAYEGGALIKSSGKLMLLQKMLRKLKEQGHRVLIFSQMTKMLDLLEDFLDYEGYKYERIDGGITGALRQEAIDRFNAPGAQQFCFLLSTRAGGLGINLATADTVIIFDSDWNPHNDIQAFSRAHRIGQANKVMIYRFVTRASVEERITQVAKRKMMLTHLVVRPGLGSKAGSMSKQELDDILKFGTEELFKDENEGENKEEDSSVIHYDNEAIARLLDRNQDATEDTDVQNMNEYLSSFKVAQYVVREEDKIEEIEREIIKQEENVDPDYWEKLLRHHYEQQQEDLARNLGKGKRVRKQVNYNDAAQEDQDNQSEYSVGSEEEDEDFDERPEGRRQSKRQLRNEKDKPLPPLLARVGGNIEVLGFNTRQRKAFLNAVMRWGMPPQDAFTTQWLVRDLRGKTEKEFKAYVSLFMRHLCEPGADGSETFADGVPREGLSRQQVLTRIGVMSLVKKKVQEFEHINGRWSMPELMPDPSADSKRSSRASSPTKTSPTTPEASATNSPCTSKPATPAPSEKGEGIRTPLEKEEAENQEEKPEKNSRIGEKMETEADAPSPAPSLGERLEPRKIPLEDEVPGVPGEMEPEPGYRGDREKSATESTPGERGEEKPLDGQEHRERPEGETGDLGKREDVKGDRELRPGPRDEPRSNGRREEKTEKPRFMFNIADGGFTELHTLWQNEERAAISSGKLNEIWHRRHDYWLLAGIVLHGYARWQDIQNDAQFAIINEPFKTEANKGNFLEMKNKFLARRFKLLEQALVIEEQLRRAAYLNLSQEPAHPAMALHARFAEAECLAESHQHLSKESLAGNKPANAVLHKVLNQLEELLSDMKADVTRLPATLSRIPPIAARLQMSERSILSRLASKGTEPHPTPAYPPGPYATPPGYGAAFSAAPVGALAAAGANYSQMPAGSFITAATNGPPVLVKKEKEMVGALVSDGLDRKEPRAGEVICIDD

SEQ ID NO: 5714 - protein, 360 aa, Homo sapiens
MNPTDIADTTLDESIYSNYYLYESIPKPCTKEGIKAFGELFLPPLYSLVFVFGLLGNSVVVLVLFKYKRLRSMTDVYLLNLAISDLLFVFSLPFWGYYAADQWVFGLGLCKMISWMYLVGFYSGIFFVMLMSIDRYLAIVHAVFSLRARTLTYGVITSLATWSVAVFASLPGFLFSTCYTERNHTYCKTKYSLNSTTWKVLSSLEINILGLVIPLGIMLFCYSMIIRTLQHCKNEKKNKAVKMIFAVVVLFLGFWTPYNIVLFLETLVELEVLQDCTFERYLDYAIQATETLAFVHCCLNPIIYFFLGEKFRKYILQLFKTCRGLFVLCQYCGLLQIYSADTPSSSYTQSTMDHDLHDAL

SEQ ID NO: 5715 - protein, 950 aa, Homo sapiens
MVTTMSVRLRFLSPGDTGAVGVVGRSASFAGFSSAQSRRIAKSINRNSVRSRMPAKSSKMYGTLRKGSVCADPKPQQVKKIFEALKRGLKEYLCVQQAELDHLSGRHKDTRRNSRLAFYYDLDKQTRCVERHIRKMEFHISKVDELYEDYCIQCRLRDGASSMQRAFARCPPSRAARESLQELGRSLHECAEDMWLIEGALEVHLGEFHIRMKGLVGYARLCPGDHYEVLMRLGRQRWKLKGRIESDDSQTWDEEEKAFIPTLHENLDIKVTELRGLGSLAVGAVTCDIADFFTTRPQVIVVDITELGTIKLQLEVQWNPFDTESFLVSPSPTGKFSMGSRKGSLYNWTPPSTPSFRERYYLSVLQQPTQQALLLGGPRATSILSYLSDSDLRGPSLRSQSQELPEMDSFSSEDPRDTETSTSASTSDVGFLPLTFGPHASIEEEAREDPLPPGLLPEMAHLSGGPFAEQPGWRNLGGESPSLPQGSLFHSGTASSSQNGHEEGATGDREDGPGVALEGPLQEVLELLRPTDSTQPQLRELEYQVLGFRDRLKPCRARQEHTSAESLMECILESFAFLNADFALDELSLFGGSQGLRKDRPLPPPSSLKASSRELTAGAPELDVLLMVHLQVCKALLQKLASPNLSRLVQECLLEEVAQQKHVLETLSVLDFEKVGKATSIEEIIPQASRTKGCLKLWRGCTGPGRVLSCPATTLLNQLKKTFQHRVRGKYPGQLEIACRRLLEQVVSCGGLLPGAGLPEEQIITWFQFHSYLQRQSVSDLEKHFTQLTKEVTLIEELHCAGQAKVVRKLQGKRLGQLQPLPQTLRAWALLQLDGTPRVCRAASARLAGAVRNRSFREKALLFYTNALAENDARLQQAACLALKHLKGIESIDQTASLCQSDLEAVRAAARETTLSFGEKGRLAFEKMDKLCSEQREVFCQEADVEITIF

SEQ ID NO: 5716 - protein, 803 aa, Homo sapiens
MITLTELKCLADAQSSYHILKPWWDVFWYYITLIMLLVAVLAGALQLTQSRVLCCLPCKVEFDNHCAVPWDILKASMNTSSNPGTPLPLPLRIQNDLHRQQYSYIDAVCYEKQLHWFAKFFPYLVLLHTLIFAACSNFWLHYPSTSSRLEHFVAILHKCFDSPWTTRALSETVAEQSVRPLKLSKSKILLSSSGCSADIDSGKQSLPYPQPGLESAGIESPTSSVLDKKEGEQAKAIFEKVKRFRMHVEQKDIIYRVYLKQIIVKVILFVLIITYVPYFLTHITLEIDCSVDVQAFTGYKRYQCVYSLAEIFKVLASFYVILVILYGLTSSYSLWWMLRSSLKQYSFEALREKSNYSDIPDVKNDFAFILHLADQYDPLYSKRFSIFLSEVSENKLKQINLNNEWTVEKLKSKLVKNAQDKIELHLFMLNGLPDNVFELTEMEVLSLELIPEVKLPSAVSQLVNLKELRVYHSSLVVDHPALAFLEENLKILRLKFTEMGKIPRWVFHLKNLKELYLSGCVLPEQLSTMQLEGFQDLKNLRTLYLKSSLSRIPQVVTDLLPSLQKLSLDNEGSKLVVLNNLKKMVNLKSLELISCDLERIPHSIFSLNNLHELDLRENNLKTVEEIISFQHLQNLSCLKLWHNNIAYIPAQIGALSNLEQLSLDHNNIENLPLQLFLCTKLHYLDLSYNHLTFIPEEIQYLSNLQYFAVTNNNIEMLPDGLFQCKKLQCLLLGKNSLMNLSPHVGELSNLTHLELIGNYLETLPPELEGCQSLKRNCLIVEENLLNTLPLPVTERLQTCLDKC

SEQ ID NO: 5717 - protein, 494 aa, Homo sapiens
MLASGLLLVTLLACLTVMVLMSVWRQRKSRGKLPPGPTPLPFIGNYLQLNTEQMYNSLMKISERYGPVFTIHLGPRRVVVLCGHDAVKEALVDQAEEFSGRGEQATFDWLFKGYGVAFSNGERAKQLRRFSIATLRGFGVGKRGIEERIQEEAGFLIDALRGTHGANIDPTFFLSRTVSNVISSIVFGDRFDYEDKEFLSLLRMMLGSFQFTATSTGQLYEMFSSVMKHLPGPQQQAFKELQGLEDFIAKKVEHNQRTLDPNSPRDFIDSFLIRMQEEEKNPNTEFYLKNLVMTTLNLFFAGTETVSTTLRYGFLLLMKHPEVEAKVHEEIDRVIGKNRQPKFEDRAKMPYTEAVIHEIQRFGDMLPMGLAHRVNKDTKFRDFFLPKGTEVFPMLGSVLRDPRFFSNPRDFNPQHFLDKKGQFKKSDAFVPFSIGKRYCFGEGLARMELFLFFTTIMQNFRFKSPQSPKDIDVSPKHVGFATIPRNYTMSFLPR

SEQ ID NO: 5718 - protein, 638 aa, Homo sapiens
MSALAGEDVWRCPGCGDHIAPSQIWYRTVNETWHGSCFRCSECQDSLTNWYYEKDGKLYCPKDYWGKFGEFCHGCSLLMTGPFMVAGEFKYHPECFACMSCKVIIEDGDAYALVQHATLYCGKCHNEVVLAPMFERLSTESVQEQLPYSVTLISMPATTEGRRGFSVSVESACSNYATTVQVKEVNRMHISPNNRNAIHPGDRILEINGTPVRTLRVEEVEDAISQTSQTLQLLIEHDPVSQRLDQLRLEARLAPHMQNAGHPHALSTLDTKENLEGTLRRRSLRRSNSISKSPGPSSPKEPLLFSRDISRSESLRCSSSYSQQIFRPCDLIHGEVLGKGFFGQAIKVTHKATGKVMVMKELIRCDEETQKTFLTEVKVMRSLDHPNVLKFIGVLYKDKKLNLLTEYIEGGTLKDFLRSMDPFPWQQKVRFAKGIASGMAYLHSMCIIHRDLNSHNCLIKLDKTVVVADFGLSRLIVEERKRAPMEKATTKKRTLRKNDRKKRYTVVGNPYWMAPEMLNGKSYDETVDIFSFGIVLCEIIGQVYADPDCLPRTLDFGLNVKLFWEKFVPTDCPPAFFPLAAICCRLEPESRPAFSKLEDSFEALSLYLGELGIPLPAELEELDHTVSMQYGLTRDSPP

SEQ ID NO: 5719 - protein, 274 aa, Homo sapiens
MPRAEPRATLGEQEKAGLPLGAWRLYLLRHFRKQTELRRSGSRDVTGALLVAAAVASEAVGSLRVAEGGPNTLLLQVLRSWPWCNKELKTMEERKVKRRSPKSFSAHCTQVVNAKKNAIPVSKSTGFSNPASQSTSQRPKLKRVMKEKTKPQGGEGKGAQSTPIQHSFLTDVSDVQEMERGLLSLLNDFHSGKLQAFGNECSIEQMEHVRGMQEKLARLNLELYGELEELPEDKRKTASDSNLDRLLSDLEELNSSIQKLHLADAQDVPNTSAS

SEQ ID NO: 5720 - protein, 277 aa, Homo sapiens
MNGFASLLRRNQFILLVLFLLQIQSLGLDIDSRPTAEVCATHTISPGPKGDDGEKGDPGEEGKHGKVGRMGPKGIKGELGDMGDQGNIGKTGPIGKKGDKGEKGLLGIPGEKGKAGTVCDCGRYRKFVGQLDISIARLKTSMKFVKNVIAGIRETEEKFYYIVQEEKNYRESLTHCRIRGGMLAMPKDEAANTLIADYVAKSGFFRVFIGVNDLEREGQYMFTDNTPLQNYSNWNEGEPSDPYGHEDCVEMLSSGRWNDTECHLTMYFVCEFIKKKK

SEQ ID NO: 5721 - protein, 842 aa, Homo sapiens
MAVRPGLWPALLGIVLAAWLRGSGAQQSATVANPVPGANPDLLPHFLVEPEDVYIVKNKPVLLVCKAVPATQIFFKCNGEWVRQVDHVIERSTDGSSGLPTMEVRINVSRQQVEKVFGLEEYWCQCVAWSSSGTTKSQKAYIRIAYLRKNFEQEPLAKEVSLEQGIVLPCRPPEGIPPAEVEWLRNEDLVDPSLDPNVYITREHSLVVRQARLADTANYTCVAKNIVARRRSASAAVIVYVDGSWSPWSKWSACGLDCTHWRSRECSDPAPRNGGEECQGTDLDTRNCTSDLCVHTASGPEDVALYVGLIAVAVCLVLLLLVLILVYCRKKEGLDSDVADSSILTSGFQPVSIKPSKADNPHLLTIQPDLSTTTTTYQGSLCPRQDGPSPKFQLTNGHLLSPLGGGRHTLHHSSPTSEAEEFVSRLSTQNYFRSLPRGTSNMTYGTFNFLGGRLMIPNTGISLLIPPDAIPRGKIYEIYLTLHKPEDVRLPLAGCQTLLSPIVSCGPPGVLLTRPVILAMDHCGEPSPDSWSLRLKKQSCEGSWEDVLHLGEEAPSHLYYCQLEASACYVFTEQLGRFALVGEALSVAAAKRLKLLLFAPVACTSLEYNIRVYCLHDTHDALKEVVQLEKQLGGQLIQEPRVLHFKDSYHNLRLSIHDVPSSLWKSKLLVSYQEIPFYHIWNGTQRYLHCTFTLERVSPSTSDLACKLWVWQVEGDGQSFSINFNITKDTRFAELLALESEAGVPALVGPSAFKIPFLIRQKIISSLDPPCRRGADWRTLAQKLHLDSHLSFFASKPSPTAMILNLWEARHFPNGNLSQLAAAVAGLGQPDAGLFTVSEAEC

SEQ ID NO: 5722 - protein, 1132 aa, Homo sapiens
MQMVPSLPPASECAGEEKRVGTRTVFVGNHPVSETEAYIAQRFCDNRIVSSKYTLWNFLPKNLFEQFRRIANFYFLIIFLVQVTVDTPTSPVTSGLPLFFVITVTAIKQGYEDCLRHRADNEVNKSTVYIIENAKRVRKESEKIKVGDVVEVQADETFPCDLILLSSCTTDGTCYVTTASLDGESNCKTHYAVRDTIALCTAESIDTLRAAIECEQPQPDLYKFVGRINIYSNSLEAVARSLGPENLLLKGATLKNTEKIYGVAVYTGMETKMALNYQGKSQKRSAVEKSINAFLIVYLFILLTKAAVCTTLKYVWQSTPYNDEPWYNQKTQKERETLKVLKMFTDFLSFMVLFNFIIPVSMYVTVEMQKFLGSFFISWDKDFYDEEINEGALVNTSDLNEELGQVDYVFTDKTGTLTENSMEFIECCIDGHKYKGVTQEVDGLSQTDGTLTYFDKVDKNREELFLRALCLCHTVEIKTNDAVDGATESAELTYISSSPDEIALVKGAKRYGFTFLGNRNGYMRVENQRKEIEEYELLHTLNFDAVRRRMSVIVKTQEGDILLFCKGADSAVFPRVQNHEIELTKVHVERNAMDGYRTLCVAFKEIAPDDYERINRQLIEAKMALQDREEKMEKVFDDIETNMNLIGATAVEDKLQDQAAETIEALHAAGLKVWVLTGDKMETAKSTCYACRLFQTNTELLELTTKTIEESERKEDRLHELLIEYRKKLLHEFPKSTRSFKKAWTEHQEYGLIIDGSTLSLILNSSQDSSSNNYKSIFLQICMKCTAVLCCRMAPLQKAQIVRMVKNLKGSPITLSIGDGANDVSMILESHVGIGIKGKEGRQAARNSDYSVPKFKHLKKLLLAHGHLYYVRIAHLVQYFFYKNLCFILPQFLYQFFCGFSQQPLYDAAYLTMYNICFTSLPILAYSLLEQHINIDTLTSDPRLYMKISGNAMLQLGPFLYWTFLAAFEGTVFFFGTYFLFQTASLEENGKVYGNWTFGTIVFTVLVFTVTLKLALDTRFWTWINHFVIWGSLAFYVFFSFFWGGIIWPFLKQQRMYFVFAQMLSSVSTWLAIILLIFISLFPEILLIVLKNVRRRSARRNLSCRRASDSLSARPSVRPLLLRTFSDESNVL

SEQ ID NO: 5723 - protein, 814 aa, Homo sapiens
MAVQRAASPRRPPAPLWPRLLLPLLLLLLPAPSEGLGHSAELAFAVEPSDDVAVPGQPIVLDCRVEGTPPVRITWRKNGVELPESTHSTLLANGSLMIRHFRLEPGGSPSDEGDYECVAQNRFGLVVSRKARIQAATMSDFHVHPQATVGEEGGVARFQCQIHGLPKPLITWEKNRVPIDTDNERYTLLPKGVLQITGLRAEDGGIFHCVASNIASIRISHGARLTVSGSGSGAYKEPAILVGPENLTLTVHQTAVLECVATGNPRPIVSWSRLDGRPIGVEGIQVLGTGNLIISDVTVQHSGVYVCAANRPGTRVRRTAQGRLVVQAPAEFVQHPQSISRPAGTTAMFTCQAQGEPPPHVTWLKNGQVLGPGGHVRLKNNNSTLTISGIGPEDEAIYQCVAENSAGSSQASARLTVLWAEGLPGPPRNVRAVSVSSTEVRVSWSEPLANTKEIIGYVLHIRKAADPPELEYQEAVSKSTFQHLVSDLEPSTAYSFYIKAYTPRGASSASVPTLASTLGEAPAPPPLSVRVLGSSSLQLLWEPWPRLAQHEGGFKLFYRPASKTSFTGPILLPGTVSSYNLSQLDPTAVYEVKLLAYNQHGDGNATVRFVSLRGASERTALSPPCDCRKEEAANQTSTTGIVIGIHIGVTCIIFCVLFLLFGQRGRVLLCKDVENQLSPPQGPRSQRDPGILALNGARRGQRGQLGRDEKRVDMKELEQLFPPASAAGQPDPRPTQDPAAPAPCEETQLSVLPLQGCGLMEGKTTEAKTTEATAPCAGLAAAPPPPDGGPGLLSEGQASRPAAARVTQPAHSEQ

SEQ ID NO: 5724 - protein, 766 aa, Homo sapiens
MGRRRLLVWLCAVAALLSGAQARGTPLLARPAPPGASRYSLYTTGWRPRLRPGPHKALCAYVVHRNVTCILQEGAESYVKAEYRQCRWGPKCPGTVTYRTVLRPKYKVGYKTVTDLAWRCCPGFTGKRCPEHLTDHGAASPQLEPEPQIPSGQLDPGPRPPSYSRAAPSPHGRKGPGLFGERLERLEGDVQRLAQTYGTLSGLVASHEDPNRMTGGPRAPAVPVGFGVIPEGLVGPGDRARGPLTPPLDEILSKVTEVSNTLQTKVQLLDKVHGLALGHEAHLQRLREAPPSPLTSLALLEEYVDRRLHRLWGSLLDGFEQKLQGVQSECDLRVQEVRRQCEEGQAASRRLHQSLDGRELALRQELSQLGSQLQGLSVSGRGSCCGQLALINARMDGLERALQAVTETQRGPGAPAGDELTRLSAAMLEGGVDGLLEGLETLNGTEGGARGCCLRLDMGGWGVGGFGTMLEERVQSLEERLATLAGELSHDSASPGRSARPLVQTELAVLEQRLVSLETSCTPSTTSAILDSLVAEVKAWQSRSEALLRQVASHAALLQQLNGTVAEVQGQLAEGTGSSLQGEITLLKVNLNSVSKSLTGLSDSVSQYSDAFLAANTSLDERERKVEAEVQAIQEQVSSQGSRLQAGHRQVLNLRGELEQLKAGVAKVASGLSRCQDTAQKLQHTVGHFDQRVAQVEGACRRLGLLAAGLDSLPTEPLRPREGLWSHVDQLNRTLAQHTQDIARLRDDLLDCQAQLAEQVRPGQAN

SEQ ID NO: 5725 - protein, 1288 aa, Homo sapiens
MGCTPSHSDLVNSVAKSGIQFLKKPKAIRPGCQGGSERGSIPLLVKNSTCYDAGEGLAEEQPSPRRNQTTAKGLCQLMGDPASGKRKDMEGLIPGTKTSSSQLNKSQSHMAKDIPFKTQGSHGSQGADFSGDESEESSTQDTSKWKRTAKCHTSSTQSHCYQTIHPAHEPEGKVDFPEPLVKAHQQAYTYLHSSLSKYEAILCIIHQATQTRELLQPMVSFLLLCFEEISQLLGEISKDGEVLLQEVREDLAWPLKKREPQEQPNLLQQLLQYTVSKLQVLNGTVASLTGSFLEGSSSYLHSTATHLENKLSTKRNVDERLLRALRQLESLASGCGDPGVQGLPLCSEDSGIGADNESVQSVDKLGKQTSWDLAPEPEEWKSVTSPHTEARQSGHTWQQSPFCLGSGRPQDCLLSGAPMAKVQPRAQDEARSPCLSSTSPENITSPPLKLGTSTPCDSFGIGVSVEPHLSKTSRPMDASSLSDSEDSSPEEEEEDKMSSMSLCAWQEKTPHSRPQSSPADRESPFQARTRRLRSLQAQEMILKMKESISERIKFVPVPCGHQDWSEEEEGRTVVPPRPSTVSGSRRAPERQTRSQSESCLQSHVEDPTFQELRRVQRDLSQKLEAFYALGAKGQGQSQEQILQPRAAAVWPNGTCRVSPSNTTSRLKASLTKNFSILPSQDKSILQKCNPHPEDEQGKAGKLPNAIPSGEVSEAAKATDWNVRGCPTRTSVKKLIETFSPTESLRMLGDSKDAGASPCLRNCIMPPRFPKYTGLAPLYPKPQISPASGRESLKMGIGWKPLAPIFPPLPKAEAAKSEELSCEMEGNLEHLPPPPMEVLMDKSFASLESPESSKSTENSPKETQEPGPGEAGPTRRTWASPKLRASVSPLDLLPSKSTASLTKPHSTGPGSGRSSCQPRKPALDLSSPPATSQSPEVKGGTWSQAEKATSLYRQPRKAIAWHHSGPPSGQNRTSESSLARPRQSRERSPPVGRKASPTRTHWVPQADKRRRSLPSSYRPAQPSPSAVQTPPSPPVSPRVLSPPTTKRRTSPPHQPKLPNPPPESAPAQCKVPSPPTQHPEASPPFSIPSPSPPMSPSQEHKETRDSEDSQAVIAKVSGNTHSIFCPATSSLFEAKPPLSTAHPLTPPSLPPEAGGPLGNPAECWKNSSGPWLRADSQRRAALCALNPLPFLRRTASDRQPGGRPQPPTLDPTSTSYESQLGQNSSSEESPKKDTEPGSSPCSPELQGGTRRASPPEFCVLGHGLQPEPRTGHIQDKSQPEAQPQQEEVS

SEQ ID NO: 5726 - protein, 395 aa, Homo sapiens
MSANATLKPLCPILEQMSRLQSHSNTSIRYIDHAAVLLHGLASLLGLVENGVILFVVGCRMRQTVVTTWVLHLALSDLLASASLPFFTYFLAVGHSWELGTTFCKLHSSIFFLNMFASGFLLSAISLDRCLQVVRPVWAQNHRTVAAAHKVCLVLWALAVLNTVPYFVFRDTISRLDGRIMCYYNVLLLNPGPDRDATCNSRQVALAVSKFLLAFLVPLAIIASSHAAVSLRLQHRGRRRPGRFVRLVAAVVAAFALCWGPYHVFSLLEARAHANPGLRPLVWRGLPFVTSLAFFNSVANPVLYVLTCPDMLRKLRRSLRTVLESVLVDDSELGGAGSSRRRRTSSTARSASPLALCSRPEEPRGPARLLGWLLGSCAASPQTGPLNRALSSTSS

SEQ ID NO: 5727 - protein, 1009 aa, Homo sapiens
MSGVSEPLSRVKLGTLRRPEGPAEPMVVVPVDVEKEDVRILKVCFYSNSFNPGKNFKLVKCTVQTEIREIITSILLSGRIGPNIRLAECYGLRLKHMKSDEIHWLHPQMTVGEVQDKYECLHVEAEWRYDLQIRYLPEDFMESLKEDRTTLLYFYQQLRNDYMQRYASKVSEGMALQLGCLELRRFFKDMPHNALDKKSNFELLEKEVGLDLFFPKQMQENLKPKQFRKMIQQTFQQYASLREEECVMKFFNTLAGFANIDQETYRCELIQGWNITVDLVIGPKGIRQLTSQDAKPTCLAEFKQIRSIRCLPLEEGQAVLQLGIEGAPQALSIKTSSLAEAENMADLIDGYCRLQGEHQGSLIIHPRKDGEKRNSLPQIPMLNLEARRSHLSESCSIESDIYAEIPDETLRRPGGPQYGIAREDVVLNRILGEGFFGEVYEGVYTNHKGEKINVAVKTCKKDCTLDNKEKFMSEAVIMKNLDHPHIVKLIGIIEEEPTWIIMELYPYGELGHYLERNKNSLKVLTLVLYSLQICKAMAYLESINCVHRDIAVRNILVASPECVKLGDFGLSRYIEDEDYYKASVTRLPIKWMSPESINFRRFTTASDVWMFAVCMWEILSFGKQPFFWLENKDVIGVLEKGDRLPKPDLCPPVLYTLMTRCWDYDPSDRPRFTELVCSLSDVYQMEKDIAMEQERNARYRTPKILEPTAFQEPPPKPSRPKYRPPPQTNLLAPKLQFQVPEGLCASSPTLTSPMEYPSPVNSLHTPPLHRHNVFKRHSMREEDFIQPSSREEAQQLWEAEKVKMRQILDKQQKQMVEDYQWLRQEEKSLDPMVYMNDKSPLTPEKEVGYLEFTGPPQKPPRLGAQSIQPTANLDRTDDLVYLNVMELVRAVLELKNELCQLPPEGYVVVVKNVGLTLRKLIGSVDDLLPSLPSSSRTEIEGTQKLLNKDLAELINKMRLAQQNAVTSLSEECKRQMLTASHTLAVDAKNLLDAVDQAKVLANLAHPPAE

SEQ ID NO: 5728 - protein, 683 aa, Homo sapiens
MDDYKYQDNYGGYAPSDGYYRGNESNPEEDAQSDVTEGHDEEDEIYEGEYQGIPHPDDVKAKQAKMAPSRMDSLRGQTDLMAERLEDEEQLAHQYETIMDECGHGRFQWILFFVLGLALMADGVEVFVVSFALPSAEKDMCLSSSKKGMLGMIVYLGMMAGAFILGGLADKLGRKRVLSMSLAVNASFASLSSFVQGYGAFLFCRLISGIGIGGALPIVFAYFSEFLSREKRGEHLSWLGIFWMTGGLYASAMAWSIIPHYGWGFSMGTNYHFHSWRVFVIVCALPCTVSMVALKFMPESPRFLLEMGKHDEAWMILKQVHDTNMRAKGTPEKVFTVSNIKTPKQMDEFIEIQSSTGTWYQRWLVRFKTIFKQVWDNALYCVMGPYRMNTLILAVVWFAMAFSYYGLTVWFPDMIRYFQDEEYKSKMKVFFGEHVYGATINFTMENQIHQHGKLVNDKFTRMYFKHVLFEDTFFDECYFEDVTSTDTYFKNCTIESTIFYNTDLYEHKFINCRFINSTFLEQKEGCHMDLEQDNDFLIYLVSFLGSLSVLPGNIISALLMDRIGRLKMIGGSMLISAVCCFFLFFGNSESAMIGWQCLFCGTSIAAWNALDVITVELYPTNQRATAFGILNGLCKFGAILGNTIFASFVGITKVVPILLAAASLVGGGLIALRLPETREQVLM

SEQ ID NO: 5729 - protein, 599 aa, Homo sapiens
MAAALRAPTQQVFVAFEDVAIYFSQEEWELLDEMQRLLYRDVMLENFAVMASLGCWCGAVDEGTPSAESVSVEELSQGRTPKADTSTDKSHPCEICTPVLRDILQMIELHASPCGQKLYLGGASRDFWMSSNLHQLQKLDNGEKLFKVDGDQASFMMNCRFHVSGKPFTFGEVGRDFSATSGLLQHQVTPTIERPHSRIRHLRVPTGRKPLKYTESRKSFREKSVFIQHQRADSGERPYKCSECGKSFSQSSGFLRHRKAHGRTRTHECSECGKSFSRKTHLTQHQRVHTGERPYDCSECGKSFRQVSVLIQHQRVHTGERPYECSECGKSFSHSTNLYRHRSAHTSTRPYECSECGKSFSHSTNLFRHWRVHTGVRPYECSECGKAFSCNIYLIHHQRFHTGERPYVCSECGKSFGQKSVLIQHQRVHTGERPYECSECGKVFSQSSGLFRHRRAHTKTKPYECSECEKSFSCKTDLIRHQTVHTGERPYECSVCGKSFIRKTHLIRHQTVHTNERPYECDECGKSYSQSSALLQHRRVHTGERPYECRECGKSFTRKNHLIQHKTVHTGERPYECSECGKSFSQSSGLLRHRRVHVQ

SEQ ID NO: 5730 - protein, 660 aa, Homo sapiens
MGLQTTKWPSHGAFFLKSWLIISLGLYSQVSKLLACPSVCRCDRNFVYCNERSLTSVPLGIPEGVTVLYLHNNQINNAGFPAELHNVQSVHTVYLYGNQLDEFPMNLPKNVRVLHLQENNIQTISRAALAQLLKLEELHLDDNSISTVGVEDGAFREAISLKLLFLSKNHLSSVPVGLPVDLQELRVDENRIAVISDMAFQNLTSLERLIVDGNLLTNKGIAEGTFSHLTKLKEFSIVRNSLSHPPPDLPGTHLIRLYLQDNQINHIPLTAFSNLRKLERLDISNNQLRMLTQGVFDNLSNLKQLTARNNPWFCDCSIKWVTEWLKYIPSSLNVRGFMCQGPEQVRGMAVRELNMNLLSCPTTTPGLPLFTPAPSTASPTTQPPTLSIPNPSRSYTPPTPTTSKLPTIPDWDGRERVTPPISERIQLSIHFVNDTSIQVSWLSLFTVMAYKLTWVKMGHSLVGGIVQERIVSGEKQHLSLVNLEPRSTYRICLVPLDAFNYRAVEDTICSEATTHASYLNNGSNTASSHEQTTSHSMGSPFLLAGLIGGAVIFVLVVLLSVFCWHMHKKGRYTSQKWKYNRGRRKDDYCEAGTKKDNSILEMTETSFQIVSLNNDQLLKGDFRLQPIYTPNGGINYTDCHIPNNMRYCNSSVPDLEHCHT

SEQ ID NO: 5731 - protein, 2139 aa, Homo sapiens
MAGASRHPTGTPRQLLVALACLLLSRPALQGRASSLGTEPDPALYLPARGALDGTRPDGPSVLIANPGLRVPLGRSLWLDPLRDLVIGVQPGDRCEVTVLDALPRLKGALSPRRFPCTFGPRQVQYTHFGSHSPGRARVLLQLRYDAPTHTLVLPFTLAVDLVFSQLELVTRNRPLVVEKLRSWSRAIDRRVLDFASLKSGATATRRCRLTPLPHEDGPLPKYGRLVDAVGAPLPRGKGVDCEAFLRAGVRYQHTATSSPNRDYVPMMVELLGPEGQDAGSAGVLVREHFQLLVRIRGGAENTPPRPSFMATMMMEVDPLVLTALTPDALAAEDVESDPGDLVFNILNAPTHPPGHPGQQGYVVSTDDPLGLPVSFFTQQELRELKIAYQPPAENSHGERLFQLELEVVDGDGAASDPFAFMVTVKSMNTLVPVASHNRGLVLFEGQSRPLSSTHSIPISDKDNLEEVKMAAVRGLRHGQLVVFGAPAGCKYFTPADLAAGRVVYQHDGSNTYSDNIIFRMEDGHHQVDFLFPLTILPVDDEPPMVNTNTGLSLTEGQVVQISPFVLSATDIDSEDSTIHFVLENQPLKGNEEEPQWELAPGSSHSGHYLGDLLLQQAELPLSTEDEDWHYMEKEGLYEKVVTEWLQRDIMEGRLFYRHLGPHSPQSVMVQLAFHVQDDHDPPNLSKQHIFTIKVQPVDILSPQLYPGTTLEMTVQEYQLTHFQKNFLRYIDQDSDDQNLWYTLLTLPTDTDGNHQVRAGEIVLTDSPDTLIMHFTQAQVNQHKVAYQPPQKLGIAPRVVQFTYQVEDAAGNSVPGTFTLFLQPVDNQPPEVTNRGFAILEGGSFNLSSNELHVTDPDTDIDQIVFILVRGPQHGHLQYFKRCMVPGESFMQADVINGSVSYQHGRDQTTTSDTFHLEVSDGVHHIPITIPISVHPNVANRSPRISLRSSSLLDVSIDVLENKATEITMGVIHGKRKDVGDLMLSFIVKDSPKLGTILVNGLPTERFTQEDLINGRVAYAHTAGEVGFQKQHDAFSLILSKDSYQWVVGNSIIEKVQVQVTVLPVDNVGPKVFVGESFIVYEGEKNSLTLQHLHVEDVDTHQDELLCTVTSQPASGYLEKIASAPGSKMSQSGSPISAFSLRDIQVRHINYVQSIHKGVEPQEDQFTFYCSDGINFSPNVFFPIIILPTNDEQPKLFAHEFKVLEGMSLVIDTQLLNGADADLPPNELHFQLTALPRHGRIIQQLATGSQPIHSFTLKEIQEASTIVYEHDDSETKEDSFEVWLSDGKHTTHRKVPIVVTLVDDETPHLTVNNGLKVEKGHSEIITNRILKATDLDSDDKSLSFVLHSGPQQGLLQRLRKPRGEVRNNLTLGMNFTQDEINRGLICYIHTGQEGIVDIIKFDVTDGVNTLTDHYFYVTIGNLDSVFPEVISKRITLIEGARVTLTNNLLTNSDINSSDEHHFSITRAPSLGHLESSDYAGEPIASFTQLQLASNKISYVHTSNDEKKMDSFEFQVIGELYPVFRTFRIFITDVDNKKPILTIHRLTLQKEDSQLITLLELTVEDSDTPDDLILFTITQVPMHGKILYNGSRPVTTFTKQDLNKNLISYKHDGSETTEDSFSLTVTDGTHTDFYVLPDTALATHKPQVMRVQIRSLDNRLPQITTNRGAPALKRLHTGHMGFLITSKSLKAEDQDSPHRLLKYKVTRGPEHGFIIKTGLGNQSTRVFTQADIDEMKISYVLNEGSNASKDIFYFSVEDNGGNKLTNQPFHLNWAWICLEKEYYIVDEDSTFLEVTLTRRGYLGETSFISIGTKDETAKKDKDFKWKTNKQIQFNPGQTTATWRVRIIPDNEYETSETFQIILSEPLMAVLEFPEMATVEIVDPGDESTVYIPEAEYKIEEDIGELLIPVRRSGDASQELIVICSTRQGSATGTISSTVLFSDYISRPEDHTSILHFDKNETQKTCQVLIIDDSLYEEEESFSVSLRLPVGGQLGARFPTTKVTILADRYDEPVLHFGDAEYHVNESARYVEVCVWRRGTDLSQPSSIAVRSRKSEQESAEAGTDYVGISRNLDFAPGVRMQTFQVTILDDLGQPTLEGPEKFELLLQMPMGAVLGEPNKTTIFIEDTITDCKQSACSSFD

SEQ ID NO: 5732 - protein, 579 aa, Homo sapiens
MAVFNQKSVSDMIKEFRKNWRALCNSERTTLCGADSMLLALQLSMAENNKQHSGEFTVSLSDVLLTWKYLLHEKLNLPVENMDVTDHYEDVRKIYDDFLKNSNMLDLIDVYQKCRALTSNCENYNTVSPSQLLDFLSGKQYAVGDETDLSIPTSPTSKYNRDNEKVQLLARKIIFSYLNLLVNSKNDLAVAYILNIPDRGLGREAFTDLKHAAREKQMSIFLVATSFIRTIELGGKGYAPPPSDPLRTHVKGLSNFINFIDKLDEILGEIPNPSIAGGQILSVIKMQLIKGQNSRDPFCKAIEEVAQDLDLRIKNIINSQEGVVALSTTDISPARPKSHAINHGTAYCGRDTVKALLVLLDEEAANAPTKNKAELLYDEENTIHHHGTSILTLFRSPTQVNNSIKPLRERICVSMQEKKIKMKQTLIRSQFACTYKDDYMISKDNWNNVNLASKPLCVLYMENDLSEGVNPSVGRSTIGTSFGNVHLDRSKNEKVSRKSTSQTGNKSSKRKQVDLDGENILCDNRNEPPQHKNAKIPKKSNDSQNRLYGKLAKVAKSNKCTAKDKLISGQAKLTQFFRL

SEQ ID NO: 5733 - protein, 973 aa, Homo sapiens
MYNMRRLSLSPTFSMGFHLLVTVSLLFSHVDHVIAETEMEGEGNETGECTGSYYCKKGVILPIWEPQDPSFGDKIARATVYFVAMVYMFLGVSIIADRFMSSIEVITSQEKEITIKKPNGETTKTTVRIWNETVSNLTLMALGSSAPEILLSVIEVCGHNFTAGDLGPSTIVGSAAFNMFIIIALCVYVVPDGETRKIKHLRVFFVTAAWSIFAYTWLYIILSVISPGVVEVWEGLLTFFFFPICVVFAWVADRRLLFYKYVYKRYRAGKQRGMIIEHEGDRPSSKTEIEMDGKVVNSHVENFLDGALVLEVDERDQDDEEARREMARILKELKQKHPDKEIEQLIELANYQVLSQQQKSRAFYRIQATRLMTGAGNILKRHAADQARKAVSMHEVNTEVTENDPVSKIFFEQGTYQCLENCGTVALTIIRRGGDLTNTVFVDFRTEDGTANAGSDYEFTEGTVVFKPGDTQKEIRVGIIDDDIFEEDENFLVHLSNVKVSSEASEDGILEANHVSTLACLGSPSTATVTIFDDDHAGIFTFEEPVTHVSESIGIMEVKVLRTSGARGNVIVPYKTIEGTARGGGEDFEDTCGELEFQNDEIVKTISVKVIDDEEYEKNKTFFLEIGEPRLVEMSEKKALLLNELGGFTITGKYLFGQPVFRKVHAREHPILSTVITIADEYDDKQPLTSKEEEERRIAEMGRPILGEHTKLEVIIEESYEFKSTVDKLIKKTNLALVVGTNSWREQFIEAITVSAGEDDDDDECGEEKLPSCFDYVMHFLTVFWKVLFAFVPPTEYWNGWACFIVSILMIGLLTAFIGDLASHFGCTIGLKDSVTAVVFVALGTSVPDTFASKVAATQDQYADASIGNVTGSNAVNVFLGIGVAWSIAAIYHAANGEQFKVSPGTLAFSVTLFTIFAFINVGVLLYRRRPEIGGELGGPRTAKLLTSCLFVLLWLLYIFFSSLEAYCHIKGF

SEQ ID NO: 5734 - protein, 425 aa, Homo sapiens
MSSILPFTPPIVKRLLGWKKGEQNGQEEKWCEKAVKSLVKKLKKTGQLDELEKAITTQNVNTKCITIPRSLDGRLQVSHRKGLPHVIYCRLWRWPDLHSHHELRAMELCEFAFNMKKDEVCVNPYHYQRVETPVLPPVLVPRHTEIPAEFPPLDDYSHSIPENTNFPAGIEPQSNIPETPPPGYLSEDGETSDHQMNHSMDAGSPNLSPNPMSPAHNNLDLQPVTYCEPAFWCSISYYELNQRVGETFHASQPSMTVDGFTDPSNSERFCLGLLSNVNRNAAVELTRRHIGRGVRLYYIGGEVFAECLSDSAIFVQSPNCNQRYGWHPATVCKIPPGCNLKIFNNQEFAALLAQSVNQGFEAVYQLTRMCTIRMSFVKGWGAEYRRQTVTSTPCWIELHLNGPLQWLDKVLTQMGSPSIRCSSVS

SEQ ID NO: 5735 - protein, 500 aa, Homo sapiens
MVGRSCGVATQRQGGGQRPTNLALTLSSSPAHSTALPWLPPRSLQLLSGHSVPAQPTPHLPSACGGPTRVTLGEERAWRSHGSNAGGHTCLPRRTAGAGSLTPGGERGGNNAGHTVVVDGKEYDFHLLPSGIINTKAVSFIGNGVVIHLPGLFEEAEKNEKKGLKDWEKRLIISDRAHLVFDFHQAVDGLQEVQRQAQEGKNIGTTKKGIGPTYSSKAARTGLRICDLLSDFDEFSSRFKNLAHQHQSMFPTLEIDIEGQLKRLKGFAERIRPMVRDGVYFMYEALHGPPKKILVEGANAALLDIDFGTYPFVTSSNCTVGGVCTGLGIPPQNIGDVYGVVKAYTTRVGIGAFPTEQINEIGGLLQTRGHEWGVTTGRKRRCGWLDLMILRYAHMVNGFTALALTKLDILDVLGEVKVGVSYKLNGKRIPYFPANQEMLQKVEVEYETLPGWKADTTGARRWEDLPPQAQNYIRFVENHVGVAVKWVGVGKSRESMIQLF

SEQ ID NO: 5736 - protein, 911 aa, Homo sapiens
MEASWRQVAGGRGRSRGRATAAPSGNGVHLRGAGGGREKGSVGAVPSGTSPGGVATTAAAGSRHSPAGSQALQTTAASELMSQKKFEEIKKANQAAARKLVEEQFSSSSEEGDEDFEGKQGKILANTFITYTTQTDGDTRELERTKQYVNEAFQAGAMTCLICIASVKRNQAVWSCSGCFCIFHMPCIQKWAKDSQFLVSSVTDDDFGKKDCPWPCPKCRFEYKRSETPSRYYCYCGKVEDPPLDPWLVPHSCGQVCEREFKPPCGHKCLLLCHPGPCPPCPKMVTTTCYCKKAKPIPRRCSAKEWSCQLPCGQKLLCGQHKCENPCHAGSCQPCPRVSRQKCVCGKKVAERSCASPLWHCDQVCGKTLPCGNHTCEQVCHVGACGECPRSGKRFCPCQKSKFSLPCTEDVPTCGDSCDKVLECGIHRCSQRCHRGPCETCRQEVEKHCRCGKHTKRMPCHKPYLCETKCVKMRDCQKHQCRRKCCPGNCPPCDQNCGRTLGCRNHKCPSVCHRGSCYPCPETVDVKCNCGNTKVTVPCGRERTTRPPKCKEQCSRPPTCHHTSQEKHRCHFGSCPPCHQPCQKVLEKCGHLCPAPCHDQALIKQTGRHQPTGPWEQPSEPAFIQTALPCPPCQVPIPMECLGKHEVSPLPCHAVGPYSCKRVCGRILDCQNHTCMKECHKVTKTDGCTGKNKAGPECLHCEEGCSKSRPLGCLHPCILRCHPGECPPCVQMLRIKCHCKITSLYVECRKITTADVNEKNLLSCCKNQCPKELPCGHRCKEMCHPGECPFNCNQKVKLRCPCKRIKKELQCNKVRENQVSIECDTTCKEMKRKASEIKEAEAKAALEEEKRRQQAELEAFENRLKGRRKKNRKRDEVAVELSLWQKHKYYLISVCGVVVVVFAWYITHDVN

SEQ ID NO: 5737 - protein, 1031 aa, Homo sapiens
MMAAALLHYTGYAQEEQLKEEEEIKEEEEEEDSGSVAQLQGGNDTGTDEELETGPEQKGCFSYQNSPGSHLSNQDAENESLLSDASDQVSDIKSVCGRDASDKKAHTHVRLPNEAHNCMDKMTAVYANILSDSYWSGLGLGFKLSNSERRNCDTRNGSNKSDFDWHQDALSKSLQQNLPSRSVSKPSLFSSVQLYRQSSKMCGTVFTGASRFRCRQCSAAYDTLVELTVHMNETGHYQDDNRKKDKLRPTSYSKPRKRAFQDMDKEDAQKVLKCMFCGDSFDSLQDLSVHMIKTKHYQKVPLKEPVPTISSKMVTPAKKRVFDVNRPCSPDSTTGSFADSFSSQKNANLQLSSNNRYGYQNGASYTWQFEACKSQILKCMECGSSHDTLQQLTTHMMVTGHFLKVTSSASKKGKQLVLDPLAVEKMQSLSEAPNSDSLAPKPSSNSASDCTASTTELKKESKKERPEETSKDEKVVKSEDYEDPLQKPLDPTIKYQYLREEDLEDGSKGGGDILKSLENTVTTAINKAQNGAPSWSAYPSIHAAYQLSEGTKPPLPMGSQVLQIRPNLTNKLRPIAPKWKVMPLVSMPTHLAPYTQVKKESEDKDEAVKECGKESPHEEASSFSHSEGDSFRKSETPPEAKKTELGPLKEEEKLMKEGSEKEKPQPLEPTSALSNGCALANHAPALPCINPLSALQSVLNNHLGKATEPLRSPSCSSPSSSTISMFHKSNLNVMDKPVLSPASTRSASVSRRYLFENSDQPIDLTKSKSKKAESSQAQSCMSPPQKHALSDIADMVKVLPKATTPKPASSSRVPPMKLEMDVRRFEDVSSEVSTLHKRKGRQSNWNPQHLLILQAQFASSLFQTSEGKYLLSDLGPQERMQISKFTGLSMTTISHWLANVKYQLRKTGGTKFLKNMDKGHPIFYCSDCASQFRTPSTYISHLESHLGFQMKDMTRLSVDQQSKVEQEISRVSSAQRSPETIAAEEDTDSKFKCKLCCRTFVSKHAVKLHLSKTHSKSPEHHSQFVTDVDEE

SEQ ID NO: 5738 - protein, 637 aa, Homo sapiens
MHDSIRFGNVDMPCVQAQYSPSPPGSSYAAQTYSSEYTTEIMNPDYTKLTMDLGSTEITATATTSLPSISTFVEGYSSNYELKPSCVYQMQRPLIKVEEGRAPSYHHHHHHHHHHHHHHQQQHQQPSIPPASSPEDEVLPSTSMYFKQSPPSTPTTPAFPPQAGALWDEALPSAPGCIAPGPLLDPPMKAVPTVAGARFPLFHFKPSPPHPPAPSPAGGHHLGYDPTAAAALSLPLGAAAAAGSQAAALESHPYGLPLAKRAAPLAFPPLGLTPSPTASSLLGESPSLPSPPSRSSSSGEGTCAVCGDNAACQHYGVRTCEGCKGFFKRTVQKNAKYVCLANKNCPVDKRRRNRCQYCRFQKCLSVGMVKEVVRTDSLKGRRGRLPSKPKSPLQQEPSQPSPPSPPICMMNALVRALTDSTPRDLDYSRYCPTDQAAAGTDAEHVQQFYNLLTASIDVSRSWAEKIPGFTDLPKEDQTLLIESAFLELFVLRLSIRSNTAEDKFVFCNGLVLHRLQCLRGFGEWLDSIKDFSLNLQSLNLDIQALACLSALSMITERHGLKEPKRVEELCNKITSSLKDHQSKGQALEPTESKVLGALVELRKICTLGLQRIFYLKLEDLVSPPSIIDKLFLDTLPF

SEQ ID NO: 5739 - protein, 2027 aa, Homo sapiens [sequence omitted]

SEQ ID NO: 5740 - protein, 806 aa, Homo sapiens
MQFFGRLVNTFSGVTNLFSNPFRVKEVAVADYTSSDRVREEGQLILFQNTPNRTWDCVLVNPRNSQSGFRLFQLELEADALVNFHQYSSQLLPFYESSPQVLHTEVLQHLTDLIRNHPSWSVAHLAVELGIRECFHHSRIISCANCAENEEGCTPLHLACRKGDGEILVELVQYCHTQMDVTDYKGETVFHYAVQGDNSQVLQLLGRNAVAGLNQVNNQGLTPLHLACQLGKQEMVRVLLLCNARCNIMGPNGYPIHSAMKFSQKGCAEMIISMDSSQIHSKDPRYGASPLHWAKNAEMARMLLKRGCNVNSTSSAGNTALHVAVMRNRFDCAIVLLTHGANADARGEHGNTPLHLAMSKDNVEMIKALIVFGAEVDTPNDFGETPTFLASKIGRLVTRKAILTLLRTVGAEYCFPPIHGVPAEQGSAAPHHPFSLERAQPPPISLNNLELQDLMHISRARKPAFILGSMRDEKRTHDHLLCLDGGGVKGLIIIQLLIAIEKASGVATKDLFDWVAGTSTGGILALAILHSKSMAYMRGMYFRMKDEVFRGSRPYESGPLEEFLKREFGEHTKMTDVRKPKVMLTGTLSDRQPAELHLFRNYDAPETVREPRFNQNVNLRPPAQPSDQLVWRAARSSGAAPTYFRPNGRFLDGGLLANNPTLDAMTEIHEYNQDLIRKGQANKVKKLSIVVSLGTGRSPQVPVTCVDVFRPSNPWELAKTVFGAKELGKMVVDCCTDPDGRAVDRARAWCEMVGIQYFRLNPQLGTDIMLDEVSDTVLVNALWETEVYIYEHREEFQKLIQLLLSP

SEQ ID NO: 5741 - protein, 256 aa, Homo sapiens
MAAGSRTSLLLAFGLLCLSWLQEGSAFPTIPLSRLFDNAMLRARRLYQLAYDTYQEFEEAYILKEQKYSFLQNPQTSLCFSESIPTPSNRVKTQQKSNLELLRISLLLIQSWLEPVQLLRSVFANSLVYGASDSNVYRHLKDLEEGIQTLMWVRVAPGIPNPGAPLASRDWGEKHCCPLFSSQALTQENSPYSSFPLVNPPGLSLQPGGEGGKWMNERGREQCPSAWPLLLFLHFAEAGRWQPPDWADLQSVLQQV

SEQ ID NO: 5742 - protein, 402 aa, Homo sapiens
MSFEGGHGGSRCRGAESGDAEPPPQPPPPPPPTPPPGEPAPVPAAPRYLPPLPASPETPERAAGPSEPLGEVAPRCRGADELPPPPLPLQPAGQEVAAAGDSGEGPRRLPEAAAAKGGPGESEAGAGGERERRGAGDQPETRSVCSSRSSSSGGGDQRAGHQHQHHQPICKICFQGAEQGELLNPCRCDGSVRYTHQLCLLKWISERGSWTCELCCYRYHVIAIKMKQPCQWQSISITLVEKVQMIAVILGSLFLIASVTWLLWSAFSPYAVWQRKDILFQICYGMYGFMDLVCIGLIVHEGAAVYRVFKRWRAVNLHWDVLNYDKATDIEESSRGESSTSRTLWLPLTALRNRNLVHPTQLTSPRFQCGYVLLHLFNRMRPHEDLSEDNSSGEVVMRVTSV

SEQ ID NO: 5743 - protein, 396 aa, Homo sapiens
MSWSFLTRLLEEIHNHSTFVGKIWLTVLIVFRIVLTAVGGESIYYDEQSKFVCNTEQPGCENVCYDAFAPLSHVRFWVFQIILVATPSVMYLGYAIHKIAKMEHGEADKKAARSKPYAMRWKQHRALEETEEDNEEDPMMYPEMELESDKENKEQSQPKPKHDGRRRIREDGLMKIYVLQLLARTVFEVGFLIGQYFLYGFQVHPFYVCSRLPCPHKIDCFISRPTEKTIFLLIMYGVTGLCLLLNIWEMLHLGFGTIRDSLNSKRRELEDPGAYNYPFTWNTPSAPPGYNIAVKPDQIQYTELSNAKIAYKQNKANTAQEQQYGSHEENLPADLEALQREIRMAQERLDLAVQAYSHQNNPHGPREKKAKVGSKAGSNKSTASSKSGDGKTSVWI

SEQ ID NO: 5744 - protein, 326 aa, Homo sapiens
MSVQYSLSPQFMLLSNITQFSPIFYLTSFPGLEGIKHWIFIPFFFMYMVAISGNCFILIIIKTNPRLHTPMYYLLSLLALTDLGLCVSTLPTTMGIFWFNSHSIYFGACQIQMFCIHSFSFMESSVLLMMSFDRLVAICHPLRYSVIITGQQVVRAGLIVIFRGPVATIPIVLLLKAFPYCGSVVLSHSFCLHQEVIQLACTDITFNNLYGLMVVVFTVMLDLVLIALSYGLILHTVAGLASQEEQRRAFQTCTAPLCAVLVFFVPMMGLSLVHRFGKHAPPAIHLLMANVYLFVPPMLNPIIYSIKTKEIHRAIIKFLGLKKASK

SEQ ID NO: 5745 - protein, 717 aa, Homo sapiens
MKSQEEVEVAGIKLCKAMSLGSVTFTDVAIDFSQDEWEWLNLAQRSLYKKVMLENYRNLVSVGLCISKPDVISLLEQEKDPWVIKGGMNRGLCPDLECVWVTKSLSLNQDIYEEKLPPAIIMERLKSYDLECSTLGKNWKCEDLFERELVNQKTHFRQETITHIDTLIEKRDHSNKSGTVFHLNTLSYIKQIFPMEERIFNFHTDKKSLKTHSVVKKHKQDRGEKKLLKCNDCEKIFSKISTLTLHQRIHTGEKPYECIECGKAFSQSAHLAQHQRIHTGEKPFECTECGKAFSQNAHLVQHQRVHTGEKPYQCKQCNKAFSQLAHLAQHQRVHTGEKPYECIECGKAFSDCSSLAHHRRIHTGKRPYECIDCGKAFRQNASLIRHRRYYHTGEKPFDCIDCGKAFTDHIGLIQHKRTHTGERPYKCNVCGKAFSHGSSLTVHQRIHTGEKPYECNICEKAFSHRGSLTLHQRVHTGEKPYECKECGKAFRQSTHLAHHQRIHTGEKPYECKECSKTFSQNAHLAQHQKIHTGEKPYECKECGKAFSQIAHLVQHQRVHTGEKPYECIECGKAFSDGSYLVQHQRLHSGKRPYECLECGKAFRQRASLICHQRCHTGEKPYECNVCGKAFSHRKSLTLHQRIHTGEKPYECKECSKAFSQVAHLTLHKRIHTGERPYECKECGKAFRQSVHLAHHQRIHTGESSVILSSALPYHQVL

SEQ ID NO: 5746 - protein, 348 aa, Homo sapiens
MGSWVQLITSVGVQQNHPGWTVAGQFQEKKRFTEEVIEYFQKKVSPVHLKILLTSDEAWKRFVRVAELPREEADALYEALKNLTPYVAIEDKDMQQKEQQFREWFLKEFPQIRWKIQESIERLRVIANEIEKVHRGCVIANVVSGSTGILSVIGVMLAPFTAGLSLSITAAGVGLGIASATAGIASSIVENTYTRSAELTASRLTATSTDQLEALRDILRDITPNVLSFALDFDEATKMIANDVHTLRRSKATVGRPLIAWRYVPINVVETLRTRGAPTRIVRKVARNLGKATSGVLVVLDVVNLVQDSLDLHKGAKSESAESLRQWAQELEENLNELTHIHQSLKAG

SEQ ID NO: 5747 - protein, 810 aa, Homo sapiens
MPNQGEDCYFFFYSTCTKGDSCPFRHCEAAIGNETVCTLWQEGRCFRQVCRFRHMEIDKKRSEIPCYWENQPTGCQKLNCAFHHNRGRYVDGLFLPPSKTVLPTVPESPEEEVKASQLSVQQNKLSVQSNPSPQLRSVMKVESSENVPSPTHPPVVINAADDDEDDDDQFSEEGDETKTPTLQPTPEVHNGLRVTSVRKPAVNIKQGECLNFGIKTLEEIKSKKMKEKSKKQGEGSSGVSSLLLHPEPVPGPEKENVRTVVRTVTLSTKQGEEPLVRLSLTERLGKRKFSAGGDSDPPLKRSLAQRLGKKVEAPETNIDKTPKKAQVSKSLKERLGMSADPDNEDATDKVNKVGEIHVKTLEEILLERASQKRGELQTKLKTEGPSKTDDSTSGARSSSTIRIKTFSEVLAEKKHRQQEAERQKSKKDTTCIKLKIDSEIKKTVVLPPIVASRGQSEEPAGKTKSMQEVHIKTLEEIKLEKALRVQQSSESSTSSPSQHEATPGARRLLRITKRTGMKEEKNLQEGNEVDSQSSIRTEAKEASGETTGVDITKIQVKRCETMREKHMQKQQEREKSVLTPLRGDVASCNTQVAEKPVLTAVPGITRHLTKRLPTKSSQKVEVETSGIGDSLLNVKCAAQTLEKRGKAKPKVNVKPSVVKVVSSPKLAPKRKAVEMHAAVIAAVKPLSSSSVLQEPPAKKAAVAVVPLVSEDKSVTVPEAENPRDSLVLPPTQSSSDSSPPEVSGPSSSQMSMKTRRLSSASTGKPPLSVEDDFEKLIWEISGGKLEAEIDLDPGKDEDDLLLELSEMIDS

SEQ ID NO: 5748 - protein, 1006 aa, Homo sapiens
MEGQSSRGSRRPGTRAGLGSLPMPQGVAQTGAPSKVDSSFQLPAKKNAALGPSEPRLALAPVGPRAAMSASSEGPRLALASPRPILAPLCTPEGQKTATAHRSSSLAPTSVGQLVMSASAGPKPPPATTGSVLAPTSLGLVMPASAGPRSPPVTLGPNLAPTSRDQKQEPPASVGPKPTLAASGLSLALASEEQPPELPSTPSPVPSPVLSPTQEQALAPASTASGAASVGQTSARKRDAPAPRPLPASEGHLQPPAQTSGPTGSPPCIQTSPDPRLSPSFRARPEALHSSPEDPVLPRPPQTLPLDVGQGPSEPGTHSPGLLSPTFRPGAPSGQTVPPPLPKPPRSPSRSPSHSPNRSPCVPPAPDMALPRLGTQSTGPGRCLSPNLQAQEAPAPVTTSSSTSTLSSSPWSAQPTWKSDPGFRITVVTWNVGTAMPPDDVTSLLHLGGGDDSDGADMIAIGLQEVNSMLNKRLKDALFTDQWSELFMDALGPFNFVLVSSVRMQGVILLLFAKYYHLPFLRDVQTDCTRTGLGGYWGNKGGVSVRLAAFGHMLCFLNCHLPAHMDKAEQRKDNFQTILSLQQFQGPGAQGILDHDLVFWFGDLNFRIESYDLHFVKFAIDSDQLHQLWEKDQLNMAKNTWPILKGFQEGPLNFAPTFKFDVGTNKYDTSAKKRKPAWTDRILWKVKAPGGGPSPSGRKSHRLQVTQHSYRSHMEYTVSDHKPVAAQFLLQFAFRDDMPLVRLEVADEWVRPEQAVVRYRMETVFARSSWDWIGLYRVGFRHCKDYVAYVWAKHEDVDGNTYQVTFSEESLPKGHGDFILGYYSHNHSILIGITEPFQISLPSSELASSSTDSSGTSSEGEDDSTLELLAPKSRSPSPGKSKRHRSRSPGLARFPGLALRPSSRERRGASRSPSPQSRRLSRVAPDRSSNGSSRGSSEEGPSGLPGPWAFPPAVPRSLGLLPALRLETVDPGGGGSWGPDREALAPNSLSPSPQGHRGLEEGGLGP

SEQ ID NO: 5749 - protein, 881 aa, Homo sapiens
MAGAAPRVRYLAGFCCPLGGLAAGKPRVLCHEAEVFLSTGSELVYVYDQEGGLLTAAFRFPDQVWHLELLAPRRLLYALCARRGLYCLSLDHPGRSRSTSQDDRDSEDGDQPSPVIPVDPDACILPDAALCAFTLLDSVLVTLVQGPARWKMQLFEQPCPGEDPRPGGQIGEVELSSYTPPAGVPGKPAAPHFLPVLCSVSPSGSRVPHDLLGGSGGFTLEDALFGLLFGADATLLQSPVVLCGLPDGQLCCVILKALVTSRSAPGDPNALVKILHHLEEPVIFIGALKTEPQAAEAAENFLPDEDVHCDCLVAFGHHGRMLAIKASWDESGKLVPELREYCLPGPVLCAACGGGGRVYHSTPSDLCVVDLSRGSTPLGPEQPEEGPGGLPPMLCPASLNICSVVSLSASPRTHEGGTKLLALSAKGRLMTCSLDLDSEMPGPARMTTESAGQKIKELLSGIGNISERVSFLKKAVDQRNKALTSLNEAMNVSCALLSSGTGPRPISCTTSTTWSRLQTQDVLMATCVLENSSSFSLDQGWTLCIQVLTSSCALDLDSACSAITYTIPVDQLGPGARREVTLPLGPGENGGLDLPVTVSCTLFYSLREVVGGALAPSDSEDPFLDECPSDVLPEQEGVCLPLSRHTVDMLQCLRFPGLAPPHTRAPSPLGPTRDPVATFLETCREPGSQPAGPASLRAEYLPPSVASIKVSAELLRAALKDGHSGVPLCCATLQWLLAENAAVDVVRARALSSIQGVAPDGANVHLIVREVAMTDLCPAGPIQAVEIQVESSSLADICRAHHAVVGRMQTMVTEQATQGSSAPDLRVQYLRQIHANHETLLREVQTLRDRLCTEDEASSCATAQRLLQVYRQLRHPSLILL

SEQ ID NO: 5750 - protein, 549 aa, Homo sapiens
MMCLECASAAAGGAEEEEADAERRRRRRGAQRGAGGSGCCGARGAGGAGVSAAGDEVQTLSGSVRRAPTGPPGTPGTPGCAATAKGPGAQQPKPASLGRGRGAAAAILSLGNVLNYLDRYTVAGVLLDIQQHFGVKDRGAGLLQSVFICSFMVAAPIFGYLGDRFNRKVILSCGIFFWSAVTFSSSFIPQQYFWLLVLSRGLVGIGEASYSTIAPTIIGDLFTKNTRTLMLSVFYFAIPLGSGLGYITGSSVKQAAGDWHWALRVSPVLGMITGTLILILVPATKRGHADQLGDQLKARTSWLRDMKALIRNRSYVFSSLATSAVSFATGALGMWIPLYLHRAQVVQKTAETCNSPPCGAKDSLIFGAITCFTGFLGVVTGAGATRWCRLKTQRADPLVCAVGMLGSAIFICLIFVAAKSSIVGAYICIFVGETLLFSNWAITADILMYVVIPTRRATAVALQSFTSHLLGDAGSPYLIGFISDLIRQSTKDSPLWEFLSLGYALMLCPFVVVLGGMFFLATALFFVSDRARAEQQVNQLAMPPASVKV

SEQ ID NO: 5751 - protein, 1789 aa, Homo sapiens
PRHVKLLSTKMGLKVTWDPPKDATSRPVEHYNIAYGKSLKSLKYIKVNAETYSFLIEDVEPGVVYFVLLTAENHSGVSRPVYRAESPPGGEWIEIDGFPIKGPGPFNETVTEKEVPNKPLRVRVRSSDDRLSVAWKAPRLSGAKSPRRSRGFLLGYGESGRKMNYVPLTRDERTHEIKKLASESVYVVSLQSMNSQGRSQPVYRAALTKRKISEEDELDVPDDISVRVMSSQSVLVSWVDPVLEKQKKVVASRQYTVRYREKGELARWDYKQIANRRVLIENLIPDTVYEFAVRISQGERDGKWSTSVFQRTPESAPTTAPENLNVWPVNGKPTVVAASWDALPETEGKVKASKADVEQNTEDNGKPEKPEPSSPSPRAPASSQHPSVPASPQGRNAKDLLLDLKNKILANGGAPRKPQLRAKKAEELDLQSTEITGEEELGSREDSPMSPSDTQDQKRTLRPPSRHGHSVVAPGRTAVRARMPALPRREGVDKPGFSLATQPRPGAPPSASASPAHHASTQGTSHRPSLPASLNDNDLVDSDEDERAVGSLHPKGAFAQPRPALSPSRQSPSSVLRDRSSVHPGAKPASPARRTPHSGAAEEDSSASAPPSRLSPPHGGSSRLLPTQPHLSSPLSKGGKDGEDAPATNSNAPSRSTMSSSVSSHLSSRTQVSEGAEASDGESHGDGDREDGGRQAEATAQTLRARPASGHFHLLRHKPFAANGRSPSRFSIGRGPRLQPSSSPQSTVPSRAHPRVPSHSDSHPKLSSGIHGDEEDEKPLPATVVNDHVPSSSRQPISRGWEDLRRSPQRGASLHRKEPIPENPKSTGADTHPQGKYSSLASKAQDVQQSTDADTEGHSPKAQPGSTDRHASPARPPAARSQQHPSVPRRMTPGRAPQQQPPPPVATSQHHPGPQSRDAGRSPSQPRLSLTQAGRPRPTSQGRSHSSSDPYTASSRGMLPTALQNQDEDAQGSYDDDSTEVEAQDVRAPAHAARAKEAAASLPKHQQVESPTGAGAGGDHRSQRGHAASPARPSRPGGPQSRARVPSRAAPGKSEPPSKRPLSSKSQQSVSAEDDEEEDAGFFKGGKEDLLSSSVPKWPSSSTPRGGKDADGSLAKEEREPAIALAPRGGSLAPVKRPLPPPPGSSPRASHVPSRLPPRSAATVSPVAGTHPWPQYTTRAPPGHFSTTPMLSLRQRMMHARFRNPLSRQPARPSYRQGYNGRPNVEGKVLPGSNGKPNGQRIINGPQGTKWVVDLDRGLVLNAEGRYLQDSHGNPLRIKLGGDGRTIVDLEGTPVVSPDGLPLFGQGRHGTPLANAQDKPILSLGGKPLVGLEVIKKTTHPPTTTMQPTTTTTPLPTTTTPRPTTATTRRTTTTRRTTTRRPTTTVRTTTRTTTTTTPTPTTPIPTCPPGTLERHDDDGNLIMSSNGIPECYAEEDEFSGLETDTAVPTEEAYVIYDEDYEFETSRPPTTTEPSTTATTPRVIPEEGAISSFPEEEFDLAGRKRFVAPYVTYLNKDPSAPCSLTDALDHFQVDSLDEIIPNDLKKSDLPPQHAPRNITVVAVEGCHSFVIVDWDKATPGDVVTGYLVYSASYEDFIRNKWSTQASSVTHLPIENLKPNTRYYFKVQAQNPHGYGPISPSVSFVTESDNPLLVVRPPGGEPIWIPFAFKHDPSYTDCHGRQYVKRTWYRKFVGVVLCNSLRYKIYLSDNLKDTFYSIGDSWGRGEDHCQFVDSHLDGRTGPQSYVEALPTIQGYYRQYRQEPVRFGNIGFGTPYYYVGWYECGVSIPGKW

SEQ ID NO: 5752 - protein, 300 aa, Homo sapiens
MNIILEILLLLITIIYSYLESLVKFFIPQRRKSVAGEIVLITGAGHGIGRQTTYEFAKRQSILVLWDINKRGVEETAAECRKLGVTAHAYVVDCSNREEIYRSLNQVKKEVGDVTIVVNNAGTVYPADLLSTKDEEITKTFEVNILGHFWITKALLPSMMERNHGHIVTVASVCGHEGIPYLIPYCSSKFAAVGFHRGLTSELQALGKTGIKTSCLCPVFVNTGFTKNPSTRLWPVLETDEVVRSLIDGILTNKKMIFVPSYINIFLRLQKFLPERASAILNRMQNIQFEAVVGHKIKMK

SEQ ID NO: 5753 - protein, 304 aa, Homo sapiens
MAKIEKNAPTMEKKPELFNIMEVDGVPTLILSKEWWEKVCNFQAKPDDLILATYPKSGTTWMHEILDMILNDGDVEKCKRAQTLDRHAFLELKFPHKEKPDLEFVLEMSSPQLIKTHLPSHLIPPSIWKENCKIVYVARNPKDCLVSYYHFHRMASFMPDPQNLEEFYEKFMSGKVVGGSWFDHVKGWWAAKDMHRILYLFYEDIKKDPKREIEKILKFLEKDISEEILNKIIYHTSFDVMKQNPMTNYTTLPTSIMDHSISPFMRKGMPGDWKNYFTVAQNEEFDKDYQKKMAGSTLTFRTEI

SEQ ID NO: 5754 - protein, 270 aa, Homo sapiens
MGEAEAPSFEMTWSSTTSSGYCSQEDSDSELEQYFTARTSLARRPRRDQDEPVEWETPDLSQAEIEQKIKEYNAQINSNLFMSLNKDGSYTGFIKVQLKLVRPVSVPSSKKPPSLQDARRGPGRGTSVRRRTSFYLPKDAVKHLHVLSRTRAREVIEALLRKFLVVDDPRKFALFERAERHGQVYLRKLLDDEQPLRLRLLAGPSDKALSFVLKENDSGEVNWDAFSMPELHNFLRILQREEEEHLRQILQKYSYCRQKIQEALHACPLG

SEQ ID NO: 5755 - protein, 524 aa, Homo sapiens
MSGKRKRVVLTIKDKLDIIKKLEDGGSSKQLAVIYGIGETTVRDIRKNKEKIITYASSSDSTSLLAKRKSMKPSMYEELDRAMLEWFNQQRAKGNPISGPICAKRAEFFFYALGMDGDFNPSAGWLTRFKQRHSIREINIRNERLNGDETAVEDFCNNFRDFIERENLQPEQIYNADETGLFWKCLPSRISVIKGKCTVPGHKSIEERVTIMCCANATGLHKLKLCVVGKAKKPRSFKSTDTLNLPVSYFSQKGAWMDLSIFRQWFDKIFVPQVREYLRSKGLQEKAVLLLDNSPTHPNENVLRSDDGQIFAKYLPPNVASLIQPSDQGVIATMKRNYRAGLLQNNLEEGNDLKSFWKKLTLLDALYEIAMAWNLVKPVTISRAWKKILPMVEEKESLDFDVEDISVATVAAILQHTKGLENVTTENLEKWLEVDSTEPGYEVLTDSEIIRRAQGQADESSENEEEEIELIPEKHINHAAALQWTENLLDYLEQQGDMILPDRLVIRKLRATIRNKQKMTKSSQ

SEQ ID NO: 5756 - protein, 428 aa, Homo sapiens
MGEAPSPAPALWDWDYLDRCFARHRVCISFGLWICASSCWIAAHALLLYLRCAQKPRQDQSALCAACCLLTSLCDTVGALLARQLTIQVFTGAYLAAIDLVNFMFILFPVCGSKFKSNSDREARERKRRRQLRASVFALALPLSLGPCWALWVAVPKASATIRGPQRRLLASLLQENTEILGYLLGSVAAFGSWASRIPPLSRICRGKTFPSIHLWTRLLSALAGLLYASAIVAHDQHPEYLLRATPWFLTSLGRAALDLAIIFLSCVMKSKMRQALGFAKEARESPDTQALLTCAEKEEENQENLDWVPLTTLSHCKSLRTMTAISRYMELTIEPVQQAGCSATRLPGDGQTSAGDASLQDPPSYPPVQVIRARVSSGSSSEVSSINSDLEWDPEDVNLEGSKENVELLGSQVHQDSVRTAHLSDDD

SEQ ID NO: 5757 - protein, 216 aa, Homo sapiens
MKLNLVQIFFMLLMLLLGLGMGLGLGLHMATAVLEESDQPLNEFWSSDSQDKAEATEEGDGTQTTETLVLSNKEVVQPGWPEDPILGEDEVGGNKMLRASALFQSNKDYLRLDQTDRECNDMMAHKMKEPSQSCIAQYAFIHEDLNTVKAVCNSPVIACELKGGKCHKSSRPFDLTLCELSQPDQVTPNCNYLTSVIKKHIIITCNDMKRQLPTGQ

SEQ ID NO: 5758 - protein, 4707 aa, Homo sapiens
MEKDAEDGAPSEGAEAPPSTEEAAPPRSEEEEAPRPPTVEAPAEDGFSPSAEDAVSSVVDYRDLIPSEEGIVLPDDHEADLNRVRQRLAPRPVQSVISEVLSLPSSRRSSRYRRSMSGLPNLQETLKERQARFREARESRRLKIDPSYKYIFEILAENLGLDIVTVEELILDCPSLEAFTNFFAKDGCKTLKFLYQEGDVPGIECGRTIAGATKGAKMMKLYIDNAAPDKLKGLCIFFVRCRNDVAINVKTIQEEALFTVLDASKGLLNGIRDMLANIFLPAVLATNNWGALNQSKQGESEKHIFTETINRYLSFLDGARISIEGTVKLKTIDNVNFSKLHTFEEVTAAASNSETVHQLEEVLMVWYKQIEQVLIESEQMRKEAGDSGPLTELEHWKRMSAKFNYIIEQIKGPSCKAVINVLNVAHSKLLKNWRDLDARITDTANESKDNVRYLYTLEKVCQPLYNHDLVSMAHGIQNLINAIRMIHGVSRYYNTSERMTSLFIKVTNQMVTACKAYITDGGLNHVWDQETPVVLKKIQDCIFLFKEYQASFHKTRKLISESSGEKSFEVSEMYIFGKFEAFCKRLEKITEMITVVQTYSTLSNSTIEGIDIMAIKFRNIYQGVKKKQYDILDPRRTEFDTDFLDFMTKINGLEVQIQAFMNSSFGKILSSQQALQLLQRFQKLNIPCLGLEINHTIERILQYYVAELDATKKLYHSQKDDPPLARNMPPIAGKILWVRQLYRRISEPINYFFKNSDILSSPDGKAVIRQYNKISYVLVEFEVVYHTAWIREISQLHYALQATLFVRHPETGKLLVNFDPKILEVVRETKCMIKMKLDVPEQAKRLLKLESKLKADKLYLQGLLQYYDELCQEVPSVFVNLMTPKMKKVESVLRQGLTVLTWSSLTLESFFQEVELVLDMFNQLLKKISDLCEMHIDTVLKEIAKTVLISLPESGATKVEDMLTLNETYTKEWADILNHKSKHVEEAVRELISIFEQIYEVKYTGKVGKQSEQRKHVVFGSETGEGENNDYEANIVNEFDTHDKEDEFKKECKEVFAFFSHQLLDSLQKATRLSLDTMKRRIFVASLYGRKQSEDIISFIKSEVHLAIPNVVMIPSLDDIQQAINRMIQLTLEVSRGVAHWGQQQIRPIKSVIPSPTTTDVTHQNTGKLLKKEERSFEEAIPARKLKNFYPGVAEHKDISKLVLLLSSSVNSLRKAAHEALQDFQKYKTLWTEDRDVKVKEFLANNPSLTEIRSEILHYATFEQEIDELKPIIVVGALELHTEPMKLALSIEAKAWKMLLCRYLNEEYKKKMSYMIAFINEYLKKLSRPIRDLDDVRFAMEALSCIRDNEIQMDMTLGPIEEAYAILNRFEVEVTKEESEAVDTLRYSFNKLQSKAVSVQEDLVQVQPKFKSNLLESVEVFREDVINFAEAYELEGPMVPNIPPQEASNRLQIFQASFDDLWRKFVTYSSGEQLFGLPVTDYEVLHKTRKELNLLQKLYGLYDTVMSSISGYYEILWGDVDIEKINAELLEFQNRCRKLPKGLKDWQAFLDLKKRIDDFSESCPLLEMMTNKAMKQRHWDRISELTGTPFDVESDSFCLRNIMEAPLLKHKDDIEDICISAIKEKDIEAKLTQVIENWTNQNLSFAAFKGKGELLLKGTESGEIITLMEDSLMVLGSLLSNRYNAPFKKNIQNWVYKLSTSSDIIEEWLVVQNLWVYLEAVFVGGDIAKQLPQEAKRFQNIDKSWIKIMQRAHENPNVINCCVGDETMGQLLPHLHEQLEVCQKSLTGYLEKKRLLFPRFFFVSDPVLLEILGQASDSHTIQPHLPAVSDNINEVTFHAKDYDRIMAVISREGEKIVLDNSVMAKGPVEIWLLDLLKMQMSSLHNIIRSAFYQISDSGFQLLPFLSHFPAQVGLLGIQMLWTHDSEEALRNAKDDRKIMQVTNQKFLDILNTLISQTTHDLSKFDRVKFETLITIHVHQRDIFDDLVKMHIKSPTDFEWLKQSRFYFKEDLDQTVVSITDVDFIYQNEFLGCTDRLVITPLTDRCYITLAQALGMNMGGAPAGPAGTGKTETTKDMGRCLGKYVVVFNCSDQMDFRGLGRIFKGLAQSGSWGCFDEFNRIELPVLSVAAQQIYIVLTARKERKKQFIFSDGDCVDLNPEFGIFLTMNPGYAGRQELPENLKIQFRTVAMMVPDRQIIMRVKLASCGFLENVILAQKFYVLYKLCEEQLTKQVHYDFGLRNILSVLRTLGSQKRARPEDSELSIVMRGLRDMNLSKLVDEDEPLFLSLINDLFPGLQLDSNTYAELQNAVAHQVQIEGLINHPPWNLKLVQLYETSLVRHGLMTLGPSGSGKTTVITILMKAQTECGRPHREMRMNPKAITAPQMFGRLDTATNDWTDGIFSTLWRKTLKAKKGENIFLILDGPVDAIWIENLNSVLDDNKTLTLANGDRIPMAPSCKLLFEVHNIENASPATVSRMGMVYISSSALSWRPILQAWLKKRTAQEAAVFLTLYEKVFEDTYTYMKLNLNPKMQLLECNYIVQSLNLLEGLIPSKEEGGVSCVEHLHKLFVFGLMWSLGALLELESREKLEAFLRQHESKLDLPEIPKGSNQTMYEFYVTDYGDWEHWNKKLQPYYYPTDSIPEYSSILVPNVDNIRTNFLIDTIAKQHKAVLLTGEQGTAKTVMVKAYLKKYDPEVQLSKSLNFSSATEPMMFQRTIESYVDKRIGSTYGPPGGRKMTVFIDDINMPVINEWGDQITNEIVRQMMEMEGMYSLDKPGDFTTIVDVQLIAAMIHPGGGRNDIPQRLKRQFTVFNCTLPSNASIDKIFGIIGCGYFDPCRSFKPQICEMIVNLVSVGRVLWQWTKVKMLPTPSKFHYIFNLRDLSRIWQGMLTIKAEECASIPTLLSLFKHECSRVIADRFITPEDEQWFNAHLTRAVEENIGSDAASCILPEPYFVDFLREMPEPTGDEPEDSVFEVPKIYELMPSFDFLAEKLQFYQRQFNEIIRGTSLDLVFFKDAMTHLIKISRIIRTSCGNALLVGVGGSGKQSLSRLASFIAGYQIFQITLTRSYNVTNLTDDLKALYKVAGADGKGITFIFTDSEIKDEAFLEYLNNLLSSGEISNLFARDEMDEITQGLISVMKRELPRHPPTFDNLYEYFISRSRKNLHVVLCFSPVGEKFRARSLKFPGLISGCTMDWFSRWPREALIAVASYFLSDYNIVCSSEIKRQVVETMGLFHDMVSESCESYFQRYRRRAHVTPKSYLSFINGYKNIYAEKVKFINEQAERMNIGLDKLMEASESVAKLSQDLAVKEKELAVASIKADEVLAEVTVSAQASAKIKNEVQEVKDKAQKIVDEIDSEKVKAESKLEAAKPALEEAEAALNTIKPNDIATVRKLAKPPHLIMRIMDCVLLLFQKKIDPVTMDPEKSCCKPSWGESLKLMSATGFLWSLQQFPKDTINEETVELLQPYFNMDDYTFESAKKVCGNVAGLLSWTLAMAIFYGINREVLPLKANLAKQEGRLAVANAELGKAQALLDEKQAELDKVQAKFDAAMNEKMDLLNDADTCRKKMQAASTLIDGLSGEKIRWTQQSKEFKAQINRLVGDILLCTGFLSYLGPFNQIFRNYLLKDQWEMELRARKIPFTENLNLISMLVDPPTIGEWGLQGLPGDDLSIQNGIIVTKATRYPLLIDPQTQGKTWIKSKEKENDLQVTSLNHKYFRTHLEDSLSLGRPLLIEDIHEELDPALDNVLEKNFIKSGTTFKVKVGDKECDIMDTFKLYITTKLPNPAFTPEINAKTSVIDFTVTMKGLENQLLRRVILTEKQELEAERVKLLEDVTFNKRKMKELEDNLLYKLSATKGSLVDDESLIGVLRTTKQTAAEVSEKLHVAAETEIKINAAQEEFRPAATRGSILYFLITEMSMVNIMYQTSLAQFLKLFDQSMARSEKSPLPQKRITNIIEYLTYEVFTYSVRGLYENHKFLFVLLMTLKIDLQRGTVKHREFQALIKGGAALDLKACPPKPYRWILDMTWLNLVELSKLPQFAEIMNQISRNEKGWKSWFDKDAPEEEIIPDGYNDSLDTCHKLLLIRSWCPDRTVFQARKYIADSLEEKYTEPVILNLEKTWEESDTRTPLICFLSMGSDPTNQIDALAKKLKLECRTISMGQGQEVHARKLIQMSMQQGGWVLLQNCHLGLEFMEELLETLITTEASDDSFRVWITTEPHDRFPITLLQTSLKFTNEPPQGVRAGLKRTFAGINQDLLDISNLPMWKPMLYTVAFLHSTVQERRKFGPLGWNIPYEFNSADFSASVQFIQNHLDECDIKKGVSWNTVRYMIGEVQYGGRVTDDFDKRLLNCFARVWFSEKMFEPSFCFYTGYKIPLCKTLDQYFEYIQSLPSLDNPEVFGLHPNADITYQSNTASAVLETITNIQPKESGGGVGETREAIVYRLSEDMLSKLPPDYIPHEVKSRLIKMGHLNSMNIFLRQEIDRMQRVISILRSSLSDLKLAIEGTIIMSENLRDALDNMYDARIPQLWKRVSWDSSTLGFWFTELLERNAQFSTWIFEGRPNVFWMTGFFNPQGFLTAMRQEVTRAHKGWALDTVTIHNEVLRQTKEEITSPPGEGVYIYGLYMDGAAWDRRNGKLMESTPKVLFTQLPVLHIFAINSTAPKDPKLYVCPIYKKPRRTDLTFITVVYLRTVLSPDHWILRGVALLCDIK

SEQ ID NO: 5759 - protein, 550 aa, Homo sapiens
MTKVPATKKLQSSPNSGAVRPFYASENLRQVPDKPMKSIKYMDKEIINLKKDLIRSRFLIQSVKIGRGYFAILREETAKKKKQQQLQKLKEEERNKFQPAEKISEIHYGDTLLSTYDDEKLKTLGARVTRRPFTPIHSCIISPSLTEAHVEPLFRQLCALHWLLEALTIDHTHHTMKPVITCWNPKDPGGSKSTIKKINKDKSMGQKWEHFITAPKTKKFKIPTMRVTNRKPSRRGSTLSLSRASGGSSPQSSMISVNPGSDEPPSVNTQVTSSKDIEDNESSSTKPDEEPLYMNLQKLLEMVREDARRTVTIENGMQRKAPSILSVLKQNKSNSAYKEMQTTLKSSERSSSTSAESHIQPVQKKSKNRTNCDINIHYKSGVCNTMRAKFYSVAQEAGFCLQDKMEILMKRQEERGIQKFRAFVLVSNFQKDIAKMRHHISVVKGDAEEIADHWYFDLLSKLPEDLKNFRPAKKILVKLQKFGENLDLRIRPHVLLKVLQDLRIWELCSPDIAVAIEFVREHIIHMPQEDYISWLQSRINIPIGPYSALR

SEQ ID NO: 5760 - protein, 814 aa, Homo sapiens
MRVKDPTKALPEKAKRSKRPTVPHDEDSSDDIAVGLTCQHVSHAISVNHVKRAIAENLWSVCSECLKERRFYDGQLVLTSDIWLCLKCGFQGCGKNSESQHSLKHFKSSRTEPHCIIINLSTWIIWCYECDEKLSTHCNKKVLAQIVDFLQKHASKTQTSAFSRIMKLCEEKCETDEIQKGGKCRNLSVRGITNLGNTCFFNAVMQNLAQTYTLTDLMNEIKESSTKLKIFPSSDSQLDPLVVELSRPGPLTSALFLFLHSMKETEKGPLSPKVLFNQLCQKAPRFKDFQQQDSQELLHYLLDAVRTEETKRIQASILKAFNNPTTKTADDETRKKVKAYGKEGVKMNFIDRIFIGELTSTVMCEECANISTVKDPFIDISLPIIEERVSKPLLWGRMNKYRSLRETDHDRYSGNVTIENIHQPRAAKKHSSSKDKSQLIHDRKCIRKLSSGETVTYQKNENLEMNGDSLMFASLMNSESRLNESPTDDSEKEASHSESNVDADSEPSESESASKQTGLFRSSSGSGVQPDGPLYPLSAGKLLYTKETDSGDKEMAEAISELRLSSTVTGDQDFDRENQPLNISNNLCFLEGKHLRSYSPQNAFQTLSQSYITTSKECSIQSCLYQFTSMELLMGNNKLLCENCTKNKQKYQEETSFAEKKVEGVYTNARKQLLISAVPAVLILHLKRFHQAGLSLRKVNRHVDFPLMLDLAPFCSATCKNASVGDKVLYGLYGIVEHSGSMREGHYTAYVKVRTPSRKLSEHNTKKKNVPGLKAADNESAGQWVHVSDTYLQVVPESRALSAQAYLLFYERVL

SEQ ID NO: 5761 - protein, 293 aa, Homo sapiens
MGSRAELCTLLGGFSFLLLLIPGEGAKGGSLRESQGVCSKQTLVVPLHYNESYSQPVYKPYLTLCAGRRICSTYRTMYRVMWREVRREVQQTHAVCCQGWKKRHPGALTCEAICAKPCLNGGVCVRPDQCECAPGWGGKHCHVDVDECRTSITLCSHHCFNTAGSFTCGCPHDLVLGVDGRTCMEGSPEPPTSASILSVAVREAEKDERALKQEIHELRGRLERLEQWAGQAGAWVRAVLPVPPEELQPEQVAELWGRGDRIESLSDQVLLLEERLGACSCEDNSLGLGVNHR

SEQ ID NO: 5762 - protein, 569 aa, Homo sapiens
MHTLTGFSLVSLLSFGYLSWDWAKPSFVADGPGEAGEQPSAAPPQPPHIIFILTDDQGYHDVGYHGSDIETPTLDRLAAKGVKLENYYIQPICTPSRSQLLTGRYQIHTGLQHSIIRPQQPNCLPLDQVTLPQKLQEAGYSTHMVGKWHLGFYRKECLPTRRGFDTFLGSLTGNVDYYTYDNCDGPGVCGFDLHEGENVAWGLSGQYSTMLYAQRASHILASHSPQRPLFLYVAFQAVHTPLQSPREYLYRYRTMGNVARRKYAAMVTCMDEAVRNITWALKRYGFYNNSVIIFSSDNGGQTFSGGSNWPLRGRKGTYWEGGVRGLGFVHSPLLKRKQRTSRALMHITDWYPTLVGLAGGTTSAADGLDGYDVWPAISEGRASPRTEILHNIDPLYNHAQHGSLEGGFGIWNTAVQAAIRVGEWKLLTGDPGYGDWIPPQTLATFPGSWWNLERMASVRQAVWLFNISADPYEREDLAGQRPDVVRTLLARLAEYNRTAIPVRYPAENPRAHPDFNGGAWGPWASDEEEEEEEGRARSFSRGRRKKKCKICKLRSFFRKLNTRLMSQRI

SEQ ID NO: 5763 - protein, 236 aa, Homo sapiens
MSEAPRAETFVFLDLEATGLPSVEPEIAELSLFAVHRSSLENPEHDESGALVLPRVLDKLTLCMCPERPFTAKASEITGLSSEGLARCRKAGFDGAVVRTLQAFLSRQAGPICLVAHNGFDYDFPLLCAELRRLGARLPRDTVCLDTLPALRGLDRAHSHGTRARGRQGYSLGSLFHRYFRAEPSAAHSAEGDVHTLLLIFLHRAAELLAWADEQARGWAHIEPMYLPPDDPSLEA

SEQ ID NO: 5764 - protein, 630 aa, Homo sapiens
MAAGVAAWLPFARAAAIGWMPVASGPMPAPPRQERKRTQDALIVLNVSGTRFQTWQDTLERYPDTLLGSSERDFFYHPETQQYFFDRDPDIFRHILNFYRTGKLHYPRHECISAYDEELAFFGLIPEIIGDCCYEEYKDRRRENAERLQDDADTDTAGESALPTMTARQRVWRAFENPHTSTMALVFYYVTGFFIAVSVIANVVETVPCGSSPGHIKELPCGERYAVAFFCLDTACVMIFTVEYLLRLAAAPSRYRFVRSVMSIIDVVAILPYYIGLVMTDNEDVSGAFVTLRVFRVFRIFKFSRHSQGLRILGYTLKSCASELGFLLFSLTMAIIIFATVMFYAEKGSSASKFTSIPAAFWYTIVTMTTLGYGDMVPKTIAGKIFGSICSLSGVLVIALPVPVIVSNFSRIYHQNQRADKRRAQKKARLARIRAAKSGSANAYMQSKRNGLLSNQLQSSEDEQAFVSKSGSSFETQHHHLLHCLEKTTNHEFVDEQVFEESCMEVATVNRPSSHSPSLSSQQGVTSTCCSRRHKKTFRIPNANVSGSHQGSIQELSTIQIRCVERTPLSNSRSSLNAKMEECVKLNCEQPYVTTAIISIPTPPVTTPEGDDRPESPEYSGGNIVRVSAL

SEQ ID NO: 5765 - protein, 307 aa, Homo sapiens
MSKSESPKEPEQLRKLFIGGLSFETTDESLRSHFEQWGTLTDCVVMRDPNTKRSRGFGFVTYATVEEVDAAMNARPHKVDGRVVEPKRAVSREDSQRPGAHLTVKKIFVGGIKEDTEEHHLRDYFEQYGKIEVIEIMTDRGSGKKRGFAFVTFDDHDSVDKIVIQKYHTVNGHNCEVRKALSKQEMASASSSQRGRSGSGNFGGGRGGGFGGNDNFGRGGNFSGRGIGDGYNGFGNDGSNFGGGGSYNDFGNYNNQSSNFGPMKGGNFGGRSSGPYGGGGQYFAKPRNQGGYGGSSSSSSYGSGRRF

SEQ ID NO: 5766 - protein, 644 aa, Homo sapiens
MRPSGDEDRARRRRRRRRRRDLLLSQLCFLASVALLLWSLSSLREQKELDLMDLVGEDRKWMMARKLMQVNDTLTSEDAGLRNSKNCTEPALHEFPNDIFTNEDRRQGAVVLHVLCAIYMFYALAIVCDDFFVPSLEKICERLHLSEDVAGATFMAAGSSAPELFTSVIGVFITKGDVGVGTIVGSAVFNILCIIGVCGLFAGQVVALSSWCLLRDSIYYTLSVIALIVFIYDEKVSWWESLVLVLMYLIYIVIMKYNACIHQCFERRTKGAGNMVNGLANNAEIDDSSNCDATVVLLKKANFHRKASVIMVDELLSAYPHQLSFSEAGLRIMITSHFPPKTRLSMASRMLINERQRLINSRAYTNGESEVAIKIPIKHTVENGTGPSSAPDRGVNGTRRDDVVAEAGNETENENEDNENDEEEEEDEDDDEGPYTPFDTPSGKLETVKWAFTWPLSFVLYFTVPNCNKPRWEKWFMVTFASSTLWIAAFSYMMVWMVTIIGYTLGIPDVIMGITFLAAGTSVPDCMASLIVARQGMGDMAVSNSIGSNVFDILIGLGLPWALQTLAVDYGSYIRLNSRGLIYSVGLLLASVFVTVFGVHLNKWQLDKKLGCGCLLLYGVFLCFSIMTEFNVFTFVNLPMCGDH

SEQ ID NO: 5767 - protein, 442 aa, Homo sapiens
MENWSKDITHSYLEQETTGINKSTQPDEQLTMNSEKSMHRKSTELVNEITCENTEWPGQRSTNFQIISSYPDDESVYCTTEKYNVMEHRHNDMHYECMTPCQVTSDSDKEKTIAFLLKELDILRTSNKKLQQKLAKEDKEQRKLKFKLELQEKETEAKIAEKTAALVEEVYFAQKERDEAVMSRLQLAIEERDEAIARAKHMEMSLKVLENINPEENDMTLQELLNRINNADTGIAIQKNGAIIVDRIYKTKECKMRITAEEMSALIEERDAALSKCKRLEQELHHVKEQNQTSANNMRHLTAENNQERALKAKLLSMQQARETAVQQYKKLEEEIQTLRVYYSLHKSLSQEENLKDQFNYTLSTYEEALKNRENIVSITQQQNEELATQLQQALTERANMELQLQHAREASQVANEKVQKLERLVDVLRKKVGTGTMRTVI

SEQ ID NO: 5768 - protein, 912 aa, Homo sapiens
MSAPPVLRPPSPLLPVAAAAAAAAAALVPGSGPGPAPFLAPVAAPVGGISFHLQIGLSREPVLLLQDSSGDYSLAHVREMACSIVDQKFPECGFYGMYDKILLFRHDPTSENILQLVKAASDIQEGDLIEVVLSASATFEDFQIRPHALFVHSYRAPAFCDHCGEMLWGLVRQGLKCEGCGLNYHKRCAFKIPNNCSGVRRRRLSNVSLTGVSTIRTSSAELSTSAPDEPLLQKSPSESFIGREKRSNSQSYIGRPIHLDKILMSKVKVPHTFVIHSYTRPTVCQYCKKLLKGLFRQGLQCKDCRFNCHKRCAPKVPNNCLGEVTINGDLLSPGAESDVVMEEGSDDNDSERNSGLMDDMEEAMVQDAEMAMAECQNDSGEMQDPDPDHEDANRTISPSTSNNIPLMRVVQSVKHTKRKSSTVMKEGWMVHYTSKDTLRKRHYWRLDSKCITLFQNDTGSRYYKEIPLSEILSLEPVKTSALIPNGANPHCFEITTANVVYYVGENVVNPSSPSPNNSVLTSGVGADVARMWEIAIQHALMPVIPKGSSVGTGTNLHRDISVSISVSNCQIQENVDISTVYQIFPDEVLGSGQFGIVYGGKHRKTGRDVAIKIIDKLRFPTKQESQLRNEVAILQNLHHPGVVNLECMFETPERVFVVMEKLHGDMLEMILSSEKGRLPEHITKFLITQILVALRHLHFKNIVHCDLKPENVLLASADPFPQVKLCDFGFARIIGEKSFRRSVVGTPAYLAPEVLRNKGYNRSLDMWSVGVIIYVSLSGTFPFNEDEDIHDQIQNAAFMYPPNPWKEISHEAIDLINNLLQVKMRKRYSVDKTLSHPWLQDYQTWLDLRELECKIGERYITHESDDLRWEKYAGEQGLQYPTHLINPSASHSDTPETEETEMKALGERVSIL

SEQ ID NO: 5769 - protein, 818 aa, Homo sapiens
MDSESNIPSGTIQSRKGLQNKSQFRTIAPKIVPKVLTSRMLPCHSPSRSDQVNLGPSINSKLLGMSTQNYALMQVAGQEGTFSLVALPHVASAQPIQKPRMSLPENLKLPIPRYQPPRNSKASRKKPILIFPKSGCSKAPAQTQMCPQMSPSPPHHPELLYKPSPFEEVPSLEQAPASISTAALTNGSDHGDLRPPVTNTHGSLNPPATPASSTPEEPAKQDLTALSGKAHFVSKITSSKPSAVASEKFKEQVDLAKTMTNLSPTILGNAVQLISSVPKGKLPIPPYSRMKTMEVYKIKSDANIAGFSLPGPKADCDKIPSTTEGFNAATKVASRLPVPQVSQQSACESAFCPPTKLDLNHKTKLNSGAAKRKGRKRKVPDEILAFQGKRRKYIINKCRDGKERVKNDPQEFRDQKLGTLKKYRSIMPKPIMVIPTLASLASPTTLQSQMLGGLGQDVLLNNSLTPKYLGCKQDNSSSPKPSSVFRNGFSGIKKPWHRCHVCNHHFQFKQHLRDHMNTHTNRRPYSCRICRKSYVRPGSLSTHMKLHHGENRLKKLMCCEFCAKVFGHIRVYFGHLKEVHRVVISTEPAPSELQPGDIPKNRDMSVRGMEGSLERENKSNLEEDFLLNQADEVKLQIKCGRCQITAQSFAEIKFHLLDVHGEEIEGRLQEGTFPGSKGTQEELVQHASPDWKRHPERGKPEKVHSSSEESHACPRLKRQLHLHQNGVEMLMENEGPQSGTNKPRETCQGPECPGLHTFLLWSHSGFNCLLCAEMLGRKEDLLHHWKHQHNCEDPSKLWAILNTVSNQGVIELSSEAEK

SEQ ID NO: 5770 - protein, 985 aa, Homo sapiens
MHHGTGPQNVQHQLQRSRACPGSEGEEQPAHPNPPPSPAAPFAPSASPSAPQSPSYQIQQLMNRSPATGQNVNITLQSVGPVVGGNQQITLAPLPLPSPTSPGFQFSAQPRRFEHGSPSYIQVTSPLSQQVQTQSPTQPSPGPGQALQNVRAGAPGPGLGLCSSSPTGGFVDASVLVRQISLSPSSGGHFVFQDGSGLTQIAQGAQVQLQHPGTPITVRERRPSQPHTQSGGTIHHLGPQSPAAAGGAGLQPLASPSHITTANLPPQISSIIQGQLVQQQQVLQGPPLPRPLGFERTPGVLLPGAGGAAGFGMTSPPPPTSPSRTAVPPGLSSLPLTSVGNTGMKKVPKKLEEIPPASPEMAQMRKQCLDYHYQEMQALKEVFKEYLIELFFLQHFQGNMMDFLAFKKKHYAPLQAYLRQNDLDIEEEEEEEEEEEEKSEVINDEVKVVTGKDGQTGTPVAIATQLPPKVSAAFSSQQQPFQQALAGSLVAGAGSTVETDLFKRQQAMPSTGMAEQSKRPRLEVGHQGVVFQHPGADAGVPLQQLMPTAQGGMPPTPQAAQLAGQRQSQQQYDPSTGPPVQNAASLHTPLPQLPGRLPPAGVPTAALSSALQFAQQPQVVEAQTQLQIPVKTQQPNVPIPAPPSSQLPIPPSQPAQLALHVPTPGKVQVQASQLSSLPQMVASTRLPVDPAPPCPRPLPTSSTSSLAPVSGSGPGPSPARSSPVNRPSSATNKALSPVTSRTPGVVASAPTKPQSPAQNATSSQDSSQDTLTEQITLENQVHQRIAELRKAGLWSQRRLPKLQEAPRPKSHWDYLLEEMQWMATDFAQERRWKVAAAKKLVRTVVRHHEEKQLREERGKKEEQSRLRRIAASTAREIECFWSNIEQVVEIKLRVELEEKRKKALNLQKVSRRGKELRPKGFDALQESSLDSGMSGRKRKASISLTDDEVDDEEETIEEEEANEGVVDHQTELSNLAKEGRLLLPY

SEQ ID NO: 5771 - protein, 715 aa, Homo sapiens
MAANMYRVGDYVYFENSSSNPYLIRRIEELNKTANGNVEAKVVCFYRRRDISSTLIALADKHATLSVCYKAGPGADNGEEGEIEEEMENPEMVDLPEKLKHQLRHRELFLSRQLESLPATHIRGKCSVTLLNETESLKSYLEREDFFFYSLVYDPQQKTLLADKGEIRVGNRYQADITDLLKEGEEDGRDQSRLETQVWEAHNPLTDKQIDQFLVVARSVGTFARALDCSSSVRQPSLHMSAAAASRDITLFHAMDTLHKNIYDISKAISALVPQGGPVLCRDEMEEWSASEANLFEEALEKYGKDFTDIQQDFLPWKSLTSIIEYYYMWKTTDRYVQQKRLKAAEAESKLKQVYIPNYNKPNPNQISVNNVKAGVVNGTGAPGQSPGAGRACESCYTTQSYQWYSWGPPNMQCRLCASCWTYWKKYGGLKMPTRLDGERPGPNRSNMSPHGLPARSSGSPKFAMKTRQAFYLHTTKLTRIARRLCREILRPWHAARHPYLPINSAAIKAECTARLPEASQSPLVLKQAVRKPLEAVLRYLETHPRPPKPDPVKSVSSVLSSLTPAKVAPVINNGSPTILGKRSYEQHNGVDGNMKKRLLMPSRGLANHGQARHMGPSRNLLLNGKSYPTKVRLIRGGSLPPVKRRRMNWIDAPDDVFYMATEETRKIRKLLSSSETKRAARRPYKPIALRQSQALPPRPPPPAPVNDEPIVIED

SEQ ID NO: 5772 - protein, 538 aa, Homo sapiens
MVELVISPSLTVNSDCLDKLKFNRADAAVWTLSDRQGITKSAPLRVSQLFSRSCPRVLPRQPSTAMAAYGQTQYSAGIQQATPYTAYPPPAQAYGIPSYSIKTEDSLNHSPGQSGFLSYGSSFSTSPTGQSPYTYQMHGTTGFYQGGNGLGNAAGFGSVHQDYPSYPGFPQSQYPQYYGSSYNPPYVPASSICPSPLSTSTYVLQEASHNVPNQSSESLAGEYNTHNGPSTPAKEGDTDRPHRASDGKLRGRSKRSSDPSPAGDNEIERVFVWDLDETIIIFHSLLTGTFASRYGKDTTTSVRIGLMMEEMIFNLADTHLFFNDLEDCDQIHVDDVSSDDNGQDLSTYNFSADGFHSSAPGANLCLGSGVHGGVDWMRKLAFRYRRVKEMYNTYKNNVGGLIGTPKRETWLQLRAELEALTDLWLTHSLKALNLINSRPNCVNVLVTTTQLIPALAKVLLYGLGSVFPIENIYSATKTGKESCFERIMQRFGRKAVYVVIGDGVEEEQGAKKHNMPFWRISCHADLEALRHALELEYL

SEQ ID NO: 5773 - protein, 715 aa, Homo sapiens
MSKAHKPWPYRRRSQFSSRKYLKKEMNSFQQQPPPFGTVPPQMMFPPNWQGAEKDAAFLAKDFNFLTLNNQPPPGNRSQPRAMGPENNLYSQYEQKVRPCIDLIDSLRALGVEQDLALPAIAVIGDQSSGKSSVLEALSGVALPRGSGIVTRCPLVLKLKKQPCEAWAGRISYRNTELELQDPGQVEKEIHKAQNVMAGNGRGISHELISLEITSPEVPDLTIIDLPGITRVAVDNQPRDIGLQIKALIKKYIQRQQTINLVVVPCNVDIATTEALSMAHEVDPEGDRTIGILTKPDLMDRGTEKSVMNVVRNLTYPLKKGYMIVKCRGQQEITNRLSLAEATKKEITFFQTHPYFRVLLEEGSATVPRLAERLTTELIMHIQKSLPLLEGQIRESHQKATEELRRCGADIPSQEADKMFFLIEKIKMFNQDIEKLVEGEEVVRENETRLYNKIREDFKNWVGILATNTQKVKNIIHEEVEKYEKQYRGKELLGFVNYKTFEIIVHQYIQQLVEPALSMLQKAMEIIQQAFINVAKKHFGEFFNLNQTVQSTIEDIKVKHTAKAENMIQLQFRMEQMVFCQDQIYSVVLKKVREEIFNPLGTPSQNMKLNSHFPSNESSVSSFTEIGIHLNAYFLETSKRLANQIPFIIQYFMLRENGDSLQKAMMQILQEKNRYSWLLQEQSETATKRRILKERIYRLTQARHALCQFSSKEIH

SEQ ID NO: 5774 - protein, 609 aa, Homo sapiens
MPHLLVTFRDVAIDFSQEEWECLDPAQRDLYRDVMLENYSNLISLDLESSCVTKKLSPEKEIYEMESLQWENMGKRINHHLQYNGLGDNMECKGNLEGQEASQEGLYMCVKITCEEKATESHSTSSTFHRIIPTKEKLYKCKECRQGFSYLSCLIQHEENHNIEKCSEVKKHRNTFSKKPSYIQHQRIQTGEKPYECMECGKAFGRTSDLIQHQKIHTNEKPYQCNACGKAFIRGSQLTEHQRVHTGEKPYECKKCGKAFSYCSQYTLHQRIHSGEKPYECKDCGKAFILGSQLTYHQRIHSGEKPYECKECGKAFILGSHLTYHQRVHTGEKPYICKECGKAFLCASQLNEHQRIHTGEKPYECKECGKTFFRGSQLTYHLRVHSGERPYKCKECGKAFISNSNLIQHQRIHTGEKPYKCKECGKAFICGKQLSEHQRIHTGEKPFECKECGKAFIRVAYLTQHEKIHGEKHYECKECGKTFVRATQLTYHQRIHTGEKPYKCKECDKAFIYGSQLSEHQRIHRGEKPYECKQCGKAFIRGSHLTEHLRTHTGEKPYECKECGRAFSRGSELTLHQRIHTGEKPYTCVQCGKDFRCPSQLTQHTRLHN

SEQ ID NO: 5775 - protein, 504 aa, Homo sapiens
MLYFSLFWAARPLQRCGQLVRMAIRAQHSNAAQTQTGEANRGWTGQESLSDSDPEMWELLQREKDRQCRGLELIASENFCSRAALEALGSCLNNKYSEGYPGKRYYGGAEVVDEIELLCQRRALEAFDLDPAQWGVNVQPYSGSPANLAVYTALLQPHDRIMGLDLPDGGHLTHGYMSDVKRISATSIFFESMPYKLNPKTGLIDYNQLALTARLFRPRLIIAGTSAYARLIDYARMREVCDEVKAHLLADMAHISGLVAAKVIPSPFKHADIVTTTTHKTLRGARSGLIFYRKGVKAVDPKTGREIPYTFEDRINFAVFPSLQGGPHNHAIAAVAVALKQACTPMFREYSLQVLKNARAMADALLERGYSLVSGGTDNHLVLVDLRPKGLDGARAERVLELVSITANKNTCPGDRSAITPGGLRLGAPALTSRQFREDDFRRVVDFIDEGVNIGLEVKSKTAKLQDFKSFLLKDSETSQRLANLRQRVEQFARAFPMPGFDEH

SEQ ID NO: 5776 - protein, 312 aa, Homo sapiens
MSISNITVYMPSVLTLVGIPGLESVQCWIGIPFCAIYLIAMIGNSLLLSIIKSERSLHEPLYIFLGMLGATDIALASSIMPKMLGIFWFNVPEIYFDSCLLQMWFIHTLQGIESGILVAMALDRYVAICYPLRHANIFTHQLVIQIGTMVVLRAAILVAPCLVLIKCRFQFYHTTVISHSYCEHMAIVKLAAANVQVNKIYGLFVAFTVAGFDLTFITLSYIQIFITVFRLPQKEARFKAFNTCIAHICVFLQFYLLAFFSFFTHRFGSHISPYIHILFSSIYLLVPPFLNPLVYGAKTTQIRIHVVKMFCS

SEQ ID NO: 5777 - protein, 312 aa, Homo sapiens
MRNGTVITEFILLGFPVIQGLQTPLFIAIFLTYILTLAGNGLIIATVWAEPRLQIPMYFFLCNLSFLEIWYTTTVIPKLLGTFVVARTVICMSCCLLQAFFHFFVGTTEFLILTIMSFDRYLTICNPLHHPTIMTSKLCLQLALSSWVVGFTIVFCQTMLLIQLPFCGNNVISHFYCDVGPSLKAACIDTSILELLGVIATILVIPGSLLFNMISYIYILSAILRIPSATGHQKTFSTCASHLTVVSLLYGAVLFMYLRPTAHSSFKINKVVSVLNTILTPLLNPFIYTIRNKEVKGALRKAMTCPKTGHAK

SEQ ID NO: 5778 - protein, 1156 aa, Homo sapiens
MGNLLSKFRPGCRRRPLPGPGRGAPAPLSRDASPPGRAHSVPTPRPFRGLFRRNARRRPSAASIFVAPKRPCPLPRAAAAPLGVLPAVGWGLAIRKTPMLPARNPPRFGHPSSVRIPPPSRMFTLLLPSPREPAVKARKPIPATLLEETEVWAQEGPRRVKKDEDPVQIEGEDDEKRTPLSSGEASSTSRSQGTQGDVASFRCSPGPLEGNVYHKFSENSMSEKAQASPASSCLEGPAMPSTHSQAGCARHLGKPDPDATAPPEPAVGCSLLQQKLAAEVLNEEPPPSSLGLPIPLMSGKRMPDEKPFCIPPRSAAPPRAARNRPCKRKMSIPLLLPLPPSLPLLWDRGELPPPAKLPCLSVEGDLHTLEKSPEYKRNSRILEDKTETMTNSSITQPAPSFSQPVQTTDSLPLTTYTSQVSAPLPIPDLADLATGPLILPIPPLSTTPKMDEKIAFTIPNSPLALPADLVPILGDQSNEKGGSYNSVVGAAPLTSDPPTPPSSTPSFKPPVTRESPISMCVDSPPPLSFLTLLPVPSTGTSVITSKPMNSTSVISTVTTNASAHLTSQTAVDPEVVNMDTTAPSQVVIFTSSLSSRVSSLPNSQIHCSAEQRHPGKTSVYTSPLPFIFHNTTPSFNQLFGKEATPQPKFEAPDGQPQKASLPSACVFLSLPIIPPPDTSTLVNSASTASSSKPPIETNAMHTTPPSKAVILQSASVSKKYLPFYLGLPGSGNTQPSGNTASVQGSTSLPAQSVRAPATASNHPLNPGATPQPKFGAPDGPQQKTSLPSAHDFLSLPIMVPPDTSTLVSSASAASLSKPAIDTSDMNTTPPSKTVILQSTFVSRKEEYIRFYMGLPGSGNTLHSDSIASAQVSTSFPAQADRRPTTTSSHPLNTGSISHSTLGATDGQQKSDSSFILGNPATPAPVIGLTSPSVQPLSGSIIPPGFAELTSPYTALGTPVNAEPVEGHNASAFPNGTAKTSGFRIATGMPGTGDSTLLVGNTIPGPQVIMGPGTPMDGGSIGFSMSAPGPSSTSGELNIGQGQSGTPSTTSVFPFGQAAWDPTGHSMAAAPQGASNIPVFGYTSAAAYIPGLDPPTQNSCSGMGGDGTRSIVGGPCVPAFQQCILQHTWTERKFYTSSTHYYGQETYVRRHVCFQLP

SEQ ID NO: 5779 - protein, 415 aa, Homo sapiens
MVFAHRMDNSKPHLIIPTLLVPLQNRSCTETATPLPSQYLMELSEEHSWMSNQTDLHYVLKPGEVATASIFFGILWLFSIFGNSLVCLVIHRSRRTQSTTNYFVVSMACADLLISVASTPFVLLQFTTGRWTLGSATCKVVRYFQYLTPGVQIYVLLSICIDRFYTIVYPLSFKVSREKAKKMIAASWVFDAGFVTPVLFFYGSNWDSHCNYFLPSSWEGTAYTVIHFLVGFVIPSVLIILFYQKVIKYIWRIGTDGRTVRRTMNIVPRTKVKTIKMFLILNLLFLLSWLPFHVAQLWHPHEQDYKKSSLVFTAITWISFSSSASKPTLYSIYNANFRRGMKETFCMSSMKCYRSNAYTITTSSRMAKKNYVGISEIPSMAKTITKDSIYDSFDREAKEKKLAWPINSNPPNTFV

SEQ ID NO: 5780 - protein, 321 aa, Homo sapiens
MASSQGKNELKLADWMATLPESMHSIPLTNLAIPGSHDSFSFYIDEASPVGPEQPETVQNFVSVFGTVAKKLMRKWLATQTMNFTGQLGAGIRYFDLRISTKPRDPDNELYFAHGLFSAKVNEGLEEINAFLTDHHKEVVFLDFNHFYGMQKYHHEKLVQMLKDIYGNKMCPAIFAQEVSLKYLWEKDYQVLVFYHSPVALEVPFLWPGQMMPAPWANTTDPEKLIQFLQASITERRKKGSFFISQVVLTPKASTVVKGVASGLRETITERALPAMMQWVRTQKPGESGINIVTADFVELGDFISTVIKLNYVFDEGEANT

SEQ ID NO: 5781 - protein, 385 aa, Homo sapiens
MAAALFVLLGFALLGTHGASGAAGFVQAPLSQQRWVGGSVELHCEAVGSPVPEIQWWFEGQGPNDTCSQLWDGARLDRVHIHATYHQHAASTISIDTLVEEDTGTYECRASNDPDRNHLTRAPRVKWVRAQAVVLVLEPGTVFTTVEDLGSKILLTCSLNDSATEVTGHRWLKGGVVLKEDALPGQKTEFKVDSDDQWGEYSCVFLPEPMGTANIQLHGPPRVKAVKSSEHINEGETAMLVCKSESVPPVTDWAWYKITDSEDKALMNGSESRFFVSSSQGRSELHIENLNMEADPGQYRCNGTSSKGSDQAIITLRVRSHLAALWPFLGIVAEVLVLVTIIFIYEKRRKPEDVLDDDDAGSAPLKSSGQHQNDKGKNVRQRNSS

SEQ ID NO: 5782 - protein, 732 aa, Homo sapiens
MPVRRGHVAPQNTFLGTIIRKFEGQNKKFIIANARVQNCAIIYCNDGFCEMTGFSRPDVMQKPCTCDFLHGPETKRHDIAQIAQALLGSEERKVEVTYYHKNGSTFICNTHIIPVKNQEGVAMMFIINFEYVTDNENAATPERVNPILPIKTVNRKFFGFKFPGLRVLTYRKQSLPQEDPDVVVIDSSKHSDDSVAMKHFKSPTKESCSPSEADDTKALIQPSKCSPLVNISGPLDHSSPKRQWDRLYPDMLQSSSQLSHSRSRESLCSIRRASSVHDIEGFGVHPKNIFRDRHASEGPFNHIKSSLLGSTSDSNLNKYSTINKIPQLTLNFSEVKTEKKNSSPPSSDKTIIAPKVKDRTHNVTEKVTQVLSLGADVLPEYKLQTPRINKFTILHYSPFKAVWDWLILLLVIYTAIFTPYSAAFLLNDREEQKRRECGYSCSPLNVVDLIVDIMFIIDILINFRTTYVNQNEEVVSDPAKIAIHYFKGWFLIDMVAAIPFDLLIFGSGSDETTTLIGLLKTARLLRLVRVARKLDRYSEYGAAVLMLLMCIFALIAHWLACIWYAIGNVERPYLTDKIGWLDSLGQQIGKRYNDSDSSSGPSIKDKYVTALYFTFSSLTSVGFGNVSPNTNSEKIFSICVMLIGSLMYASIFGNVSAIIQRLYSGTARYHMQMLRVKEFIRFHQIPNPLRQRLEEYFQHAWTYTNGIDMNMVCMSVFQNESAAGIIVIAKME

SEQ ID NO: 5783 - protein, 588 aa, Homo sapiens
MAAPALALVSFEDVVVTFTGEEWGHLDLAQRTLYQEVMLETCRLLVSLGHPVPKPELIYLLEHGQELWTVKRGLSQSTCAGEKAKPKITEPTASQLAFSEESSFQELLAQRSSRDSRLGQARDEEKLIKIQEGNLRPGTNPHKEICPEKLSYKHDDLEPDDSLGLRVLQERVTPQDALHECDSQGPGKDPMTDARNNPYTCTECGKGFSKKWALVRHQQIHAGVKPYECNECGKACRYMADVIRHMRLHTGEKPYKCIECGKAFKRRFHLTEHQRIHTGDKPYECKECGKAFTHRSSFIQHNMTHTREKPFLCKECGKAFYYSSSFAQHMRIHTGKKLYECGECGKAFTHRSTFIQHNVTHTGEKPFLCKECGKTFCLNSSFTQHMRIHTGEKPYECGECGKAFTHRSTFIRHKRTHTGEKPFECKECGKAFCDSSSLIQHMRIHTGEKPYECSECGKAFTHHSVFIRHNRTHSGQKPLECKECAKAFYYSSSFTRHMRIHTGEKPYVCRECGKAFTQPANFVRHNRIHTGEKPFECKECEKAFCDNFALTQHMRTHTGEKPFECNECGKTFSHSSSFTHHRKIHTRV

SEQ ID NO: 5784 - protein, 653 aa, Homo sapiens
MIPPQEASARRREIEDKLKQEEETLSFIRDSLEKSDQLTKNMVSILSSFESRLMKLENSIIPVHKQTENLQRLQENVEKTLSCLDHVISYYHVASDTEKIIREGPTGRLEEYLGSMAKIQKAVEYFQDNSPDSPELNKVKLLFERGKEALESEFRSLMTRHSKVVSPVLILDLISGDDDLEAQEDVTLEHLPESVLQDVIRISRWLVEYGRNQDFMNVYYQIRSSQLDRSIKGLKEHFHKSSSSSGVPYSPAIPNKRKDTPTKKPVKRPGRDDMLDVETDAYIHCVSAFVKLAQSEYQLLADIIPEHHQKKTFDSLIQDALDGLMLEGENIVSAARKAIVRHDFSTVLTVFPILRHLKQTKPEFDQVLQGTAASTKNKLPGLITSMETIGAKALEDFADNIKNDPDKEYNMPKDGTVHELTSNAILFLQQLLDFQETAGAMLASQETSSSATSYSSEFSKRLLSTYICKVLGNLQLNLLSKSKVYEDPALSAIFLHNNYNYILKSLEKSELIQLVAVTQKTAERSYREHIEQQIQTYQRSWLKVTDYIAEKNLPVFQPGVKLRDKERQIIKERFKGFNDGLEELCKIQKAWAIPDTEQRDRIRQAQKTIVKETYGAFLQKFGSVPFTKNPEKYIKYGVEQVGDMIDRLFDTSA

SEQ ID NO: 5785 - protein, 759 aa, Homo sapiens
MISSTSVYGLKMQWTPEHAQWPEQHFDITSTTRSPAHKVEAYRGHLQRTYQYAWANDDISALTASNLLKKYAEKYSGILEGPVDRPVLSNYSDTPSGLVNGRKNESEPWQPSLNSEAVYPMNCVPDVITASKAGVSSALPPADVSASIGSSPGVASNLTEPSYSSSTCGSHTVPSLHAGLPSQEYAPGYNGSYLHSTYSSQPAPALPSPHPSPLHSSGLLQPPPPPPPPPALVPGYNGTSNLSSYSYPSASYPPQTAVGSGYSPGGAPPPPSAYLPSGIPAPTPLPPTTVPGYTYQGHGLTPIAPSALTNSSASSLKRKAFYMAGQGDMDSSYGNYSYGQQRSTQSPMYRMPDNSISNTNRGNGFDRSAETSSLAFKPTKQLMSSEQQRKFSSQSSRALTPPSYSTAKNSLGSRSSESFGKYTSPVMSEHGDEHRQLLSHPMQGPGLRAATSSNHSVDEQLKNTDTHLIDLVTNEIITQGPPVDWNDIAGLDLVKAVIKEEVLWPVLRSDAFSGLTALPRSILLFGPRGTGKTLLGRCIASQLGATFFKIAGSGLVAKWLGEAEKIIHASFLVARCRQPSVIFVSDIDMLLSSQVNEEHSPVSRMRTEFLMQLDTVLTSAEDQIVVICATSKPEEIDESLRRYFMKRLLIPLPDSTARHQIIVQLLSQHNYCLNDKEFALLVQRTEGFSGLDVAHLCQEAVVGPLHAMPATDLSAIMPSQLRPVTYQDFENAFCKIQPSISQKELDMYVEWNKMFGCSQ

SEQ ID NO: 5786 - protein, 772 aa, Homo sapiens
MGDEDDDESCAVELRITEANLTGHEEKVSVENFELLKVLGTGAYGKVFLVRKAGGHDAGKLYAMKVLRKAALVQRAKTQEHTRTERSVLELVRQAPFLVTLHYAFQTDAKLHLILDYVSGGEMFTHLYQRQYFKEAEVRVYGGEIVLALEHLHKLGIIYRDLKLENVLLDSEGHIVLTDFGLSKEFLTEEKERTFSFCGTIEYMAPEIIRSKTGHGKAVDWWSLGILLFELLTGASPFTLEGERNTQAEVSRRILKCSPPFPPRIGPVAQDLLQRLLCKDPKKRLGAGPQGAQEVRNHPFFQGLDWVALAARKIPAPFRPQIRSELDVGNFAEEFTRLEPVYSPPGSPPPGDPRIFQGYSFVAPSILFDHNNAVMTDGLEAPGAGDRPGRAAVARSAMMQDSPFFQQYELDLREPALGQGSFSVCRRCRQRQSGQEFAVKILSRRLEANTQREVAALRLCQSHPNVVNLHEVHHDQLHTYLVLELLRGGELLEHIRKKRHFSESEASQILRSLVSAVSFMHEEAGVVHRDLKPENILYADDTPGAPVKIIDFGFARLRPQSPGVPMQTPCFTLQYAAPELLAQQGYDESCDLWSLGVILYMMLSGQVPFQGASGQGGQSQAAEIMCKIREGRFSLDGEAWQGVSEEAKELVRGLLTVDPAKRLKLEGLRGSSWLQDGSARSSPPLRTPDVLESSGPAVRSGLNATFMAFNRGKREGFFLKSVENAPLAKRRKQKLRSATASRRGSPAPANPGRAPVASKGAPRRANGPLPPS

SEQ ID NO: 5787 - protein, 524 aa, Homo sapiens
MLTCNKAGSRMVVDAANSNGPFQPVVLLHIRDVPPADQEKLFIQKLRQCCVLFDFVSDPLSDLKWKEVKRAALSEMVEYITHNRNVITEPIYPEVVHMFAVNMFRTLPPSSNPTGAEFDPEEDEPTLEAAWPHLQLVYEFFLRFLESPDFQPNIAKKYIDQKFVLQLLELFDSEDPRERDFLKTTLHRIYGKFLGLRAYIRKQINNIFYRFIYETEHHNGIAELLEILGSIINGFALPLKEEHKIFLLKVLLPLHKVKSLSVYHPQLAYCVVQFLEKDSTLTEPVVMALLKYWPKTHSPKEVMFLNELEEILDVIEPSEFVKIMEPLFRQLAKCVSSPHFQVAERALYYWNNEYIMSLISDNAAKILPIMFPSLYRNSKTHWNKTIHGLIYNALKLFMEMNQKLFDDCTQQFKAEKLKEKLKMKEREEAWVKIENLAKANPQYTVYSQASTMSIPVAMETDGPLFEDVQMLRKTVKDEAHQAQKDPKKDRPLARRKSELPQDPHTKKALEAHCRADELASQDGR

SEQ ID NO: 5788 - protein, 905 aa, Homo sapiens
MEGESSRFEIHTPVSDKKKKKCSIHKERPQKHSHEIFRDSSLVNEQSQITRRKKRKKDFQHLISSPLKKSRICDETANATSTLKKRKKRRYSALEVDEEAGVTVVLVDKENINNTPKHFRKDVDVVCVDMSIEQKLPRKPKTDKFQVLAKSHAHKSEALHSKVREKKNKKHQRKAASWESQRARDTLPQSESHQEESWLSVGPGGEITELPASAHKNKSKKKKKKSSNREYETLAMPEGSQAGREAGTDMQESQPTVGLDDETPQLLGPTHKKKSKKKKKKKSNHQEFEALAMPEGSQVGSEVGADMQESRPAVGLHGETAGIPAPAYKNKSKKKKKKSNHQEFEAVAMPESLESAYPEGSQVGSEVGTVEGSTALKGFKESNSTKKKSKKRKLTSVKRARVSGDDFSVPSKNSESTLFDSVEGDGAMMEEGVKSRPRQKKTQACLASKHVQEAPRLEPANEEHNVETAEDSEIRYLSADSGDADDSDADLGSAVKQLQEFIPNIKDRATSTIKRMYRDDLERFKEFKAQGVAIKFGKFSVKENKQLEKNVEDFLALTGIESADKLLYTDRYPEEKSVITNLKRRYSFRLHIGRNIARPWKLIYYRAKKMFDVNNYKGRYSEGDTEKLKMYHSLLGNDWKTIGEMVARSSLSVALKFSQISSQRNRGAWSKSETRKLIKAVEEVILKKMSPQELKEVDSKLQENPESCLSIVREKLYKGISWVEVEAKVQTRNWMQCKSKWTEILTKRMTNGRRIYYGMNALRAKVSLIERLYEINVEDTNEIDWEDLASAIGDVPPSYVQTKFSRLKAVYVPFWQKKTFPEIIDYLYETTLPLLKEKLEKMMEKKGTKIQTPAAPKQVFPFRDIFYYEDDSEGEDIEKESEGQAPCMAHACNSSTLGGQGRWII

SEQ ID NO: 5789 - protein, 1437 aa, Homo sapiens
MKDIDIGKEYIIPSPGYRSVRERTSTSGTHRDREDSKFRRTRPLECQDALETAARAEGLSLDASMHSQLRILDEEHPKGKYHHGLSALKPIRTTSKHQHPVDNAGLFSCMTFSWLSSLARVAHKKGELSMEDVWSLSKHESSDVNCRRLERLWQEELNEVGPDAASLRRVVWIFCRTRLILSIVCLMITQLAGFSGPAFMVKHLLEYTQATESNLQYSLLLVLGLLLTEIVRSWSLALTWALNYRTGVRLRGAILTMAFKKILKLKNIKEKSLGELINICSNDGQRMFEAAAVGSLLAGGPVVAILGMIYNVIILGPTGFLGSAVFILFYPAMMFASRLTAYFRRKCVAATDERVQKMNEVLTYIKFIKMYAWVKAFSQSVQKIREEERRILEKAGYFQSITVGVAPIVVVIASVVTFSVHMTLGFDLTAAQAFTVVTVFNSMTFALKVTPFSVKSLSEASVAVDRFKSLFLMEEVHMIKNKPASPHIKIEMKNATLAWDSSHSSIQNSPKLTPKMKKDKRASRGKKEKVRQLQRTEHQAVLAEQKGHLLLDSDERPSPEEEEGKHIHLGHLRLQRTLHSIDLEIQEGKLVGICGSVGSGKTSLISAILGQMTLLEGSIAISGTFAYVAQQAWILNATLRDNILFGKEYDEERYNSVLNSCCLRPDLAILPSSDLTEIGERGANLSGGQRQRISLARALYSDRSIYILDDPLSALDAHVGNHIFNSAIRKHLKSKTVLFVTHQLQYLVDCDEVIFMKEGCITERGTHEELMNLNGDYATIFNNLLLGETPPVEINSKKETSGSQKKSQDKGPKTGSVKKEKAVKPEEGQLVQLEEKGQGSVPWSVYGVYIQAAGGPLAFLVIMALFMLNVGSTAFSTWWLSYWIKQGSGNTTVTRGNETSVSDSMKDNPHMQYYASIYALSMAVMLILKAIRGVVFVKGTLRASSRLHDELFRRILRSPMKFFDTTPTGRILNRFSKDMDEVDVRLPFQAEMFIQNVILVFFCVGMIAGVFPWFLVAVGPLVILFSVLHIVSRVLIRELKRLDNITQSPFLSHITSSIQGLATIHAYNKGQEFLHRYQELLDDNQAPFFLFTCAMRWLAVRLDLISIALITTTGLMIVLMHGQIPPAYAGLAISYAVQLTGLFQFTVRLASETEARFTSVERINHYIKTLSLEAPARIKNKAPSPDWPQEGEVTFENAEMRYRENLPLVLKKVSFTIKPKEKIGIVGRTGSGKSSLGMALFRLVELSGGCIKIDGVRISDIGLADLRSKLSIIPQEPVLFSGTVRSNLDPFNQYTEDQIWDALERTHMKECIAQLPLKLESEVMENGDNFSVGERQLLCIARALLRHCKILILDEATAAMDTETDLLIQETIREAFADCTMLTIAHRLHTVLGSDRIMVLAQGQVVEFDTPSVLLSNDSSRFYAMFAAAENKVAVKG

SEQ ID NO: 5790 - protein, 675 aa, Homo sapiens
MNDISQKAEILLSSSKPVPKTYVPKLGKGDVKDKFEAMQRAREERNQRRSRDEKQRRKEQYIREREWNRRKQEIKEMLASDDEEDVSSKVEKAYVPKLTGTVKGRFAEMEKQRQEEQRKRTEEERKRRIEQDMLEKRKIQRELAKRAEQIEDINNTGTESASEEGDDSLLITVVPVKSYKTSGKMKKNFEDLEKEREEKERIKYEEDKRIRYEEQRPSLKEAKCLSLVMDDEIESEAKKESLSPGKLKLTFEELERQRQENRKKQAEEEARKRLEEEKRAFEEARRQMVNEDEENQDTAKIFKGYRPGKLKLSFEEMERQRREDEKRKAEEEARRRIEEEKKAFAEARRNMVVDDDSPEMYKTISQEFLTPGKLEINFEELLKQKMEEEKRRTEEERKHKLEMEKQEFEQLRQEMGEEEEENETFGLSREYEELIKLKRSGSIQAKNLKSKFEKIGQLSEKEIQKKIEEERARRRAIDLEIKEREAENFHEEDDVDVRPARKSEAPFTHKVNMKARFEQMAKAREEEEQRRIEEQKLLRMQFEQREIDAALQKKREEEEEEEGSIMNGSTAEDEEQTRSGAPWFKKPLKNTSVVDSEPVRFTVKVTGEPKPEITWWFEGEILQDGEDYQYIERGETYCLYLPETFPEDGGEYMCKAVNNKGSAASTCILTIESKN

SEQ ID NO: 5791 - protein, 1294 aa, Homo sapiens [sequence omitted]

SEQ ID NO: 5792 - protein, 561 aa, Homo sapiens
MRHCINCCIQLLPDGAHKQQVNCQGGPHHGHQACPTCKGENKILFRVDSKQMNLLAVLEVRTEGNENWGGFLRFKKGKRCSLVFGLIIMTLVMASYILSGAHQELLISSPFHYGGFPSNPSLMDSENPSDTKEHHHQSSVNNISYMKDYPSIKLIINSITTRIEFTTRQLPDLEDLKKQELHMFSVIPNKFLPNSKSPCWYEEFSGQNTTDPYLTNSYVLYSKRFRSTFDALRKAFWGHLAHAHGKHFRLRCLPHFYIIGQPKCGTTDLYDRLRLHPEVKFSAIKEPHWWTRKRFGIVRLRDGLRDRYPVEDYLDLFDLAAHQIHQGLQASSAKEQSKMNTIIIGEASASTMWDNNAWTFFYDNSTDGEPPFLTQDFIHAFQPNARLIVMLRDPVERLYSDYLYFASSNKSADDFHEKVTEALQLFENCMLDYSLRACVYNNTLNNAMPVRLQVGLYAVYLLDWLSVFDKQQFLILRLEDHASNVKYTMHKVFQFLNLGPLSEKQEALMTKSPASNARRPEDRNLGPMWPITQKILRDFYRPFNARLAQVLADEAFAWKTT

SEQ ID NO: 5793 - protein, 1196 aa, Homo sapiens
MENVDNSLDGSDVSEPAKPEAGLEVAQSILSKFSMKSLFGFTSKLESVNPEEEDAVLKAFHSLDVNPTSQQDDSSNGLDPQEAGSRVSPDLGNDEKIASVETESEGSQRKEAGTSLLAQELLPLSTLKGTKDDVICVRGTLVHTTSDSDSDDGGQEPEEGSSTNGPKSPSGVLSEPSQESKENPGGFRENTVTGEMNGAELCAEDPQRIPPEMSSKLEAGNGGLQTERRPSQDQVGEEGSQDLPAVTNQNSSVGITESASSKKEVSGEKSFQLPAFFSGLRVLKKGATAEGGETITEIKPKDGDLALLKLTQPVQKSLVQAGLQTVKSEKKATDPKATPTLLEQLSLLLNIDMPKTEPKGADPESPRREEMGCNADQESQSGPGVPQTQGGEVKPKSPETALEAFKALFIRPPRKGTTADTSELEALKRKMRHEKESLRAVFERSNSKPADGPSDSKSPDHSLTEQDDRTPGRLQAVWPPPKTKDTEEKVGLKYTEAEYQAAILHLKREHKEEIENLQAQFELRAFHIRGEHAMITARLEETIENLKHELEHRWRGGCEERKDVCISTDDDCPPKTFRNVCVQTDRETFLKPCESESKTTRSNQLVPKKLNISSLSQLSPPNDHKDIHAALQPMEGMASNQQKALPPPPASIPPPPPLPSGLGSLSPAPPMPPVSAGPPLPPPPPPPPPLPPPSSAGPPPPPPPPPLPNSPAPPNPGGPPPAPPPPGLAPPPPPGLFFGLGSSSSQCPRKPAIEPSCPMKPLYWTRIQISDRSQNATPTLWDSLEEPDIRDPSEFEYLFSKDTTQQKKKPLSETYEKKNKVKKIIKLLDGKRSQTVGILISSLHLEMKDIQQAIFNVDDSVVDLETLAALYENRAQEDELVKIRKYYETSKEEELKLLDKPEQFLHELAQIPNFAERAQCIIFRSVFSEGITSLHRKVEIITRASKDLLHVKSVKDILALILAFGNYMNGGNRTRGQADGYSLEILPKLKDVKSRDNGINLVDYVVKYYLRYYDQEAGTEKSVFPLPEPQDFFLASQVKFEDLIKDLRKLKRQLEASEKQMVVVCKESPKEYLQPFKDKLEEFFQKAKKEHKMEESHLENAQKSFETTVRYFGMKPKSGEKEITPSYVFMVWYEFCSDFKTIWKRESKNISKERLKMAQESVSKLTSEKKVETKKINPTASLKERLRQKEASVTTN

SEQ ID NO: 5794 - protein, 778 aa, Homo sapiens
MNLTEDCMVFEDVAIYFSQEEWGILNDAQRHLHSNVMLENFALLSSVGCWHGAKDEEVPSKQCVSVRVLQVTIPKPALSTLKAQPCKMCSSILKDILHLAEHDGTHPEQGLYTCAAEHDLHQKEQIREKLTRSDEWRPSFVNHSAHVGERNFTCTQGGKDFTASSDLLQQQVLNSGWKLYRDTQDGEAFQGEQNDFNSSQGGKDFCHQHGLFEHQKTHNGERPYEFSECGELFRYNSNLIKYQQNHAGERPYEGTEYGKTFIRKSNLVQHQKIHSEGFLSKRSDPIEHQEILSRPTPYECTQCGKAFLTQAHLVGHQKTHTGEQPYECNKCGKFFMYNSKLIRHQKVHTGERRYECSECGKLFMDSFTLGRHQRVHTGERPFECSICGKFFSHRSTLNMHQRVHAGKRLYKCSECGKAFSLKHNVVQHLKIHTGERPYECTECEKAFVRKSHLVQHQKIHTDAFSKRSDLIQHKRIDIRPRPYTCSECGKAFLTQAHLVGHQKIHTGERPYECTQCAKAFVRKSHLVQHEKIHTDAFSKRSDLIQHKRIDLRPRPYVCSECGKAFLTQAHLDGHQKIQTGERRYECNECGKFFLDSYKLVIHQRIHTGEKPYKCSKCGKFFRYRCTLSRHQKVHTGERPYECSECGKFFRDSYKLIIHQRVHTGEKPYECSNCGKFLRYRSTFIKHHKVCTGEKPHECSKCRELFRTKSSLIIHQQSHTGESPFKLRECGKDFNKCNTGQRQKTHTGERSYECGESSKVFKYNSSLIKHQIIHTGKRP

SEQ ID NO: 5795 - protein, 729 aa, Homo sapiens
MTEITAEGNASTTTTVIDSKNGSVPKSPGKVLKRTVTEDIVTTFSSPAAWLLVIALIITWSAVAIVMFDLVDYKNFSASSIAKIGSDPLKLVRDAMEETTDWIYGFFSLLSDIISSEDEEDDDGDEDTDKGEIDEPPLRKKEIHKDKTEKQEKPERKIQTKVTHKEKEKGKEKVREKEKPEKKATHKEKIEKKEKPETKTLAKEQKKAKTAEKSEEKTKKEVKGGKQEKVKQTAAKVKEVQKTPSKPKEKEDKEKAAVSKHEQKDQYAFCRYMIDIFVHGDLKPGQSPAIPPPLPTEQASRPTPASPALEEKEGEKKKAEKKVTSETKKKEKEDIKKKSEKETAIDVEKKEPGKASETKQGTVKIAAQAAAKKDEKKEDSKKTKKPAEVEQPKGKKQEKKEKHVEPAKSPKKEHSVPSDKQVKAKTERAKEEIGAVSIKKAVPGKKEEKTTKTVEQEIRKEKSGKTSSILKDKEPIKGKEEKVPASLKEKEPETKKDEKMSKAGKEVKPKPPQLQGKKEEKPEPQIKKEAKPAISEKVQIHKQDIVKPEKTVSHGKPEEKVLKQVKAVTIEKTAKPKPTKKAEHREREPPSIKTDKPKPTPKGTSEVTESGKKKTEISEKESKEKADMKHLREEKVSTRKESLQLHNVTKAEKPARVSKDVEDVPASKKAKEGTEDVSPTKQKSPISFFQCVYLDGYNGYGFQFPFTPADRPGESSGQANSPGQKQQGQ

SEQ ID NO: 5796 - protein, 147 aa, Homo sapiens
MVHLTPEEKSAVTALWGKVNVDEVGGEALGRLLVVYPWTQRFFESFGDLSTPDAVMGNPKVKAHGKKVLGAFSDGLAHLDNLKGTFATLSELHCDKLHVDPENFRLLGNVLVCVLAHHFGKEFTPPVQAAYQKVVAGVANALAHKYH

SEQ ID NO: 5797 - protein, 619 aa, Homo sapiens
MRPKRLGRCCAGSRLGPGDPAALTCAPSPSASPAPEPSAQPQARGTGQRVGSRATSGSQFLSEARTGARPASEAGAKAGARRPSAFSAIQGDVRSMPDNSDAPWTRFVFQGPFGSRATGRGTGKAAGIWKTPAAYVGRRPGVSGPERAAFIRELEEALCPNLPPPVKKITQEDVKVMLYLLEELLPPVWESVTYGMVLQRERDLNTAARIGQSLVKQNSVLMEENSKLEALLGSAKEEILYLRHQVNLRDELLQLYSDSDEEDEDEEEEEEEKEAEEEQEEEEAEEDLQCAHPCDAPKLISQEALLHQHHCPQLEALQEKLRLLEEENHQLREEASQLDTLEDEEQMLILECVEQFSEASQQMAELSEVLVLRLENYERQQQEVARLQAQVLKLQQRCRMYGAETEKLQKQLASEKEIQMQLQEEETLPGFQETLAEELRTSLRRMISDPVYFMERNYEMPRGDTSSLRYDFRYSEDREQVRGFEAEEGLMLAADIMRGEDFTPAEEFVPQEELGAAKKVPAEEGVMEEAELVSEETEGWEEVELELDEATRMNVVTSALEASGLGPSHLDMNYVLQQLANWQDAHYRRQLRWKMLQKGECPHGALPAASRTSCRSSCR

SEQ ID NO: 5798 - protein, 942 aa, Homo sapiens
MASVASCDSRPSSDELPGDPSSQEEDEDYDFEDRVSDSGSYSSASSDYDDLEPEWLDSVQKNGELFYLELSEDEEESLLPETPTVNHVRFSENEIIIEDDYKERKKYEPKLKQFTKILRRKRLLPKRCNKKNSNDNGPVSILKHQSNQKTGVIVQQRYKDVNVYVNPKKLTVIKAKEQLKLLEVLVGIIHQTKWSWRRTGKQGDGERLVVHGLLPGGSAMKSGQVLIGDVLVAVNDVDVTTENIERVLSCIPGPMQVKLTFENAYDVKRETSHPRQKKTQSNTSDLVKLLWGEEVEGIQQSGLNTPHIIMYLTLQLDSETSKEEQEILYHYPMSEASQKLKSVRGIFLTLCDMLENVTGTQVTSSSLLLNGKQIHVAYWKESDKLLLIGLPAEEVPLPRLRNMIENVIQTLKFMYGSLDSAFCQIENVPRLDHFFNLFFQRALQPAKLHSSASPSAQQYDASSAVLLDNLPGVRWLTLPLEIKMELDMALSDLEAADFAELSEDYYDMRRLYTILGSSLFYKGYLICSHLPKDDLIDIAVYCRHYCLLPLAAKQRIGQLIIWREVFPQHHLRPLADSSTEVFPEPEGRYFLLVVGLKHYMLCVLLEAGGCASKAIGSPGPDCVYVDQVKTTLHQLDGVDSRIDERLASSPVPCLSCADWFLTGSREKTDSLTTSPILSRLQGTSKVATSPTCRRTLFGDYSLKTRKPSPSCSSGGSDNGCEGGEDDGFSPHTTPDAVRKQRESQGSDGLEESGTLLKVTKKKSTLPNPFHLGNLKKDLPEKELEIYNTVKLTSGPENTLFHYVALETVQGIFITPTLEEVAQLSGSIHPQLIKNFHQCCLSIRAVFQQTLVEEKKKGLNSGDHSDSAKSVSSLNPVKEHGVLFECSPGNWTDQKKAPPVMAYWVVGRLFLHPKPQELYVCFHDSVTEIAIEIAFKLFFGLTL

SEQ ID NO: 5799 - protein, 920 aa, Homo sapiens
MANGTADVRKLFIFTTTQNYFGLMSELWDQPLLCNCLEINNFLDDGNQMLLRVQRSDAGISFSNTIEFGDTKDKVLVFFKLRPEVITDENLHDNILVSSMLESPISSLYQAVRQVFAPMLLKDQEWSRNFDPKLQNLLSELEAGLGIVLRRSDTNLTKLKFKEDDTRGILTPSDEFQFWIEQAHRGNKQISKERANYFKELFETIAREFYNLDSLSLLEVVDLVETTQDVVDDVWRQTEHDHYPESRMLHLLDIIGGSFGRFVQKKLGTLNLWEDPYYLVKESLKAGISICEQWVIVCNHLTGQVWQRYVPHPWKNEKYFPETLDKLGKRLEEVLAIRTIHEKFLYFLPASEEKIICLTRVFEPFTGLNPVQYNPYTEPLWKAAVSQYEKIIAPAEQKIAGKLKNYISEIQDSPQQLLQAFLKYKELVKRPTISKELMLERETLLARLVDSIKDFRLDFENRCRGIPGDASGPLSGKNLSEVVNSIVWVRQLELKVDDTIKIAEALLSDLPGFRCFHQSAKDLLDQLKLYEQEQFDDWSRDIQSGLSDSRSGLCIEASSRIMELDSNDGLLKVHYSDRLVILLREVRQLSALGFVIPAKIQQVANIAQKFCKQAIILKQVAHFYNSIDQQMIQSQRPMMLQSALAFEQIIKNSKAGSGGKSQITWDNPKELEGYIQKLQNAAERLATENRKLRKWHTTFCEKVVVLMNIDLLRQQQRWKDGLQELRTGLATVEAQCPLAWQSKWEGPEDPLQYLRGLVARALAIQNWVDKAEKQALLSETLDLSELFHPDTFLNALRQETARAVGRSVDSLKFVASWKGRLQEAKLQIKISGLLLEGCSFDGNQLSENQLDSPSVSSVLPCFMGWIPQDACGPYSPDECISLPVYTSAERDRVVTNIDVPCGGNQDQWIQCGAALFLKNQ

SEQ ID NO: 5800 - protein, 846 aa, Homo sapiens
MAEPPSPVHCVAAAAPTATVSEKEPFGKLQLSSRDPPGSLSAKKVRTEEKKAPRRVNGEGGSGGNSRQLQPPAAPSPQSYGSPASWSFAPLSAAPSPSSSRSSFSFSAGTAVPSSASASLSQPVPRKLLVPPTLLHAQPHHLLLPAAAAAASANAKSRRPKEKREKERRRHGLGGAREAGGASREENGEVKPLPRDKIKDKIKERDKEKEREKKKHKVMNEIKKENGEVKILLKSGKEKPKTNIEDLQIKKVKKKKKKKHKENEKRKRPKMYSKSIQTICSGLLTDVEDQAAKGILNDNIKDYVGKNLDTKNYDSKIPENSEFPFVSLKEPRVQNNLKRLDTLEFKQLIHIEHQPNGGASVIHAYSNELSHLSPMEMERFAEEFVGLVFSENENSAAFYVMGIVHGAATYLPDFLDYFSFNFPNSPVKMEILGKKDIETTTMSNFHAQVKRTYSHGTYRAGPMRQISLVGAVDEEVGDYFPEFLDMLEESPFLKCTLPWGTLSSLKLQSRKDSDDGPIMWVRPGEQMIPVADMPKSPFKRKRTTNEIKNLQYLPRTSEPREMLFEDRTRAHADHIGQGFERQTTAAVGVLKAVHCGEWPDQPRITKDVICFHAEDFLEVVQRMQLDLHEPPLSQCVQWVDDAKLNQLRREGIRYARIQLYDNDIYFIPRNVVHQFKTVSAVCSLAWHIRLKLYHSEEDTSQNTATHETGTSSDSTSSVLGPHTDNMICAVSKASLDSVFSDKLHSKYELQQIKHEPIASVRIKEEPVNVNIPEKTTALNNMDGKNVKAKLDHVQFAEFKIDMDSKFENSNKDLKEELCPGNLSLVDTRQHSSAHSNQDKKDDDILC

SEQ ID NO: 5801 - protein, 314 aa, Homo sapiens
MATELDKIFLILAIAEFIISMLGNVFIGLVNCSEGIKNQKVFSADFILTCLAISTIGQLLVILFDSFLVGLASHLYTTYRLGKTVIMLWHMTNHLTTWLATCLSIFYFFKIAHFPHSLFLWLRWRMNGMIVMLLILSLFLLIFDSLVLEIFIDISLNIIDKSNLTLYLDESKTLYDKLSILKTLLSLTSFIPFSLFLTSLLFLFLSLVRHTRNLKLSSLGSRDSSTEAHRRAMKMVMSFLFLFIVHFFSLQVANWIFFMLWNNKCIKFVMLALNAFPSCHSFILILGNSKLQQTAVRLLWHLRNYTKTPNPLPL

SEQ ID NO: 5802 - protein, 458 aa, Homo sapiens
MGLCYSLRPLLFGGPGDDPCAASEPPVEDAQPAPAPALAPVRAAARDTARTLLPRGGEGSPACARPKADKPKEKRQRTEQLSAEEREAAKEREAVKEARKVSRGIDRMLRDQKRDLQQTHRLLLLGAGESGKSTIVKQMRILHVNGFNPEEKKQKILDIRKNVKDAIVTIVSAMSTIIPPVPLANPENQFRSDYIKSIAPITDFEYSQEFFDHVKKLWDDEGVKACFERSNEYQLIDCAQYFLERIDSVSLVDYTPTDQDLLRCRVLTSGIFETRFQVDKVNFHMFDVGGQRDERRKWIQCFNDVTAIIYVAACSSYNMVIREDNNTNRLRESLDLFESIWNNRWLRTISIILFLNKQDMLAEKVLAGKSKIEDYFPEYANYTVPEDATPDAGEDPKVTRAKFFIRDLFLRISTATGDGKHYCYPHFTCAVDTENIRRVFNDCRDIIQRMHLKQYELL

SEQ ID NO: 5803 - protein, 433 aa, Homo sapiens
MVWKVAVFLSVALGIGAVPIDDPEDGGKHWVVIVAGSNGWYNYRHQADACHAYQIIHRNGIPDEQIVVMMYDDIAYSEDNPTPGIVINRPNGTDVYQGVPKDYTGEDVTPQNFLAVLRGDAEAVKGIGSGKVLKSGPQDHVFIYFTDHGSTGILVFPNEDLHVKDLNETIHYMYKHKMYRKMVFYIEACESGSMMNHLPDNINVYATTAANPRESSYACYYDEKRSTYLGDWYSVNWMEDSDVEDLTKETLHKQYHLVKSHTNTSHVMQYGNKTISTMKVMQFQGMKRKASSPVPLPPVTHLDLTPSPDVPLTIMKRKLMNTNDLEESRQLTEEIQRHLDARHLIEKSVRKIVSLLAASEAEVEQLLSERAPLTGHSCYPEALLHFRTHCFNWHSPTYEYALRHLYVLVNLCEKPYPLHRIKLSMDHVCLGHY

SEQ ID NO: 5804 - protein, 996 aa, Homo sapiens
MRDFGFGVLQTAPLRSSSPGPLFCGEAYGPYAVGSVNPLPSATPFGPLSPPPLPVTGFLEAASPFSVPLGGGAGSPAAAASSSSPFLAHQQTMQDELLLGLTQQPARPLSGAAATEKLPDHHPGGGTIAGVTHLLPSQDFKPSLHHPSSSSASSCCCCRTSSPQDFSKRQQQQLSSQKRKEFSPPHLPHPPDSKPPPPPPPLHCPGRFSPPPPPAGPLLQPAQLAQRQQQQPPQQFSLLHQQHLSPQDFAPRQRPADLPPLPQLPPSPPAAPRRRHGGAGSPRKTPAAGEGSAAESPNAGLASSTPVNPAPGSMESPNHPLLNSPSNLLPGGALGAGAFSSLQSPDLPHPGGGGGGGGGGPPGGGGGGGSASPPPLPGFGTPWSVQTASPPPQPQQPPPTQPQQQPPPPQQPPQPQPQPPGSSATTPGGGSGGSLSAMPPPSPDSENGFYPGLPSSMNPAFFPSFSPVSPHGCTGLSVPTSGGGGGGFGGPFSATAVPPPPPPAMNIPQQQPPPPAAPQQPQSRRSPVSPQLQQQHQAAAAAFLQQRNSYNHHQPLLKQSPWSNHQSSGWGTGSMSWGAMHGRDHRRTGNMGIPGTMNQISPLKKPFSGNVIAPPKFTRSTPSLTPKSWIEDNVFRTDNNSNTLLPLQDRSRMYDSLNMHSLENSLIDIMRAEHDPLKGRLSYPHPGTDNLLMLNGRSSLFPIDDGLLDDGHSDQVGVLNSPTCYSAHQNGERIERFSRKVFVGGLPPDIDEDEITASFRRFGPLVVDWPHKAESKSYFPPKGYAFLLFQEESSVQALIDACIEEDGKLYLCVSSPTIKDKPVQIRPWNLSDSDFVMDGSQPLDPRKTIFVGGVPRPLRAVELAMIMDRLYGGVCYAGIDTDPELKYPKGAGRVAFSNQQSYIAAISARFVQLQHGDIDKRVEVKPYVLDDQMCDECQGARCGGKFAPFFCANVTCLQYYCEFCWANIHSRAGREFHKPLVKEGADRPRQIHFRWN

SEQ ID NO: 5805 - protein, 1215 aa, Homo sapiens
MTSTGQDSTTTRQRRSRQNPQSPPQDSSVTSKRNIKKGAVPRSIPNLAEVKKKGKMKKLGQAMEEDLIVGLQGMDLNLEAEALAGTGLVLDEQLNEFHCLWDDSFPEGPERLHAIKEQLIQEGLLDRCVSFQARFAEKEELMLVHSLEYIDLMETTQYMNEGELRVLADTYDSVYLHPNSYSCACLASGSVLRLVDAVLGAEIRNGMAIIRPPGHHAQHSLMDGYCMFNHVAVAARYAQQKHRIRRVLIVDWDVHHGQGTQFTFDQDPSVLYFSIHRYEQGRFWPHLKASNWSTTGFGQGQGYTINVPWNQVGMRDADYIAAFLHVLLPVALEFQPQLVLVAAGFDALQGDPKGEMAATPAGFAQLTHLLMGLAGGKLILSLEGGYNLRALAEGVSASLHTLLGDPCPMLESPGAPCRSAQASVSCALEALEPFWEVLVRSTETVERDNMEEDNVEESEEEGPWEPPVLPILTWPVLQSRTGLVYDQNMMNHCNLWDSHHPEVPQRILRIMCRLEELGLAGRCLTLTPRPATEAELLTCHSAEYVGHLRATEKMKTRELHRESSNFDSIYICPSTFACAQLATGAACRLVEAVLSGEVLNGAAVVRPPGHHAEQDAACGFCFFNSVAVAARHAQTISGHALRILIVDWDVHHGNGTQHMFEDDPSVLYVSLHRYDHGTFFPMGDEGASSQIGRAAGTGFTVNVAWNGPRMGDADYLAAWHRLVLPIAYEFNPELVLVSAGFDAARGDPLGGCQVSPEGYAHLTHLLMGLASGRIILILEGGYNLTSISESMAACTRSLLGDPPPLLTLPRPPLSGALASITETIQVHRRYWRSLRVMKVEDREGPSSSKLVTKKAPQPAKPRLAERMTTREKKVLEAGMGKVTSASFGEESTPGQTNSETAVVALTQDQPSEAATGGATLAQTISEAAIGGAMLGQTTSEEAVGGATPDQTTSEETVGGAILDQTTSEDAVGGATLGQTTSEEAVGGATLAQTTSEAAMEGATLDQTTSEEAPGGTELIQTPLASSTDHQTPPTSPVQGTTPQISPSTLIGSLRTLELGSESQGASESQAPGEENLLGEAAGGQDMADSMLMQGSRGLTDQAIFYAVTPLPWCPHLVAVCPIPAAGLDVTQPCGDCGTIQENWVCLSCYQVYCGRYINGHMLQHHGNSGHPLVLSYIDLSAWCYYCQAYVHHQALLDVKNIAHQNKFGEDMPHPH

SEQ ID NO: 5806 - protein, 320 aa, Homo sapiens
MERTNDSTSTEFFLVGLSAHPKLQTVFFVLILWMYLMILLGNGVLISVIIFDSHLHTPMYFFLCNLSFLDVCYTSSSVPLILASFLAVKKKVSFSGCMVQMFISFAMGATECMILGTMALDRYVAICYPLRYPVIMSKGAYVAMAAGSWVTGLVDSVVQTAFAMQLPFCANNVIKHFVCEILAILKLACADISINVISMTGSNLIVLVIPLLVISISYIFIVATILRIPSTEGKHKAFSTCSAHLTVVIIFYGTIFFMYAKPESKASVDSGNEDIIEALISLFYGVMTPMLNPLIYSLRNKDVKAAVKNILCRKNFSDGK

SEQ ID NO: 5807 - protein, 735 aa, Homo sapiens
MIPPQEASARRREIEDKLKQEEETLSFIRDSLEKSDQLTKNMVSILSSFESRLMKLENSIIPVHKQTENLQRLQENVEKTLSCLDHVISYYHVASDTEKIIREGPTGRLEEYLGSMAKIQKAVEYFQDNSPDSPELNKVKLLFERGKEALESEFRSLMTRHSKVVSPVLILDLISGDDDLEAQEDVTLEHLPESVLQDVIRISRWLVEYGRNQDFMNVYYQIRSSQLDRSIKGLKEHFHKSSSSSGVPYSPAIPNKRKDTPTKKPVKRPGTIRKAQNLLKQYSQHGLDGKKGGSNLIPLEGLLPCTPRGGLPGPWINAACVCAADISPGHEHDFRVKHLSEALNDKHGPLAGRDDMLDVETDAYIHCVSAFVKLAQSEYQLLADIIPEHHQKKTFDSLIQDALDGLMLEGENIVSAARKAIVRHDFSTVLTVFPILRHLKQTKPEFDQVLQGTAASTKNKLPGLITSMETIGAKALEDFADNIKNDPDKEYNMPKDGTVHELTSNAILFLQQLLDFQETAGAMLASQETSSSATSYSSEFSKRLLSTYICKVLGNLQLNLLSKSKVYEDPALSAIFLHNNYNYILKSLEKSELIQLVAVTQKTAERSYREHIEQQIQTYQRSWLKVTDYIAEKNLPVFQPGVKLRDKERQIIKERFKGFNDGLEELCKIQKAWAIPDTEQRDRIRQAQKTIVKETYGAFLQKFGSVPFTKNPEKYIKYGVEQVGDMIDRLFDTSA

SEQ ID NO: 5808 - protein, 314 aa, Homo sapiens
MRGFNKTTVVTQFILVGFSSLGELQLLLFVIFLLLYLTILVANVTIMAVIRFSWTLHTPMYGFLFILSFSESCYTFVIIPQLLVHLLSDTKTISFMACATQLFFFLGFACTNCLLIAVMGYDRYVAICHPLRYTLIINKRLGLELISLSGATGFFIALVATNLICDMRFCGPNRVNHYFCDMAPVIKLACTDTHVKELALFSLSILVIMVPFLLILISYGFIVNTILKIPSAEGKKAFVTCASHLTVVFVHYGCASIIYLRPKSKSASDKDQLVAVTYTVVTPLLNPLVYSLRNKEVKTALKRVLGMPVATKMS

SEQ ID NO: 5809 - protein, 372 aa, Homo sapiens
MRSVLRQRILKPKDVAIYSGEVNQVIADLIKRIYLLRSQAEDGETVTNVNDLFFKYSMEGVATILYESRLGCLENSIPQLTVEYIEALELMFSMFKTSMYAGAIPRWLRPFIPKPWREFCRSWDGLFKFSQIHVDNKLRDIQYQMDRGRRVSGGLLTYLFLSQALTLQEIYANVTEMLLAGVDTTSFTLSWTVYLLARHPEVQQTVYREIVKNLGERHVPTAADVPKVPLVRALLKETLRLFPVLPGNGRVTQEDLVIGGYLIPKGTQLALCHYATSYQDENFPRAKEFRPERWLRKGDLDRVDNFGSIPFGHGVRSCIGRRIAELEIHLVVIQLLQHFEIKTSSQTNAVHAKTHGLLTPGGPIHVRFVNRK

SEQ ID NO: 5810 - protein, 1322 aa, Homo sapiens
MPVVWPTLLDLSRDECKRILRKLELEAYAGVISALRAQGDLTKEKKDLLGELSKVLSISTERHRAEVRRAVNDERLTTIAHNMSGPNSSSEWSIEGRRLVPLMPRLVPQTAFTVTANAVANAAIQHNASLPVPAETGSKEVVCYSYTSTTSTPTSTPVPSGSIATVKSPRPASPASNVVVLPSGSTVYVKSVSCSDEDEKPRKRRRTNSSSSSPVVLKEVPKAVVPVSKTITVPVSGSPKMSNIMQSIANSLPPHMSPVKITFTKPSTQTTNTTTQKVIIVTTSPSSTFVPNILSKSHNYAAVTKLVPTSVIASTTQKPPVVITASQSSLVSNSSSGSSSSTPSPIPNTVAVTAVVSSTPSVVMSTVAQGVSTSAIKMASTRLPSPKSLVSAPTQILAQFPKQHQQSPKQQLYQVQQQTQQQVAQPSPVSHQQQPQQSPLPPGIKPTIQIKQESGVKIITQQVQPSKILPKPVTATLPTSSNSPIMVVSSNGAIMTTKLVTTPTGTQATYTRPTVSPSIGRMAATPGAATYVKTTSGSIITVVPKSLATLGGKIISSNIVSGTTTKITTIPMTSKPNVIVVQKTTGKGTTIQGLPGKNVVTTLLNAGGEKTIQTVPTGAKPAILTATRPITKMIVTQPKGIGSTVQPAAKIIPTKIVYGQQGKTQVLIKPKPVTFQATVVSEQTRQLVTETLQQASRVAEAGNSSIQEGKEEPQNYTDSSSSSTESSQSSQDSQPVVHVIASRRQDWSEHEIAMETSPTIIYQDVSSESQSATSTIKALLELQQTTVKEKLESKPRQPTIDLSQMAVPIQMTQEKRHSPESPSIAVVESELVAEYITTERTDEGTEVAFPLLVSHRSQPQQPSQPQRTLLQHVAQSQTATQTSVVVKSIPASSPGAITHIMQQALSSHTAFTKHSEELGTEEGEVEEMDTLDPQTGLFYRSALTQSQSAKQQKLSQPPLEQTQLQVKTLQCFQTKQKQTIHLQADQLQHKLPQMPQLSIRHQKLTPLQQEQAQPKPDVQHTQHPMVAKDRQLPTLMAQPPQTVVQVLAVKTTQQLPKLQQAPNQPKIYVQPQTPQSQMSLPASSEKQTASQVEQPIITQGSSVTKITFEGRQPPTVTKITGGSSVPKLTSPVTSISPIQASEKTAVSDILKMSLMEAQIDTNVEHMIVDPPKKALATSMLTGEAGSLPSTHMVVAGMANSTPQQQKCRESCSSPSTVGSSLTTRKIDPPAVPATGQFMRIQNVGQKKAEESPAEIIIQAIPQYAIPCHSSSNVVVEPSGLLELNNFTSQQLDDEETAMEQDIDSSTEDGTEPSPSQSSAERS

SEQ ID NO: 5811 - protein, 442 aa, Homo sapiens
MSAAQGWDRNRRRGGGAAGAGGGGSGAGGGSGGSGGRGTGQLNRFVQLSGRPHLPGKKKIRWDPVRRRFIQSCPIIRIPNRFLRGHRPPPARSGHRCVADNTNLYVFGGYNPDYDESGGPDNEDYPLFRELWRYHFATGVWHQMGTDGYMPRELASMSLVLHGNNLLVFGGTGIPFGESNGNDVHVCNVKYKRWALLSCRGKKPSRIYGQAMAIINGSLYVFGGTTGYIYSTDLHKLDLNTREWTQLKPNNLSCDLPEERYRHEIAHDGQRIYILGGGTSWTAYSLNKIHAYNLETNAWEEIATKPHEKIGFPAARRCHSCVQIKNDVFICGGYNGEVILGDIWKLNLQTFQWVKLPATMPEPVYFHCAAVTPAGCMYIHGGVVNIHENKRTGSLFKIWLVVPSLLELAWEKLLAAFPNLANLSRTQLLHLGLTQGLIERLK

SEQ ID NO: 5812 - protein, 839 aa, Homo sapiens
MALTQGQVTFRDVAIEFSQEEWTCLDPAQRTLYRDVMLENYRNLASLGISCFDLSIISMLEQGKEPFTLESQVQIAGNPDGWEWIKAVITALSSEFVMKDLLHKGKSNTGEVFQTVMLERQESQDIEGCSFREVQKNTHGLEYQCRDAEGNYKGVLLTQEGNLTHGRDEHDKRDARNKLIKNQLGLSLQSHLPELQLFQYEGKIYECNQVEKSFNNNSSVSPPQQMPYNVKTHISKKYLKDFISSLLLTQGQKANNWGSPYKSNGCGMVFPQNSHLASHQRSHTKEKPYKCYECGKAFRTRSNLTTHQVIHTGEKRYKCNECGKVFSRNSQLSQHQKIHTGEKPYKCNECGKVFTQNSHLVRHRGIHTGEKPYKCNECGKAFRARSSLAIHQATHSGEKPYKCNECGKVFTQNSHLTNHWRIHTGEKPYKCNECGKAFGVRSSLAIHLVIHTGEKPYKCHECGKVFRRNSHLARHQLIHTGEKPYKCNECGKAFRAHSNLTTHQVIHTGEKPYKCNECGKVFTQNSHLANHQRIHTGVKPYMCNECGKAFSVYSSLTTHQVIHTGEKPYKCNECGKVFTQNSHLARHRGIHTGEKPYKCNECGKVFRHNSYLSRHQRIHTGEKPYKYNEYGKAFSEHSNLTTHQVIHTGEKPYKCNECGKVFTQNSHLARHRRVHTGGKPYQCNECGKAFSQTSKLARHQRVHTGEKPYECNQCGKAFSVRSSLTTHQAIHTGKKPYKCNECGKVFTQNSHLARHRGIHTGEKPYKCNECGKAFSQTSKLARHQRIHTGEKPYECGKPFSICSSLTTHQTIHTGGKPYKCNVWKVLKSEFKPCKPSQNS

SEQ ID NO: 5813 - protein, 544 aa, Homo sapiens
MTARTLSLMASLVAYDDSDSEAETEHAGSFNATGQQKDTSGVARPPGQDFASGTLDVPKAGAQPTKHGSCEDPGGYRLPLAQLGRSDWGSCPSQRLQWPGKEPQVTFPIKEPSCSSLWTSHVPASHMPLAAARFKQVKLSRNFPKSSFHAQSESETVGKNGSSFQKKKCEDCVVPYTPRRLRQRQALSTETGKGKDVEPQGPPAGRAPAPLYVGPGVSEFIQPYLNSHYKETTVPRKVLFHLRGHRGPVNTIQWCPVLSKSHMLLSTSMDKTFKVWNAVDSGHCLQTYSLHTEAVRAARWAPCGRRILSGGFDFALHLTDLETGTQLFSGRSDFRITTLKFHPKDHNIFLCGGFSSEMKAWDIRTGKVMRSYKATIQQTLDILFLREGSEFLSSTDASTRDSADRTIIAWDFRTSAKISNQIFHERFTCPSLALHPREPVFLAQTNGNYLALFSTVWPYRMSRRRRYEGHKVEGYSVGCECSPGGDLLVTGSADGRVLMYSFRTASRACTLQGHTQACVGTTYHPVLPSVLATCSWGGDMKIWH

SEQ ID NO: 5814 - protein, 578 aa, Homo sapiens
MGCGLNKLEKRDEKRPGNIYSTLKRPQVETKIDVSYEYRFLEFTTLSAAELPGSSAVRLASLRDLPAQLLELYQQGFSLAALHPFVQPTHEREKTPLEHIFRAILIKKTDRSQKTDLHNEGYILELDCCSSLDHPTDQKLIPEFIKKIQEAASQGLKFVGVIPQYHSSVNSAGSSAPVSTANSTEDARDAKNARGDHASLENEKPGTGDVCSAPAGRNQSPEPSSGPRGEVPLAKQPSSPSGEGDGGELSPQGVSKTLDGPESNPLEVHEEPLSGKMEIFTLFNKPKSHQKCRQYYPVTIPLHVSKNGQTVSGLDANWLEHMSDHFRKGGMLVNAVFYLGIVNDSLHGLTDGVFIFEAVSTEDSKTIQGYDAIVVEQWTVLEGVEVQTDYVPLLNSLAAYGWQLTCVLPTPVVKTTSEGSVSTKQIVFLQRPCLPQKIKKKESKFQWRFSREEMHNRQMRKSKGKLSARDKQQAEENEKNLEDQSSKAGDMGNCVSGQQQEGGVSEEMKGPVQEDKGEQLSPGGLLCGVGVEGEAVQNGPASHSRALVGICTGHSNPGEDARDGDAEEVRELGTVEEN

SEQ ID NO: 5815 - protein, 2155 aa, Homo sapiens
MELQRTSSISGPLSPAYTGQVPYNYNQLEGRFKQLQDEREAVQKKTFTKWVNSHLARVSCRITDLYTDLRDGRMLIKLLEVLSGERLPKPTKGRMRIHCLENVDKALQFLKEQRVHLENMGSHDIVDGNHRLTLGLIWTIILRFQIQDISVETEDNKEKKSAKDALLLWCQMKTAGYPNVNIHNFTTSWRDGMAFNALIHKHRPDLIDFDKLKKSNAHYNLQNAFNLAEQHLGLTKLLDPEDISVDHPDEKSIITYVVTYYHYFSKMKALAVEGKRIGKVLDNAIETEKMIEKYESLASDLLEWIEQTIIILNNRKFANSLVGVQQQLQAFNTYRTVEKPPKFTEKGNLEVLLFTIQSKMRANNQKVYMPREGKLISDINKAWERLEKAEHERELALRNELIRQEKLEQLARRFDRKAAMRETWLSENQRLVSQDNFGFDLPAVEAATKKHEAIETDIAAYEERVQAVVAVARELEAENYHDIKRITARKDNVIRLWEYLLELLRARRQRLEMNLGLQKIFQEMLYIMDWMDEMKVLVLSQDYGKHLLGVEDLLQKHTLVEADIGIQAERVRGVNASAQKFATDGEGYKPCDPQVIRDRVAHMEFCYQELCQLAAERRARLEESRRLWKFFWEMAEEEGWIREKEKILSSDDYGKDLTSVMRLLSKHRAFEDEMSGRSGHFEQAIKEGEDMIAEEHFGSEKIRERIIYIREQWANLEQLSAIRKKRLEEASLLHQFQADADDIDAWMLDILKIVSSSDVGHDEYSTQSLVKKHKDVAEEIANYRPTLDTLHEQASALPQEHAESPDVRGRLSGIEERYKEVAELTRLRKQALQDTLALYKMFSEADACELWIDEKEQWLNNMQIPEKLEDLEVIQHRFESLEPEMNNQASRVAVVNQIARQLMHSGHPSEKEIKAQQDKLNTRWSQFRELVDRKKDALLSALSIQNYHLECNETKSWIREKTKVIESTQDLGNDLAGVMALQRKLTGMERDLVAIEAKLSDLQKEAEKLESEHPDQAQAILSRLAEISDVWEEMKTTLKNREASLGEASKLQQFLRDLDDFQSWLSRTQTAIASEDMPNTLTEAEKLLTQHENIKNEIDNYEEDYQKMRDMGEMVTQGQTDAQYMFLRQRLQALDTGWNELHKMWENRQNLLSQSHAYQQFLRDTKQAEAFLNNQEYVLAHTEMPTTLEGAEAAIKKQEDFMTTMDANEEKINAVVETGRRLVSDGNINSDRIQEKVDSIDDRHRKNRETASELLMRLKDNRDLQKFLQDCQELSLWINEKMLTAQDMSYDEARNLHSKWLKHQAFMAELASNKEWLDKIEKEGMQLISEKPETEAVVKEKLTGLHKMWEVLESTTQTKAQRLFDANKAELFTQSCADLDKWLHGLESQIQSDDYGKDLTSVNILLKKQQMLENQMEVRKKEIEELQSQAQALSQEGKSTDEVDSKRLTVQTKFMELLEPLNERKHNLLASKEIHQFNRDVEDEILWVGERMPLATSTDHGHNLQTVQLLIKKNQTLQKEIQGHQPRIDDIFERSQNIVTDSSSLSAEAIRQRLADLKQLWGLLIEETEKRHRRLEEAHRAQQYYFDAAEAEAWMSEQELYMMSEEKAKDEQSAVSMLKKHQILEQAVEDYAETVHQLSKTSRALVADSHPESERISMRQSKVDKLYAGLKDLAEERRGKLDERHRLFQLNREVDDLEQWIAEREVVAGSHELGQDYEHVTMLQERFREFARDTGNIGQERVDTVNHLADELINSGHSDAATIAEWKDGLNEAWADLLELIDTRTQILAASYELHKFYHDAKEIFGRIQDKHKKLPEELGRDQNTVETLQRMHTTFEHDIQALGTQVRQLQEDAARLQAAYAGDKADDIQKRENEVLEAWKSLLDACESRRVRLVDTGDKFRFFSMVRDLMLWMEDVIRQIEAQEKPRDVSSVELLMNNHQGIKAEIDARNDSFTTCIELGKSLLARKHYASEEIKEKLLQLTEKRKEMIDKWEDRWEWLRLILEVHQFSRDASVAEAWLLGQEPYLSSREIGQSVDEVEKLIKRHEAFEKSAATWDERFSALERLTTLELLEVRRQQEEEERKRRPPSPEPSTKVSEEAESQQQWDTSKGEQVSQNGLPAEQGSPRVSYRSQTYQNYKNFNSRRTASDQPWSGL

SEQ ID NO: 5816 - protein, 492 aa, Homo sapiens
MLCDEKAQKRRKRKAKESGMALPQGHLTFRDVAIEFSQAEWKCLDPAQRALYKDVMLENYRNLVSLGSSYALGSNAEDKPIKKQLGVSFHLHLSELELFPDERVINGCNQVENFINHSSSVSCLQEMSSSVKTPIFNRNDFDDSSFLPQEQKVHLREKPYECNEHSKVFRVSSSLTKHQVIHTVEKPYKCNSCGKVFSRNSHLAEHCRIHTGEKPYKCNVCGKVFSYNSNFARHQRIHTREKPYECNECGKVFSNNSYLARHQRIHAEEKPYKCNECGKGFSHKSSLANHWRIYTGEKPYKCDECGKAFYRIALLVRHQKIHTGEKPYKCNECGKVFIQNSHLAQHWRIHTGEKPYKCNECGKVFNQLSNLARHRRIHTGEKPYKCNECGKAFSEYSGLSAHLVIHTGEKPYKCSECGKAFRHKLSLTNHQRIHTGERPYKCNECGKVFNRIAHLARHRKIHTGEKPYKCNECGKAFSRISYLAQHWTIHMG

SEQ ID NO: 5817 - protein, 690 aa, Homo sapiens
MGDEDWEAEINPHMSSYVPIFEKDRYSGENGDNFNRTPASSSEMDDGPSRRDHFMKSGFASGRNFGNRDAGECNKRDNTSTMGGFGVGKSFGNRGFSNSRFEDGDSSGFWRESSNDCEDNPTRNRGFSKRGDNDLDPDECMQRTGGLFGSRRPVLSGTGNGDTSQSRSGSGSERGGYKGLNEEVITGSGKNSWKSEAEGGESSDTQGPKVTYIPPPPPEDEDSIFAHYQTGINFDKYDTILVEVSGHDAPPAILTFEEANLCQTLNNNIAKAGYTKLTPVQKYSIPIILAGRDLMACAQTGSGKTAAFLLPILAHMMHDGITASRFKELQEPECIIVAPTRELVNQIYLEARKFSFGTCVRAVVIYGGTQLGHSIRQIVQGCNILCATPGRLMDIIGKEKIGLKQIKYLVLDEADRMLDMGFGPEMKKLISCPGMPSKEQRQTLMFSATFPEEIQRLAAEFLKSNYLFVAVGQVGGACRDVQQTVLQVGQFSKREKLVEILRNIGDERTMVFVETKKKADFIATFLCQEKISTTSIHGDREQREREQALGDFRFGKCPVLVATSVAARGLDIENVQHVINFDLPSTIDEYVHRIGRTGRCGNTGRAISFFDLESDNHLAQPLVKVLTDAQQDVPAWLEEIAFSTYIPGFSGSTRGNVFASVDTRKGKSTLNTAGFSSSQAPNPVDDESWD

SEQ ID NO: 5818 - protein, 523 aa, Homo sapiens
METMKSKANCAQNPNCNIMIFHPTKEEFNDFDKYIAYMESQGAHRAGLAKIIPPKEWKARETYDNISEILIATPLQQVASGRAGVFTQYHKKKKAMTVGEYRHLANSKKYQTPPHQNFEDLERKYWKNRIYNSPIYGADISGSLFDENTKQWNLGHLGTIQDLLEKECGVVIEGVNTPYLYFGMWKTTFAWHTEDMDLYSINYLHLGEPKTWYVVPPEHGQRLERLARELFPGSSRGCGAFLRHKVALISPTVLKENGIPFNRITQEAGEFMVTFPYGYHAGFNHGFNCAEAINFATPRWIDYGKMASQCSCGEARVTFSMDAFVRILQPERYDLWKRGQDRAVVDHMEPRVPASQELSTQKEVQLPRRAALGLRQLPSHWARHSPWPMAARSGTRCHTLVCSSLPRRSAVSGTATQPRAAAVHSSKKPSSTPSSTPGPSAQIIHPSNGRRGRGRPPQKLRAQELTLQTPAKRPLLAGTTCTASGPEPEPLPEDGALMDKPVPLSPGLQHPVKASGCSWAPVP

SEQ ID NO: 5819 - protein, 955 aa, Homo sapiens
MWAGLLLRAACVALLLPGAPARGYTGRKPPGHFAAERRRLGPHVCLSGFGSGCCPGWAPSMGGGHCTLPLCSFGCGSGICIAPNVCSCQDGEQGATCPETHGPCGEYGCDLTCNHGGCQEVARVCPVGFSMTETAVGIRCTDIDECVTSSCEGHCVNTEGGFVCECGPGMQLSADRHSCQDTDECLGTPCQQRCKNSIGSYKCSCRTGFHLHGNRHSCVDVNECRRPLERRVCHHSCHNTVGSFLCTCRPGFRLRADRVSCEAFPKAVLAPSAILQPRQHPSKMLLLLPEAGRPALSPGHSPPSGAPGPPAGVRTTRLPSPTPRLPTSSPSAPVWLLSTLLATPVPTASLLGNLRPPSLLQGEVMGTPSSPRGPESPRLAAGPSPCWHLGAMHESRSRWTEPGCSQCWCEDGKVTCEKVRCEAACSHPIPSRDGGCCPSCTGCFHSGVVRAEGDVFSPPNENCTVCVCLAGNVSCISPECPSGPCQTPPQTDCCTCVPVRCYFHGRWYADGAVFSGGGDECTTCVCQNGEVECSFMPCPELACPREEWRLGPGQCCFTCQEPTPSTGCSLDDNGVEFPIGQIWSPGDPCELCICQADGSVSCKRTDCVDSCPHPIRIPGQCCPDCSAGCTYTGRIFYNNETFPSVLDPCLSCICLLGSVACSPVDCPITCTYPFHPDGECCPVCRDCNYEGRKVANGQVFTLDDEPCTRCTCQLGEVSCEKVPCQRACADPALLPGDCCSSCPDSLSPLEEKQGLSPHGNVAFSKAGRSLHGDTEAPVNCSSCPGPPTASPSRPVLHLLQLLLRTNLMKTQTLPTSPAGAHGPHSLALGLTATFPGEPGASPRLSPGPSTPPGAPTLPLASPGAPQPPPVTPERSFSASGAQIVSRWPPLPGTLLTEASALSMMDPSPSKTPITLLGPRVLSPTTSRLSTALAATTHPGPQQPPVGASRGEESTM

SEQ ID NO: 5820 - protein, 2353 aa, Homo sapiens
MTEGARAADEVRVPLGAPPPGPAALVGASPESPGAPGREAERGSELGVSPSESPAAERGAELGADEEQRVPYPALAATVFFCLGQTTRPRSWCLRLVCNPWFEHVSMLVIMLNCVTLGMFRPCEDVECGSERCNILEAFDAFIFAFFAVEMVIKMVALGLFGQKCYLGDTWNRLDFFIVVAGMMEYSLDGHNVSLSAIRTVRVLRPLRAINRVPSMRILVTLLLDTLPMLGNVLLLCFFVFFIFGIVGVQLWAGLLRNRCFLDSAFVRNNNLTFLRPYYQTEEGEENPFICSSRRDNGMQKCSHIPGRRELRMPCTLGWEAYTQPQAEGVGAARNACINWNQYYNVCRSGDSNPHNGAINFDNIGYAWIAIFQVITLEGWVDIMYYVMDAHSFYNFIYFILLIIVGSFFMINLCLVVIATQFSETKQRESQLMREQRARHLSNDSTLASFSEPGSCYEELLKYVGHIFRKVKRRSLRLYARWQSRWRKKVDPSAVQGQGPGHRQRRAGRHTASVHHLVYHHHHHHHHHYHFSHGSPRRPGPEPGACDTRLVRAGAPPSPPSPGRGPPDAESVHSIYHADCHIEGPQERARVAHAAATAAASLRLATGLGTMNYPTILPSGVGSGKGSTSPGPKGKWAGGPPGTGGHGPLSLNSPDPYEKIPHVVGEHGLGQAPGHLSGLSVPCPLPSPPAGTLTCELKSCPYCTRALEDPEGELSGSESGDSDGRGVYEFTQDVRHGDRWDPTRPPRATDTPGPGPGSPQRRAQQRAAPGEPGWMGRLWVTFSGKLRRIVDSKYFSRGIMMAILVNTLSMGVEYHEQPEELTNALEISNIVFTSMFALEMLLKLLACGPLGYIRNPYNIFDGIIVVISVWEIVGQADGGLSVLRTFRLLRVLKLVRFLPALRRQLVVLVKTMDNVATFCTLLMLFIFIFSILGMHLFGCKFSLKTDTGDTVPDRKNFDSLLWAIVTVFQILTQEDWNVVLYNGMASTSSWAALYFVALMTFGNYVLFNLLVAILVEGFQAEGDANRSDTDEDKTSVHFEEDFHKLRELQTTELKMCSLAVTPNGHLEGRGSLSPPLIMCTAATPMPTPKSSPFLDAAPSLPDSRRGSSSSGDPPLGDQKPPASLRSSPCAPWGPSGAWSSRRSSWSSLGRAPSLKRRGQCGERESLLSGEGKGSTDDEAEDGRAAPGPRATPLRRAESLDPRPLRPAALPPTKCRDRDGQVVALPSDFFLRIDSHREDAAELDDDSEDSCCLRLHKVLEPYKPQWCRSREAWALYLFSPQNRFRVSCQKVITHKMFDHVVLVFIFLNCVTIALERPDIDPGSTERVFLSVSNYIFTAIFVAEMMVKVVALGLLSGEHAYLQSSWNLLDGLLVLVSLVDIVVAMASAGGAKILGVLRVLRLLRTLRPLRVISRAPGLKLVVETLISSLRPIGNIVLICCAFFIIFGILGVQLFKGKFYYCEGPDTRNISTKAQCRAAHYRWVRRKYNFDNLGQALMSLFVLSSKDGWVNIMYDGLDAVGVDQQPVQNHNPWMLLYFISFLLIVSFFVLNMFVGVVVENFHKCRQHQEAEEARRREEKRLRRLERRRRSTFPSPEAQRRPYYADYSPTRRSIHSLCTSHYLDLFITFIICVNVITMSMEHYNQPKSLDEALKYCNYVFTIVFVFEAALKLVAFGFRRFFKDRWNQLDLAIVLLSLMGITLEEIEMSAALPINPTIIRIMRVLRIARVLKLLKMATGMRALLDTVVQALPQVGNLGLLFMLLFFIYAALGVELFGRLECSEDNPCEGLSRHATFSNFGMAFLTLFRVSTGDNWNGIMKDTLRECSREDKHCLSYLPALSPVYFVTFVLVAQFVLVNVVVAVLMKHLEESNKEAREDAELDAEIELEMAQGPGSARRVDADRPPLPQESPGARDAPNLVARKVSVSRMLSLPNDSYMFRPVVPASAPHPRPLQEVEMETYGAGTPLGSVASVHSPPAESCASLQIPLAVSSPARSGEPLHALSPRGTARSPSLSRLLCRQEAVHTDSLEGKIDSPRDTLDPAEPGEKTPVRPVTQGGSLQSPPRSPRPASVRTRKHTFGQRCVSSRPAAPGGEEAEASDPADEEVSHITSSACPWQPTAEPHGPEASPVAGGERDLRRLYSVDAQGFLDKPGRADEQWRPSAELGSGEPGEAKAWGPEAEPALGARRKKKMSPPCISVEPPAEDEGSARPSAAEGGSTTLRRRTPSCEATPHRDSLEPTEGSGAGGDPAAKGERWGQASCRAEHLTVPSFAFEPLDLGVPSGDPFLDGSHSVTPESRASSSGAIVPLEPPESEPPMPVGDPPEKRRGLYLTVPQCPLEKPGSPSATPAPGGGADDPV

SEQ ID NO: 5821 - protein, 2778 aa, Homo sapiens
MALGKVLAMALVLALAVLGSLSPGARAGDCKGQRQVLREAPGFVTDGAGNYSVNGNCEWLIEAPSPQHRILLDFLFLDTECTYDYLFVYDGDSPRGPLLASLSGSTRPPPIEASSGKMLLHLFSDANYNLLGFNASFRFSLCPGGCQSHGQCQPPGVCACEPGWGGPDCGLQECSAYCGSHGTCASPLGPCRCEPGFLGRACDLHLWENQGAGWWHNVSARDPAFSARIGAAGAFLSPPGLLAVFGGQDLNNALGDLVLYNFSANTWESWDLSPAPAARHSHVAVAWAGSLVLMGGELADGSLTNDVWAFSPLGRGHWELLAPPASSSSGPPGLAGHAAALVDDVWLYVSGGRTPHDLFSSGLFRFRLDSTSGGYWEQVIPAGGRPPAATGHSMVFHAPSRALLVHGGHRPSTARFSVRVNSTELFHVDRHVWTTLKGRDGLQGPRERAFHTASVLGNYMVVYGGNVHTHYQEEKCYEDGIFFYHLGCHQWVSGAELAPPGTPEGRAAPPSGRYSHVAAVLGGSVLLVAGGYSGRPRGDLMAYKVPPFVFQAPAPDYHLDYCSMYTDHSVCSRDPECSWCQGACQAAPPPGTPLGACPAASCLGLGRLLGDCQACLAFSSPTAPPRGPGTLGWCVHNESCLPRPEQARCRGEQISGTVGWWGPAPVFVTSLEACVTQSFLPGLHLLTFQQPPNTSQPDKEEVGRWVAHQEKETRRLQRPGSARLFPLPGRDHKYAVEIQGQLNGSAGPGHSELTLLWDRTGVPGGSEISFFFLEPYRSSSCTSYSSCLGCLADQGCGWCLTSATCHLRQGGAHCGDDGAGGSLLVLVPTLCPLCEEHRDCHACTQDPFCEWHQSTSRKGDAACSRRGRGRGALKSPEECPPLCSQRLTCEDCLANSSQCAWCQSTHTCFLFAAYLARYPHGGCRGWDDSVHSEPRCRSCDGFLTCHECLQSHECGWCGNEDNPTLGRCLQGDFSGPLGGGNCSLWVGEGLGLPVALPARWAYARCPDVDECRLGLARCHPRATCLNTPLSYECHCQRGYQGDGISHCNRTCLEDCGHGVCSGPPDFTCVCDLGWTSDLPPPTPAPGPPAPRCSRDCGCSFHSHCRKRGPGFCDECQDWTWGEHCERCRPGSFGNATGSRGCRPCQCNGHGDPRRGHCDNLSGLCFCQDHTEGAHCQLCSPGYYGDPRAGGSCFRECGGRALLTNVSSVALGSRRVGGLLPPGGGAARAGPGLSYCVWVVSATEELQPCAPGTLCPPLTLTFSPDSSTPCTLSYVLAFDGFPRFLDTGVVQSDRSLIAAFCGQRRDRPLTVQALSGLLVLHWEANGSSSWGFNASVGSARCGSGGPGSCPVPQECVPQDGAAGAGLCRCPQGWAGPHCRMALCPENCNAHTGAGTCNQSLGVCICAEGFGGPDCATKLDGGQLVWETLMDSRLSADTASRFLHRLGHTMVDGPDATLWMFGGLGLPQGLLGNLYRYSVSERRWTQMLAGAEDGGPGPSPRSFHAAAYVPAGRGAMYLLGGLTAGGVTRDFWVLNLTTLQWRQEKAPQTVELPAVAGHTLTARRGLSLLLVGGYSPENGFNQQLLEYQLATGTWVSGAQSGTPPTGLYGHSAVYHEATDSLYVFGGFRFHVELAAPSPELYSLHCPDRTWSLLAPSQGAKRDRMRNVRGSSRGLGQVPGEQPGSWGFREVRKKMALWAALAGTGGFLEEISPHLKEPRPRLFHASALLGDTMVVLGGRSDPDEFSSDVLLYQVNCNAWLLPDLTRSASVGPPMEESVAHAVAAVGSRLYISGGFGGVALGRLLALTLPPDPCRLLSSPEACNQSGACTWCHGACLSGDQAHRLGCGGSPCSPMPRSPEECRRLRTCSECLARHPRTLQPGDGEASTPRCKWCTNCPEGACIGRNGSCTSENDCRINQREVFWAGNCSEAACGAADCEQCTREGKCMWTRQFKRTGETRRILSVQPTYDWTCFSHSLLNVSPMPVESSPPLPCPTPCHLLPNCTSCLDSKGADGGWQHCVWSSSLQQCLSPSYLPLRCMAGGCGRLLRGPESCSLGCAQATQCALCLRRPHCGWCAWGGQDGGGRCMEGGLSGPRDGLTCGRPGASWAFLSCPPEDECANGHHDCNETQNCHDQPHGYECSCKTGYTMDNMTGLCRPVCAQGCVNGSCVEPDHCRCHFGFVGRNCSTECRCNRHSECAGVGARDHCLLCRNHTKGSHCEQCLPLFVGSAVGGGTCRPCHAFCRGNSHICISRKELQMSKGEPKKYSLDPEEIENWVTEGPSEDEAVCVNCQNNSYGEKCESCLQGYFLLDGKCTKCQCNGHADTCNEQDGTGCPCQNNTETGTCQGSSPSDRRDCYKYQCAKCRESFHGSPLGGQQCYRLISVEQECCLDPTSQTNCFHEPKRRALGPGRTVLFGVQPKFTNVDIRLTLDVTFGAVDLYVSTSYDTFVVRVAPDTGVHTVHIQPPPAPPPPPPPADGGPRGAGDPGGAGASSGPGAPAEPRVREVWPRGLITYVTVTEPSAVLVVRGVRDRLVITYPHEHHALKSSRFYLLLLGVGDPSGPGANGSADSQGLLFFRQDQAHIDLFVFFSVFFSCFFLFLSLCVLLWKAKQALDQRQEQRRHLQEMTKMASRPFAKVTVCFPPDPTAPASAWKPAGLPPPAFRRSEPFLAPLLLTGAGGPWGPMGGGCCPPAIPATTAGLRAGPITLEPTEDGMAGVATLLLQLPGGPHAPNGACLGSALVTLRHRLHEYCGGGGGAGGSGHGTGAGRKGLLSQDNLTSMSL

SEQ ID NO: 5822 - protein, 483 aa, Homo sapiens
MSVTKSTEGPQGAVAIKLDLMSPPESAKKLENKDSTFLDESPSESAGLKKTKGITVFQALIHLVKGNMGTGILGLPLAVKNAGILMGPLSLLVMGFIACHCMHILVKCAQRFCKRLNKPFMDYGDTVMHGLEANPNAWLQNHAHWGRHIVSFFLIITQLGFCCVYIVFLADNLKQVVEAVNSTTNNCYSNETVILTPTMDSRLYMLSFLPFLVLLVLIRNLRILTIFSMLANISMLVSLVIIIQYITQEIPDPSRLPLVASWKTYPLFFGTAIFSFESIGVVLPLENKMKNARHFPAILSLGMSIVTSLYIGMAALGYLRFGDDIKASISLNLPNCWLYQSVKLLYIAGILCTYALQFYVPAEIIIPFAISRVSTRWALPLDLSIRLVMVCLTCLLAILIPRLDLVISLVGSVSGTALALIIPPLLEVTTFYSEGMSPLTIFKDALISILGFVGFVVGTYQALDELLKSEDSHPFSNSTTFVR

SEQ ID NO: 5823 - protein, 1000 aa, Homo sapiens
MPGKLKVKIVAGRHLPVMDRASDLTDAFVEVKFGNTTFKTDVYLKSLNPQWNSEWFKFEVDDEDLQDEPLQITVLDHDTYSANDAIGKVYIDIDPLLYSEAATVISGWFPIYDTIHGIRGEINVVVKVDLFNDLNRFRQSSCGVKFFCTTSIPKCYRAVIIHGFVEELVVNEDPEYQWIDRIRTPRASNEARQRLISLMSGELQRKIGLKVLEMRGNAVVGYLQCFDLEGESGLVVRAIGTACTLDKLSSPAAFLPACNSPSKEMKEIPFNEDPNPNTHSSGPSTPLKNQTYSFSPSKSYSRQSSSSDTDLSLTPKTGMGSGSAGKEGGPFKALLRQQTQSALEQREFPFFTLTAFPPGFLVHVGGVVSARSVKLLDRIHNPDEPETRDAWWAEIRQEIKSHAKALGCHAVVGYSESTSICEEVCILSASGTAAVLNPRFLQDGTVEGCLEQRLEENLPTRCGFCHIPYDELNMPFPAHLTYCYNCRKQKVPDVLFTTIDLPTDATVIGKGCLIQARLCRLKKKAQAEANATAISNLLPFMEYEVHTQLMNKLKLKGMNALFGLRIQITVGENMLMGLASATGVYLAALPTPGGIQIAGKTPNDGSYEQHISHMQKKINDTIAKNKELYEINPPEISEEIIGSPIPEPRQRSRLLRSQSESSDEVTELDLSHGKKDAFVLEIDDTDAMEDVHSLLTDVPPPSGFYSCNTEIMPGINNWTSEIQMFTSVRVIRLSSLNLTNQALNKNFNDLCENLLKSLYFKLRSMIPCCLCHVNFTVSLPEDELIQVTVTAVAITFDKNQALQTTKTPVEKSLQRASTDNEELLQFPLELCSDSLPSHPFPPAKAMTVEKASPVGDGNFRNRSAPPCANSTVGVVKMTPLSFIPGAKITKYLGIINMFFIRETTSLREEGGVSGFLHAFIAEVFAMVRAHVAALGGNAVVSYIMKQCVFMENPNKNQAQCLINVSGDAVVFVRESDLEVVSSQQPTTNCQSSCTEGEVTT

SEQ ID NO: 5824 - protein, 505 aa, Homo sapiens
MEPSWLQELMAHPFLLLILLCMSLLLFQVIRLYQRRRWMIRALHLFPAPPAHWFYGHKEFYPVKEFEVYHKLMEKYPCAVPLWVGPFTMFFSVHDPDYAKILLKRQDPKSAVSHKILESWVGRGLVTLDGSKWKKHRQIVKPGFNISILKIFITMMSESVRMMLNKWEEHIAQNSRLELFQHVSLMTLDSIMKCAFSHQGSIQLDSTLDSYLKAVFNLSKISNQRMNNFLHHNDLVFKFSSQGQIFSKFNQELHQFTEKVIQDRKESLKDKLKQDTTQKRRWDFLDILLSAKSENTKDFSEADLQAEVKTFMFAGHDTTSSAISWILYCLAKYPEHQQRCRDEIRELLGDGSSITWEHLSQMPYTTMCIKECLRLYAPVVNISRLLDKPITFPDGRSLPAGITVFINIWALHHNPYFWEDPQVFNPLRFSRENSEKIHPYAFIPFSAGLRNCIGQHFAIIECKVAVALTLLRFKLAPDHSRPPQPVRQVVLKSKNGIHVFAKKVC

SEQ ID NO: 5825 - protein, 529 aa, Homo sapiens
MALKWTSVLLLIHLGCYFSSGSCGKVLVWTGEYSHWMNMKTILKELVQRGHEVTVLASSASILFDPNDAFTLKLEVYPTSLTKTEFENIIMQQVKRWSDIQKDSFWLYFSQEQEILWEFHDIFRNFCKDVVSNKKVMKKLQESRFDIIFADAFFPCGELLAALLNIPFVYSLCFTPGYTIERHSGGLIFPPSYIPVVMSKLSDQMTFMERVKNMIYVLYFDFWFQMCDMKKWDQFYSEVLGRPTTLFETMGKADIWLMRNSWSFQFPHPFLPNIDFVGGLHCKPAKPLPKEMEEFVQSSGENGVVVFSLGSVISNMTAERANVIATALAKIPQKVLWRFDGNKPDALGLNTRLYKWIPQNDLLGLPKTRAFITHGGANGIYEAIYHGIPMVGIPLFWDQPDNIAHMKAKGAAVRLDFHTMSSTDLLNALKTVINDPSYKENVMKLSIIQHDQPVKPLHRAVFWIEFVMCHKGAKHLRVAARDLTWFQYHSLDVIGFLLACVATVIFVVTKFCLFCFWKFARKGKKGKRD

SEQ ID NO: 5826 - protein, 2948 aa, Homo sapiens
MGNENSTSDNQRTLSAQTPRSAQPPGNSQNIKRKQQDTPGSPDHRDASSIGSVGLGGFCTASESSASLDPCLVSPEVTEPRKDPQGARGPEGSLLPSPPPSQEREHPSSSMPFAECPPEGCLASPAAAPEDGPQTQSPRREPAPNAPGDIAAAFPAERDSSTPYQEIAAVPSAGRERQPKEEGQKSSFSFSSGIDQSPGMSPVPLREPMKAPLCGEGDQPGGFESQEKEAAGGFPPAESRQGVASVQVTPEAPAAAQQGTESSAVLEKSPLKPMAPIPQDPAPRASDRERGQGEAPPQYLTDDLEFLRACHLPRSNSGAAPEAEVNAASQESCQQPVGAYLPHAELPWGLPSPALVPEAGGSGKEALDTIDVQGHPQTGMRGTKPNQVVCVAAGGQPEGGLPVSPEPSLLTPTEEAHPASSLASFPAAQIPIAVEEPGSSSRESVSKAGMPVSADAAKEVVDAGLVGLERQVSDLGSKGEHPEGDPGEVPAPSPQERGEHLNTEQSHEVQPGVPPPPLPKEQSHEVQPGAPPPPLPKAPSESARGPPGPTDGAKVHEDSTSPAVAKEGSRSPGDSPGGKEEAPEPPDGGDPGNLQGEDSQAFSSKRDPEVGKDELSKPSSDAESRDHPSSHSAQPPRKGGAGHTDGPHSQTAEADASGLPHKLGEEDPVLPPVPDGAGEPTVPEGAIWEGSGLQPKCPDTLQSREGLGRMESFLTLESEKSDFPPTPVAEVAPKAQEGESTLEIRKMGSCDGEGLLTSPDQPRGPACDASRQEFHAGVPHPPQGENLAADLGLTALILDQDQQGIPSCPGEGWIRGAASEWPLLSSEKHLQPSQAQPETSIFDVLKEQAQPPENGKETSPSHPGFKDQGADSSQIHVPVEPQEDNNLPTHGGQEQALGSELQSQLPKGTLSDTPTSSPTDMVWESSLTEESELSAPTRQKLPALGEKRPEGACGDGQSSRVSPPAADVLKDFSLAGNFSRKETCCTGQGPNKSQQALADALEEGSQHEEACQRHPGASEAADGCSPLWGLSKREMASGNTGEAPPCQPDSVALLDAVPCLPALAPASPGVTPTQDAPETEACDETQEGRQQPVPAPQQKMECWATSDAESPKLLASFPSAGEQGGEAGAAETGGSAGAGDPGKQQAPEKPGEATLSCGLLQTEHCLTSGEEASTSALRESCQAEHPMASCQDALLPARELGGIPRSTMDFSTHQAVPDPKELLLSGPPEVAAPDTPYLHVDSAAQRGAEDSGVKAVSSADPRAPGESPCPVGEPPLALENAASLKLFAGSLAPLLQPGAAGGEIPAVQASSGSPKARTTEGPVDSMPCLDRMPLLAKGKQATGEEKAATAPGAGAKASGEGMAGDAAGETEGSMERMGEPSQDPKQGTSGGVDTSSEQIATLTGFPDFREHIAKIFEKPVLGALATPGEKAGAGRSAVGKDLTRPLGPEKLLDGPPGVDVTLLPAPPARLQVEKKQQLAGEAEISHLALQDPASDKLLGPAGLTWERNLPGAGVGKEMAGVPPTLREDERPEGPGAAWPGLEGQAYSQLERSRQELASGLPSPAATQELPVERAAAFQVAPHSHGEEAVAQDRIPSGKQHQETSACDSPHGEDGPGDFAHTGVPGHVPRSTCAPSPQREVLTVPEANSEPWTLDTLGGERRPGVTAGILEMRNALGNQSTPAPPTGEVADTPLEPGKVAGAAGEAEGDITLSTAETQACASGDLPEAGTTRTFSVVAGDLVLPGSCQDPACSDKAPGMEGTAALHGDSPARPQQAKEQPGPERPIPAGDGKVCVSSPPEPDETHDPKLQHLAPEELHTDRESPRPGPSMLPSVPKKDAPRVMDKVTSDETRGAEGTESSPVADDIIQPAAPADLESPTLAASSYHGDVVGQVSTDLIAQSISPAAAHAGLPPSAAEHIVSPSAPAGDRVEASTPSCPDPAKDLSRSSDSEEAFETPESTTPVKAPPAPPPPPPEVIPEPEVSTQPPPEEPGCGSETVPVPDGPRSDSVEGSPFRPPSHSFSAVFDEDKPIASSGTYNLDFDNIELVDTFQTLEPRASDAKNQEGKVNTRRKSTDSVPISKSTLSRSLSLQASDFDGASSSGNPEAVALAPDAYSTGSSSASSTLKRTKKPRPPSLKKKQTTKKPTETPPVKETQQEPDEESLVPSGENLASETKTESAKTEGPSPALLEETPLEPAVGPKAACPLDSESAEGVVPPASGGGRVQNSPPVGRKTLPLTTAPEAGEVTPSDSGGQEDSPAKGLSVRLEFDYSEDKSSWDNQQENPPPTKKIGKKPVAKMPLRRPKMKKTPEKLDNTPASPPRSPAEPNDIPIAKGTYTFDIDKWDDPNFNPFSSTSKMQESPKLPQQSYNFDPDTCDESVDPFKTSSKTPSSPSKSPASFEIPASAMEANGVDGDGLNKPAKKKKTPLKTDTFRVKKSPKRSPLSDPPSQDPTPAATPETPPVISAVVHATDEEKLAVTNQKWTCMTVDLEADKQDYPQPSDLSTFVNETKFSSPTEELDYRNSYEIEYMEKIGSSLPQDDDAPKKQALYLMFDTSQESPVKSSPVRMSESPTPCSGSSFEETEALVNTAAKNQHPVPRGLAPNQESHLQVPEKSSQKELEAMGLGTPSEAIEITAPEGSFASADALLSRLAHPVSLCGALDYLEPDLAEKNPPLFAQKLQEELEFAIMRIEALKLARQIALASRSHQDAKREAAHPTDVSISKTALYSRIGTAEVEKPAGLLFQQPDLDSALQIARAEIITKEREVSEWKDKYEESRREVMEMRKIVAEYEKTIAQMIEDEQREKSVSHQTVQQLVLEKEQALADLNSVEKSLADLFRRYEKMKEVLEGFRKNEEVLKRCAQEYLSRVKKEEQRYQALKVHAEEKLDRANAEIAQVRGKAQQEQAAHQASLRKEQLRVDALERTLEQKNKEIEELTKICDELIAKMGKS

SEQ ID NO: 5827 - protein, 150 aa, Homo sapiens
MRKTRLWGLLWMLFVSELRAATKLTEEKYELKEGQTLDVKCDYTLEKFASSQKAWQIIRDGEMPKTLACTERPSKNSHPVQVGRIILEDYHDHGLLRVRMVNLQVEDSGLYQCVIYQPPKEPHMLFDRIRLVVTKGFRCSTLSFSWLVDS

SEQ ID NO: 5828 - protein, 435 aa, Homo sapiens
MWAPPAAIMGDGPTKKVGNQAPLQTQALQTASLRDGPAKRAVWVRHTSSEPQEPTESKAAKERPKQEVTKAVVVDLGTGYCKCGFAGLPRPTHKISTTVGKPYMETAKTGDNRKETFVGQELNNTNVHLKLVNPLRHGIIVDWDTVQDIWEYLFRQEMKIAPEEHAVLVSDPPLSPHTNREKYAEMLFEAFNTPAMHIAYQSRLSMYSYGRTSGLVVEVGHGVSYVVPIYEGYPLPSITGRLDYAGSDLTAYLLGLLNSAGNEFTQDQMGIVEDIKKKCCFVALDPIEEKKVPLSEHTIRYVLPDGKEIQLCQERFLCSEMFFKPSLIKSMQLGLHTQTVSCLNKCDIALKRDLMGNILLCGGSTMLSGFPNRLQKELSSMCPNDTPQVNVLPERDSAVWTGGSILASLQGFQPLWVHRFEYEEHGPFFLYRRCF

SEQ ID NO: 5829 - protein, 975 aa, Homo sapiens
MTQQPQDDFDRSVEDAQAWMKAVQDQLQVNDNTQGPRAALEARLWETEKICQLEPEGRVRVDLVLRMAEALLACCPGDQKPGILARLKDIKAQWEETVTYMTHCHSRIEWVWLHWSEYLLARDEFYRWFQKMMVTLEPHIELQLGLKEKQWQLSHAQVLLHNVDNQAVLLDRLLEEAASLFNRIGDPSVDEDAQKRMKAEYDAVKAKAQKRVDLLEQVAREHEEYQAGVDEFQLWLKAVVEKVNGCLGRNCKLPITQRLSTLQDIAKDFPRGEESLETLEEQSAGVIRNTSPLGAEKITGELEEMRKVLEKLRALWEEEEERLRGLLRSRGAWEQQIKQLEAELSEFRMVLQRLAQEGLQPAAKAGTEDELVAHWRRYSATRAALASEEPRVDRLQAQLKELIVFPHNLKPLSDSVIATIQEYQSLKVKSARLRNAAAVELWQHFQRPLQDLQLWKALAQRLLEVTASLPDLPSLHTFLPQIEAALMESSRLKELLTMLQLKKDLLIGIFGQERATALLEQVAGSMRDRDLLHNSLLQRKSKLQSLLAQHKDFGAAFEPLQRKLLDLQVRVQAEKGLQRDLPGKQAQLSRLQGLQEEGLDLGAQMEAARPLVQENPNHQHKMDQLSSDFQALQRSLEDLVDRCRQSVQEHCTFSHQLLELRQWIVVTTQKLEAHRGEAGPGDAESQEAEFERLVAEFPEKEAQLSLVEAQGWLVMEKSSPEGAAVVQEELRELAESWRALRLLEESLLSLIRNWHLQRMEVDSGKKMVFTNNIPKSGFLINPMDPIPRHRRRANLLQEEEGSHEDFSQLLRNFGQWLQVENSKLVRIIAMRTSTAEDLRTRKSKLQELEARVPEGQHLFENLLRLGPARGTSDELEDLRYQWMLYKSKLKDSGHLLTQSSPGEPTGFQKTRRWRGLGSLFRRACCVALPLQLLLLLFLLLLFLLPIREEDRSCTLANNFARSFTLMLRYNGPPPT

SEQ ID NO: 5830 - protein, 834 aa, Homo sapiens
MEDGFSSYSSLYDTSSLLQFCNDDSASAASSMEVTDRIASLEQRVQMQEDDIQLLKSALADVVRRLNITEEQQAVLNRKGPTKARPLMQTLPLRTTVNNGTVLPKKPTGSLPSPSGVRKETAVPATKRLNRSVSLLNACKLNRSTPSNIKRTSSSERVSPGGRRESNGDSRGNRNRTGSTSSSSSGKKNSESKPKEPVFSAEEGYVKMFLRGRPVTMYMPKDQVDSYSLEAKVELPTKRLKLEWVYGYRGRDCRNNLYLLPTGETVYFIASVVVLYNVEEQLQRHYAGHNDDVKCLAVHPDRITIATGQVAGTSKDGKQLPPHVRIWDSVTLNTLHVIGIGFFDRAVTCIAFSKSNGGTNLCAVDDSNDHVLSVWDWQKEEKLADVKCSNEAVFAADFHPTDTNIIVTCGKSHLYFWTLEGSSLNKKQGLFEKQEKPKFVLCVTFSENGDTITGDSSGNILVWGKGTNRISYAVQGAHEGGIFALCMLRDGTLVSGGGKDRKLISWSGNYQKLRKTEIPEQFGPIRTVAEGKGDVILIGTTRNFVLQGTLSGDFTPITQGHTDELWGLAIHASKSQFLTCGHDKHATLWDAVGHRPVWDKIIEDPAQSSGFHPSGSVVAVGTLTGRWFVFDTETKDLVTVHTDGNEQLSVMRYSPDGNFLAIGSHDNCIYIYGVSDNGRKYTRVGKCSGHSSFITHLDWSVNSQFLVSNSGDYEILYWVPSACKQVVSVETTRDIEWATYTCTLGFHVFGVWPEGSDGTDINAVCRAHEKKLLSTGDDFGKVHLFSYPCSQFRAPSHIYGGHSSHVTNVDFLCEDSHLISTGGKDTSIMQWRVI

SEQ ID NO: 5831 - protein, 5142 aa, Homo sapiens
MGNEASLEGEGLPEGLAAAAAAGGGASGAGSPSHTAIPAGMEADLSQLSEEERRQIAAVMSRAQGLPKGSVPPAAAESPSMHRKQELDSSHPPKQSGRPPDPGRPAQPGLSKSRTTDTFRSEQKLPGRSPSTISLKESKSRTDLKEEHKSSMMPGFLSEVNALSAVSSVVNKFNPFDLISDSEASQEETTKKQKVVQKEQGKPEGIIKPPLQQQPPKPIPKQQGPGRDPLQQDGTPKSISSQQPEKIKSQPPGTGKPIQGPTQTPQTDHAKLPLQRDASRPQTKQADIVRGESVKPSLPSPSKPPIQQPTPGKPPAQQPGHEKSQPGPAKPPAQPSGLTKPLAQQPGTVKPPVQPPGTTKPPAQPLGPAKPPAQQTGSEKPSSEQPGPKALAQPPGVGKTPAQQPGPAKPPTQQVGTPKPLAQQPGLQSPAKAPGPTKTPVQQPGPGKIPAQQAGPGKTSAQQTGPTKPPSQLPGPAKPPPQQPGPAKPPPQQPGSAKPPSQQPGSTKPPPQQPGPAKPSPQQPGSTKPPSQQPGSAKPSAQQPSPAKPSAQQSTKPVSQTGSGKPLQPPTVSPSAKQPPSQGLPKTICPLCNTTELLLHVPEKANFNTCTECQTTVCSLCGFNPNPHLTEVKEWLCLNCQMKRALGGDLAPVPSSPQPKLKTAPVTTTSAVSKSSPQPQQTSPKKDAAPKQDLSKAPEPKKPPPLVKQPTLHGSPSAKAKQPPEADSLSKPAPPKEPSVPSEQDKAPVADDKPKQPKMVKPTTDLVSSSSATTKPDIPSSKVQSQAEEKTTPPLKTDSAKPSQSFPPTGEKVSPFDSKAIPRPASDSKIISHPGPSSESKGQKQVDPVQKKEEPKKAQTKMSPKPDAKPMPKGSPTPPGPRPTAGQTVPTPQQSPKPQEQSRRFSLNLGSITDAPKSQPTTPQETVTGKLFGFGASIFSQASNLISTAGQPGPHSQSGPGAPMKQAPAPSQPPTSQGPPKSTGQAPPAPAKSIPVKKETKAPAAEKLEPKAEQAPTVKRTETEKKPPPIKDSKSLTAEPQKAVLPTKLEKSPKPESTCPLCKTELNIGSKDPPNFNTCTECKNQVCNLCGFNPTPHLTEIQEWLCLNCQTQRAISGQLGDIRKMPPAPSGPKASPMPVPTESSSQKTAVPPQVKLVKKQEQEVKTEAEKVILEKVKETLSMEKIPPMVTTDQKQEESKLEKDKASALQEKKPLPEEKKLIPEEEKIRSEEKKPLLEEKKPTPEDKKLLPEAKTSAPEEQKHDLLKSQVQIAEEKLEGRVAPKTVQEGKQPQTKMEGLPSGTPQSLPKEDDKTTKTIKEQPQPPCTAKPDQVEPGKEKTEKEDDKSDTSSSQQPKSPQGLSDTGYSSDGISSSLGEIPSLIPTDEKDILKGLKKDSFSQESSPSSPSDLAKLESTVLSILEAQASTLADEKSEKKTQPHEVSPEQPKDQEKTQSLSETLEITISEEEIKESQEERKDTFKKDSQQDIPSSKDHKEKSEFVDDITTRREPYDSVEESSESENSPVPQRKRRTSVGSSSSDEYKQEDSQGSGEEEDFIRKQIIEMSADEDASGSEDDEFIRNQLKEISSSTESQKKEETKGKGKITAGKHRRLTRKSSTSIDEDAGRRHSWHDEDDEAFDESPELKYRETKSQESEELVVTGGGGLRRFKTIELNSTIADKYSAESSQKKTSLYFDEEPELEMESLTDSPEDRSRGEGSSSLHASSFTPGTSPTSVSSLDEDSDSSPSHKKGESKQQRKARHRPHGPLLPTIEDSSEEEELREEEELLKEQEKQREIEQQQRKSSSKKSKKDKDELRAQRRRERPKTPPSNLSPIEDASPTEELRQAAEMEELHRSSCSEYSPSIESDPEGFEISPEKIIEVQKVYKLPTAVSLYSPTDEQSIMQKEGSQKALKSAEEMYEEMMHKTHKYKAFPAANERDEVFEKEPLYGGMLIEDYIYESLVEDTYNGSVDGSLLTRQEEENGFMQQKGREQKIRLSEQIYEDPMQKITDLQKEFYELESLHSVVPQEDIVSSSFIIPESHEIVDLGTMVTSTEEERKLLDADAAYEELMKRQQMQLTPGSSPTQAPIGEDMTESTMDFDRMPDASLTSSVLSGASLTDSTSSATLSIPDVKITQHFSTEEIEDEYVTDYTREIQEIIAHESLILTYSEPSESATSVPPSDTPSLTSSVSSVCTTDSSSPITTLDSITTVYTEPVDMITKFEDSEEISSSTYFPGSIIDYPEEISVSLDRTAPPDGRASADHIVISLSDMASSIIESVVPKPEGPVADTVSTDLLISEKDPVKKAKKETGNGIILEVLEAYRDKKELEAERTKSSLSETVFDHPPSSVIALPMKEQLSTTYFTSGETFGQEKPASQLPSGSPSVSSLPAKPRPFFRSSSLDISAQPPPPPPPPPPPPPPPPPPPPPPLPPPTSPKPTILPKKKLTVASPVTTATPLFDAVTTLETTAVLRSNGLPVTRICTTAPPPVPPKPSSIPSGLVFTHRPEPSKPPIAPKPVIPQLPTTTQKPTDIHPKPTGLSLTSSMTLNLVTSADYKLPSPTSPLSPHSNKSSPRFSKSLTETYVVITLPSEPGTPTDSSASQAITSWPLGSPSKDLVSVEPVFSVVPPVTAVEIPISSEQTFYISGALQTFSATPVTAPSSFQAAPTSVTQFLTTEVSKTEVSATRSTAPSVGLSSISITIPPEPLALDNIHLEKPQYKEDGKLQLVGDVIDLRTVPKVEVKTTDKCIDLSASTMDVKRQITANEVYGKQISAVQPSIINLSVTSSIVTPVSLATETVTFVTCTASASYTTGTESLVGAEHAMTTPLQLTTSKHAEPPYRIPSDQVFPIAREEAPINLSLGTPAHAVTLAITKPVTVPPVGVTNGWTDSTVSQGITDGEVVDLSTTKSHRTVVTMDESTSSVMTKIIEDEKPVDLTAGRRAVCCDVVYKLPFGRSCTAQQPATTLPEDRFGYRDDHYQYDRSGPYGYRGIGGMKPSMSDTNLAEAGHFFYKSKNAFDYSEGTDTAVDLTSGRVTTGEVMDYSSKTTGPYPETRQVISGAGISTPQYSTARMTPPPGPQYCVGSVLRSSNGVVYSSVATPTPSTFAITTQPGSIFSTTVRDLSGIHTADAVTSLPAMHHSQPMPRSYFITTGASETDIAVTGIDISASLQTITMESLTAETIDSVPTLTTASEVFPEVVGDESALLIVPEEDKQQQQLDLERELLELEKIKQQRFAEELEWERQEIQRFREQEKIMVQKKLEELQSMKQHLLFQQEEERQAQFMMRQETLAQQQLQLEQIQQLQQQLHQQLEEQKIRQIYQYNYDPSGTASPQTTTEQAILEGQYAALEGSQFWATEDATTTASAVVAIEIPQSQGWYTVQSDGVTQYIAPPGILSTVSEIPLTDVVVKEEKQPKKRSSGAKVRGQYDDMGENMTDDPRSFKKIVDSGVQTDDEDATDRSYVSRRRRTKKSVDTSVQTDDEDQDEWDMPTRSRRKARVGKYGDSMTEADKTKPLSKVSSIAVQTVAEISVQTEPVGTIRTPSIRARVDAKVEIIKHISAPEKTYKGGSLGCQTEADSDTQSPQYLSATSPPKDKKRPTPLEIGYSSHLRADSTVQLAPSPPKSPKVLYSPISPLSPGKALESAFVPYEKPLPDDISPQKVLHPDMAKVPPASPKTAKMMQRSMSDPKPLSPTADESSRAPFQYTEGYTTKGSQTMTSSGAQKKVKRTLPNPPPEEISTGTQSTFSTMGTVSRRRICRTNTMARAKILQDIDRELDLVERESAKLRKKQAELDEEEKEIDAKLRYLEMGINRRKEALLKEREKRERAYLQGVAEDRDYMSDSEVSSTRPTRIESQHGIERPRTAPQTEFSQFIPPQTQTESQLVPPTSPYTQYQYSSPALPTQAPTSYTQQSHFEQQTLYHQQVSPYQTQPTFQAVATMSFTPQVQPTPTPQPSYQLPSQMMVIQQKPRQTTLYLEPKITSNYEVIRNQPLMIAPVSTDNTFAVSHLGSKYNSLDLRIGLEERSSMASSPISSISADSFYADIDHHTPRNYVLIDDIGEITKGTAALSTAFSLHEKDLSKTDRLLRTTETRRSQEVTDFLAPLQSSSRLHSYVKAEEDPMEDPYELKLLKHQIKQEFRRGTESLDHLAGLSHYYHADTSYRHFPKSEKYSISRLTLEKQAAKQLPAAILYQKQSKHKKSLIDPKMSKFSPIQESRDLEPDYSSYMTSSTSSIGGISSRARLLQDDITFGLRKNITDQQKFMGSSLGTGLGTLGNTIRSALQDEADKPYSSGSRSRPSSRPSSVYGLDLSIKRDSSSSSLRLKAQEAEALDVSFSHASSSARTKPTSLPISQSRGRIPIVAQNSEEESPLSPVGQPMGMARAAAGPLPPISADTRDQFGSSHSLPEVQQHMREESRTRGYDRDIAFIMDDFQHAMSDSEAYHLRREETDWFDKPRESRLENGHGLDRKLPERLVHSRPLSQHQEQIIQMNGKTMHYIFPHARIKITRDSKDHTVSGNGLGIRIVGGKEIPGHSGEIGAYIAKILPGGSAEQTGKLMEGMQVLEWNGIPLTSKTYEEVQSIISQQSGEAEICVRLDLNMLSDSENSQHLELHEPPKAVDKAKSPGVDPKQLAAELQKVSLQQSPLVLSSVVEKGSHVHSGPTSAGSSSVPSPGQPGSPSVSKKKHGSSKPTDGTKVVSHPITGEIQLQINYDLGNLIIHILQARNLVPRDNNGYSDPFVKVYLLPGRGQVMVVQNASAEYKRRTKHVQKSLNPEWNQTVIYKSISMEQLKKKTLEVTVWDYDRFSSNDFLGEVLIDLSSTSHLDNTPRWYPLKEQTESIDHGKSHSSQSSQQSPKPSVIKSRSHGIFPDPSKDMQVPTIEKSHSSPGSSKSSSEGHLRSHGPSRSQSKTSVTQTHLEDAGAAIAAAEAAVQQLRIQPTKPPNHRPAESSVSTGSSGSSFGSGYSVDSEGSSSTAGETNLFPIPRIGKMGQNGQEPVKQPGVGVGLADTEAKTQVMGEIKIALKKEMKTDGEQLIVEILQCRNITYKFKSPDHLPDLYVKIYVMNISTQKKVIKKKTRVCRHDREPSFNETFRFSLSPAGHSLQILLFSNGGKFMKKTLIGEACIWLDKVDLRKRIVNWHKLLVSPTQTH

SEQ ID NO: 5832 - protein, 945 aa, Homo sapiens
MGARSGARGALLLALLLCWDPRLSQAGTDSGSEVLPDSFPSAPAEPLPYFLQEPQDAYIVKNKPVELRCRAFPATQIYFKCNGEWVSQNDHVTQEGLDEATGLRVREVQIEVSRQQVEELFGLEDYWCQCVAWSSAGTTKSRRAYVRIAYLRKNFDQEPLGKEVPLDHEVLLQCRPPEGVPVAEVEWLKNEDVIDPTQDTNFLLTIDHNLIIRQARLSDTANYTCVAKNIVAKRRSTTATVIVYVNGGWSSWAEWSPCSNRCGRGWQKRTRTCTNPAPLNGGAFCEGQAFQKTACTTICPVDGAWTEWSKWSACSTECAHWRSRECMAPPPQNGGRDCSGTLLDSKNCTDGLCMQNKKTLSDPNSHLLEASGDAALYAGLVVAIFVVVAILMAVGVVVYRRNCRDFDTDITDSSAALTGGFHPVNFKTARPSNPQLLHPSVPPDLTASAGIYRGPVYALQDSTDKIPMTNSPLLDPLPSLKVKVYSSSTTGSGPGLADGADLLGVLPPGTYPSDFARDTHFLHLRSASLGSQQLLGLPRDPGSSVSGTFGCLGGRLSIPGTGVSLLVPNGAIPQGKFYEMYLLINKAESTLPLSEGTQTVLSPSVTCGPTGLLLCRPVILTMPHCAEVSARDWIFQLKTQAHQGHWEEVVTLDEETLNTPCYCQLEPRACHILLDQLGTYVFTGESYSRSAVKRLQLAVFAPALCTSLEYSLRVYCLEDTPVALKEVLELERTLGGYLVEEPKPLMFKDSYHNLRLSLHDLPHAHWRSKLLAKYQEIPFYHIWSGSQKALHCTFTLERHSLASTELTCKICVRQVEGEGQIFQLHTTLAETPAGSLDTLCSAPGSTVTTQLGPYAFKIPLSIRQKICNSLDAPNSRGNDWRMLAQKLSMDRYLNYFATKASPTGVILDLWEALQQDDGDLNSLASALEEMGKSEMLVAVATDGDC

SEQ ID NO: 5833 - protein, 1069 aa, Homo sapiens
MPRAPRCRAVRSLLRSHYREVLPLATFVRRLGPQGWRLVQRGDPAAFRALVAQCLVCVPWDARPPPAAPSFRQVSCLKELVARVLQRLCERGAKNVLAFGFALLDGARGGPPEAFTTSVRSYLPNTVTDALRGSGAWGLLLRRVGDDVLVHLLARCALFVLVAPSCAYQVCGPPLYQLGAATQARPPPHASGPRRRLGCERAWNHSVREAGVPLGLPAPGARRRGGSASRSLPLPKRPRRGAAPEPERTPVGQGSWAHPGRTRGPSDRGFCVVSPARPAEEATSLEGALSGTRHSHPSVGRQHHAGPPSTSRPPRPWDTPCPPVYAETKHFLYSSGDKEQLRPSFLLSSLRPSLTGARRLVETIFLGSRPWMPGTPRRLPRLPQRYWQMRPLFLELLGNHAQCPYGVLLKTHCPLRAAVTPAAGVCAREKPQGSVAAPEEEDTDPRRLVQLLRQHSSPWQVYGFVRACLRRLVPPGLWGSRHNERRFLRNTKKFISLGKHAKLSLQELTWKMSVRDCAWLRRSPGVGCVPAAEHRLREEILAKFLHWLMSVYVVELLRSFFYVTETTFQKNRLFFYRKSVWSKLQSIGIRQHLKRVQLRELSEAEVRQHREARPALLTSRLRFIPKPDGLRPIVNMDYVVGARTFRREKRAERLTSRVKALFSVLNYERARRPGLLGASVLGLDDIHRAWRTFVLRVRAQDPPPELYFVKVDVTGAYDTIPQDRLTEVIASIIKPQNTYCVRRYAVVQKAAHGHVRKAFKSHVSTLTDLQPYMRQFVAHLQETSPLRDAVVIEQSSSLNEASSGLFDVFLRFMCHHAVRIRGKSYVQCQGIPQGSILSTLLCSLCYGDMENKLFAGIRRDGLLLRLVDDFLLVTPHLTHAKTFLSYARTSIRASLTFNRGFKAGRNMRRKLFGVLRLKCHSLFLDLQVNSLQTVCTNIYKILLLQAYRFHACVLQLPFHQQVWKNPTFFLRVISDTASLCYSILKAKNAGMSLGAKGAAGPLPSEAVQWLCHQAFLLKLTRHRVTYVPLLGSLRTAQTQLSRKLPGTTLTALEAAANPALPSDFKTILD

SEQ ID NO: 5834 - protein, 810 aa, Homo sapiens
MVSEEEEEEDGDAEETQDSEDDEEDEMEEDDDDSDYPEEMEDDDDDASYCTESSFRSHSTYSSTPGRRKPRVHRPRSPILEEKDIPPLEFPKSSEDLMVPNEHIMNVIAIYEVLRNFGTVLRLSPFRFEDFCAALVSQEQCTLMAEMHVVLLKAVLREEDTSNTTFGPADLKDSVNSTLYFIDGMTWPEVLRVYCESDKEYHHVLPYQEAEDYPYGPVENKIKVLQFLVDQFLTTNIAREELMSEGVIQYDDHCRVCHKLGDLLCCETCSAVYHLECVKPPLEEVPEDEWQCEVCVAHKVPGVTDCVAEIQKNKPYIRHEPIGYDRSRRKYWFLNRRLIIEEDTENENEKKIWYYSTKVQLAELIDCLDKDYWEAELCKILEEMREEIHRHMDITEDLTNKARGSNKSFLAAANEEILESIRAKKGDIDNVKSPEETEKDKNETENDSKDAEKNREEFEDQSLEKDSDDKTPDDDPEQGKSEEPTEVGDKGNSVSANLGDNTTNATSEETSPSEGRSPVGCLSETPDSSNMAEKKVASELPQDVPEEPNKTCESSNTSATTTSIQPNLENSNSSSELNSSQSESAKAADDPENGERESHTPVSIQEEIVGDFKSEKSNGELSESPGAGKGASGSTRIITRLRNPDSKLSQLKSQQVAAAAHEANKLFKEGKEVLVVNSQGEISRLSTKKEVIMKGNINNYFKLGQEGKYRVYHNQYSTNSFALNKHQHREDHDKRRHLAHKFCLTPAGEFKWNGSVHGSKVLTISTLRLTITQLETTSLHPFFIPTGHHIGQIGSRQFRCVANPENLHWL

SEQ ID NO: 5835 - protein, 845 aa, Homo sapiens
MLSGVWFLSVLTVAGILQTESRKTAKDICKIRCLCEEKENVLNINCENKGFTTVSLLQPPQYRIYQLFLNGNLLTRLYPNEFVNYSNAVTLHLGNNGLQEIRTGAFSGLKTLKRLHLNNNKLEILREDTFLGLESLEYLQADYNYISAIEAGAFSKLNKLKVLILNDNLLLSLPSNVFRFVLLTHLDLRGNRLKVMPFAGVLEHIGGIMEIQLEENPWNCTCDLLPLKAWLDTITVFVGEIVCETPFRLHGKDVTQLTRQDLCPRKSASDSSQRGSHADTHVQRLSPTMNPALNPTRAPKASRPPKMRNRPTPRVTVSKDRQSFGPIMVYQTKSPVPLTCPSSCVCTSQSSDNGLNVNCQERKFTNISDLQPKPTSPKKLYLTGNYLQTVYKNDLLEYSSLDLLHLGNNRIAVIQEGAFTNLTSLRRLYLNGNYLEVLYPSMFDGLQSLQYLYLEYNVIKEIKPLTFDALINLQLLFLNNNLLRSLPDNIFGGTALTRLNLRNNHFSHLPVKGVLDQLPAFIQIDLQENPWDCTCDIMGLKDWTEHANSPVIINEVTCESPAKHAGEILKFLGREAICPDSPNLSDGTVLSMNHNTDTPRSLSVSPSSYPELHTEVPLSVLILGLLVVFILSVCFGAGLFVFVLKRRKGVPSVPRNTNNLDVSSFQLQYGSYNTETHDKTDGHVYNYIPPPVGQMCQNPIYMQKEGDPVAYYRNLQEFSYSNLEEKKEEPATPAYTISATELLEKQATPREPELLYQNIAERVKELPSAGLVHYNFCTLPKRQFAPSYESRRQNQDRINKTVLYGTPRKCFVGQSKPNHPLLQAKPQSEPDYLEVLEKQTAISQL

SEQ ID NO: 5836 - protein, 712 aa, Homo sapiens
MAAAGLVAVAAAAEYSGTVASGGNLPGVHCGPSSGAGPGFGPGSWSRSLDRALEEAAVTGVLSLSGRKLREFPRGAANHDLTDTTRADLSRNRLSEIPIEACHFVSLENLNLYQNCIRYIPEAILNLQALTFLNISRNQLSTLPVHLCNLPLKVLIASNNKLVSLPEEIGHLRHLMELDVSCNEIQTIPSQIGNLEALRDLNVRRNHLVHLPEELAELPLIRLDFSCNKITTIPVCYRNLRHLQTITLDNNPLQSPPAQICIKGKVHIFKYLNIQACKIAPDLPDYDRRPLGFGSCHEELYSSRPYGALDSGFNSVDSGDKRWSGNEPTDEFSDLPLRVAEITKEQRLRRESQYQENRGSLVVTNGGVEHDLDQIDYIDSCTAEEEEAEVRQPKGPDPDSLSSQFMAYIEQRRISHEGSPVKPVAIREFQKTEDMRRYLHQNRVPAEPSSLLSLSASHNQLSHTDLELHQRREQLVERTRREAQLAALQYEEEKIRTKQIQRDAVLDFVKQKASQSPQKQHPLLDGVDGECPFPSRRSQHTDDSALCMSLSGLNQVGCAATLPHSSAFTPLKSDDRPNALLSSPATETVHHSPAYSFPAAIQRNQPQRPESFLFRAGVRAETNKGHASPLPPSAAPTTDSTDSITGQNSRQREEELELIDQLRKHIEYRLKVSLPCDLGAALTDGVVLCHLANHVRPRSVPSIHVPSPAVVS

SEQ ID NO: 5837 - protein, 2353 aa, Homo sapiens
MKQRKGQGSGGSRGRKKRGLSDISPSTSLPPLVEGQLRCFLKLTVNRVIWKIAKPPTCVLVRVRWWGETSDGTLFCPRDALQTEPKAVRTTTRYAIRCGPKQFTSYLTDMAVLVLEVITKLDGLPIGRVQINGLAQLSPTHQINGFFTIVSSTSKKLGELQVSLALEPLSETYDSYHPLPTTDMTENVLLSKQGFRENTEPSSTQFQVPSRPRDIHTIKIDGKELAANSSRSTTPRGKDHVCFAENPDTIKDSSFGLQHSLNSGQSLESVTLKGRAPRKQMSLLNSSEFQPQIRTVAKSHSDSCILSSNNLPTKDLLSALLEQGNKLRNAMVISAMKSSPETSMLLDQVHPPINEDSLRASTQIRAFSRNRFKDHIEDHLLPSTENTFWRHDTKADTRAIQLLLGSAELSQGNFWDGLGSPPDSPSPGSDVYCISELNDPQYDQSLLENLFYTAPKSDTSISDFLSEEDDIVPSKKISQSTALARSSKVLESSDHKLKKRSAGKRNRNLVEQQMLSETPEDAQTMTLSVDRLALLGRTHSVRIIIETMGVPPDSPQMTPGKKSYAGPPPKVTTAKKRTFFVEYHFPVGFSESGLGKTALITEVVRLASSKITDGKVKFQQRFVFPVQFGGPMIEHWWNSNLTFQIYVKKTPQKKPEVIGSVSLSLRAVIQSELLSFSDQLPVQQENGQSPFGPLKVTMELITDNKDFTGINTKLSGNTHYTPLCAPTSPNKALPELNQDMTCTKNPQNLNQIHEETAKKAQNLVLPNRKSPSPVAPHPSTFVATPASHNLVNQTNGTTKESALLLHVLLMVPDGKDFISGESEKQSPCNVYLNCKLFSTEEVTRSVIAWGTTQPVFNFSQVIPVSLSSKYLERLKNNVMVIETWNKVRSPGQDKLLGLVKLPLHQFYMSFKDAKISRLLLDAQYPVVAVDSYMPVIDVFSGHQNGSLRVFLAMGSSNQIMALQRLKNEEGTLPPFSPRPAHFLDQPTAASVAMAEDRGNGLMEHCFEIHIEMVKGLAPLQATVWGEADCYVQYYFPVQHSQSSVLKGPEFLENGITLKPFRTATTLCVPDPIFNSEHHHSLLLPAEVPVQRLLLSAFSAQGLVPGGGVQFEIWCRYYYPNVRDQKVAKGTLPLSRICAMVTTQHREDVGIQTFNLPLTPRIENRKELRNQSSGLLDVGLRYRRSPRTAEGVLAARTVSISVQIIRACGLQAAAKALAEREPALQFSATVGVNASVTTHLSFLPQGEQRRTHPVACSFCPEFSHHVEFTCNLVTQHCSGEACFLAELLEFAEVIFAVYHENTKSASDIISIESCKEYLLGVVKVPTKELLIKRSGITGWYPIILPEDGGLPHGLELMQKIVGGLELSISFTHRGDRERVLEAAEHLGWSFENSLKDFVRMDEGEPATVTISTPRLWLPIHCVLLAGHNHIHKNTYCYLRYKFYDHEAFWTPLKKPKESVNKKQIMVTFKASKRAEVTRGPSLLWYFREERLEIQVWRAYGNDSVERPHQTDSWIGSAYVDLARLGERSARTLTVSGVYPLFGRNASNLSGAALRVHVVLSSLSSHLEPTHELDSMDCSSHSESEQLPRRNDEVQLSPPEVISCHQKSPASTQVPCSSTTAEVRLTQEGPADLDGTFAVSILVERAMHLSLKGSPLTERKVSIPSCCVSFATADESSPVYTQVVENTDSPIWNFQQQSRLSKELLLDPQQTLVFKVWHKGDEERVIGFASVDLSPLLSGFQFVCGWYNITDFSGECQGQIKVAVSPLESLIHFKEERQARRGVETSKSLIPIYSPFSFPASDTYAAFSSHMARQTLDQLAHASSKELDFSSPGRSDTTRSQASRHEEHVQNIRRFHESLHLQGEAPLPCDDKLTTSPLSSQTSILTSLRKNLSELDQIQRYFRQKLTKPFLPLSPQTQTAISQHQESCRDHLGPGASSLDPGSQCILEKSSNLVLQVSSLITDLQTITRDSQAALSSHRARSRSNKATTLPDAQDTEALQERCTMPDEPLVRAPDKGTDSPSPPPLEETSNGGRMLHESLRHAVPITRMQSSEDTEAGPAYSDEDYEEDIIEPRTLNEITTVTDKTSPWSSVISDTSEVISPQPDEVQREGPSCPSPGPFCREELMVKSSFLSSPERAVNPHLPRQGSPSQSLVACECEASKARVGGESASANPQPIPCPTLSGAQQSSTFVGWSSPQTDQNKEPKSEAPAENEAATSELGDSADSFKKLPLNLASQSRRENHKGPPIDSSDIRQRQVTTGSETSTKQSLLLPGPIVVPNFFLPPQQLEASLRMLSLSATLPPAATTDQDKSEATRGALSQRPCRPRPNSLPLNLPEEETLRIARIFSSQYSQKD

SEQ ID NO: 5838 - protein, 584 aa, Homo sapiens
MALSQGLFTFKDVAIEFSQEEWECLDPAQRALYRDVMLENYRNLLSLDEDNIPPEDDISVGFTSKGLSPKENNKEELYHLVILERKESHGINNFDLKEVWENMPKFDSLWDYDVKNYKGMPLTCNKNLTHRKDQQHNKSSIHFSLKQSVSIRDSAHQYFIHDKPFIRNLLKLKNNIRYAGNKYVKCFENKIGLSLQAQLAELQRFQTGEKMYECNPVEKSINSSSVSPLPPCVKNICNKYRKILKYPLLHTQYGRTHIREKSYKCNDCGKAFSKSSNLTNHQRIHSGQRPYKCNECGKAFNQCSNLTRHQRVHTGEKPYQCNICGKVCSQNSNLASHQRMHTGEKPYKCNECGKAFIQRSHLWGHERIHTGEKPYKCNECDKAFAERSSLTQHKRIHTGEKPYICNECGKAFKQCSHLTRHQNIHPGEKPHKCNVCGRAFIQSSSLVEHQRIHTGEKPYKCNKCDKAFIKRSHLWGHQRTHTGEKPYKCTECGKAFTERSNLTQHKKIHTGEKPYKCTECGKAFTQFANLTRHQKIHIEKKHCKHNIHGNALFQSSNLGDHQKSYNREKHIKYNETKIKYSSCT

SEQ ID NO: 5839 - protein, 349 aa, Homo sapiens
MPHIDNDVKLDFKDVLLRPKRSTLKSRSEVDLTRSFSFRNSKQTYSGVPIIAANMDTVGTFEMAKVLCKFSLFTAVHKHYSLVQWQEFAGQNPELCFSHSIWLPAQAQALLTLSSWNRSWKLFPRSICLDVANGYSEHFVEFVKDVRKRFPQHTIMAGNVVTGEMVEELILSGADIIKVGIGPGSVCTTRKKTGVGYPQLSAVMECADAAHGLKGHIISDGGCSCPGDVAKAFGAGADFVMLGGMLAGHSESGGELIERDGKKYKLFYGMSSEMAMKKYAGGVAEYRASEGKTVEVPFKGDVEHTIRDILGGIRSTCTYVGAAKLKELSRRTTFIRVTQQVNPIFSEAC

SEQ ID NO: 5840 - protein, 638 aa, Homo sapiens
MATGANATPLDFPSKKRKRSRWNQDTMEQKTVIPGMPTVIPPGLTREQERAYIVQLQIEDLTRKLRTGDLGIPPNPEDRSPSPEPIYNSEGKRLNTREFRTRKKLEEERHNLITEMVALNPDFKPPADYKPPATRVSDKVMIPQDEYPEINFVGLLIGPRGNTLKNIEKECNAKIMIRGKGSVKEGKVGRKDGQMLPGEDEPLHALVTANTMENVKKAVEQIRNILKQGIETPEDQNDLRKMQLRELARLNGTLREDDNRILRPWQSSETRSITNTTVCTKCGGAGHIASDCKFQRPGDPQSAQDKARMDKEYLSLMAELGEAPVPASVGSTSGPATTPLASAPRPAAPANNPPPPSLMSTTQSRPPWMNSGPSESRPYHGMHGGGPGGPGGGPHSFPHPLPSLTGGHGGHPMQHNPNGPPPPWMQPPPPPMNQGPHPPGHHGPPPMDQYLGSTPVGSGVYRLHQGKGMMPPPPMGMMPPPPPPPSGQPPPPPSGPLPPWQQQQQQPPPPPPPSSSMASSTPLPWQQNTTTTTTSAGTGSIPPWQQQQAAAAASPGAPQMQGNPTMVPLPPGVQPPLPPGAPPPPPPPPPGSAGMMIPPRGGDGPSHESEDFPRPLVTLPGRQPQQRPWWTGWFGKAA

SEQ ID NO: 5841 - protein, 309 aa, Homo sapiens
MEKKKNVTEFILIGLTQNPIMEKVTFVVFLVLYMITLSGNLLIVVTITTSQALSSPMYFFLTHLSLIDTVYSSSSAPKLIVDSFQEKKIISFNGCMAQAYAEHIFGATEIILLTVMACDCYVAICKPLNYTTIMSHSLCILLVAVAWVGGFLHATIQILFTVWLPFCGPNVIGHFMCDLYPLLKLVCIDTHTLGLFVAVNSGFICLLNFLILVVSYVIILRSLKNNSLEGRCKALSTCISHIIVVVLFFVPCIFVYLRSVTTLPIDKAVAVFYTMVVPMLNPVVYTLRNAEVKSAIRKLWRKKVTSDND

SEQ ID NO: 5842 - protein, 879 aa, Homo sapiens
MTAIKHALQRDIFTPNDERLLSIVNVCKAGKKKKNCFLCATVTTERPVQVKVVKVKKSDKGDFYKRQIAWALRDLAVVDAKDAIKENPEFDLHFEKIYKWVASSTAEKNAFISCIWKLNQRYLRKKIDFVNVSSQLLEESVPSGENQSVTGGDEEVVDEYQELNAREEQDIEIMMEGCEYAISNAEAFAEKLSRELQVLDGANIQSIMASEKQVNILMKLLDEALKEVDQIELKLSSYEEMLQSVKEQMDQISESNHLIHLSNTNNVKLLSEIEFLVNHMDLAKGHIKALQEGDLASSRGIEACTNAADALLQCMNVALRPGHDLLLAVKQQQQRFSDLRELFARRLASHLNNVFVQQGHDQSSTLAQHSVELTLPNHHPFHRDLLRYAKLMEWLKSTDYGKYEGLTKNYMDYLSRLYEREIKDFFEVAKIKMTGTTKESKKFGLHGSSGKLTGSTSSLNKLSVQSSGNRRSQSSSLLDMGNMSASDLDVADRTKFDKIFEQVLSELEPLCLAEQDFISKFFKLQQHQSMPGTMAEAEDLDGGTLSRQHNCGTPLPVSSEKDMIRQMMIKIFRCIEPELNNLIALGDKIDSFNSLYMLVKMSHHVWTAQNVDPASFLSTTLGNVLVTVKRNFDKCISNQIRQMEEVKISKKSKVGILPFVAEFEEFAGLAESIFKNAERRGDLDKAYTKLIRGVFVNVEKVANESQKTPRDVVMMENFHHIFATLSRLKISCLEAEKKEAKQKYTDHLQSYVIYSLGQPLEKLNHFFEGVEARVAQGIREEEVSYQLAFNKQELRKVIKEYPGKEVKKGLDNLYKKVDKHLCEEENLLQVVWHSMQDEFIRQYKHFEGLIARCYPGSGVTMEFTIQDILDYCSSIAQSH

SEQ ID NO: 5843 - protein, 309 aa, Homo sapiens
MKRKNFTEVSEFIFLGFSSFGKHQITLFVVFLTVYILTLVANIIIVTIICIDHHLHTPMYFFLSMLASSETVYTLVIVPRMLLSLIFHNQPISLAGCATQMFFFVILATNNCFLLTAMGYDRYVAICRPLRYTVIMSKGLCAQLVCGSFGIGLTMAVLHVTAMFNLPFCGTVVDHFFCDIYPVMKLSCIDTTINEIINYGVSSFVIFVPIGLIFISYVLVISSILQIASAEGRKKTFATCVSHLTVVIVHCGCASIAYLKPKSESSIEKDLVLSVTYTIITPLLNPVVYSLRNKEVKDALCRVVGRNIS

SEQ ID NO: 5844 - protein, 314 aa, Homo sapiens
MMMVLRNLSMEPTFALLGFTDYPKLQIPLFLVFLLMYVITVVGNLGMIIIIKINPKFHTPMYFFLSHLSFVDFCYSSIVTPKLLENLVMADKSIFYFSCMMQYFLSCTAVVTESFLLAVMAYDRFVAICNPLLYTVAMSQRLCALLVAGSYLWGMFGPLVLLCYALRLNFSGPNVINHFFCEYTALISVSGSDILIPHLLLFSFATFNEMCTLLIILTSYVFIFVTVLKIRSVSGRHKAFSTWASHLTSITIFHGTILFLYCVPNSKNSRQTVKVASVFYTVVNPMLNPLIYSLRNKDVKDAFWKLIHTQVPFH

SEQ ID NO: 5845 - protein, 765 aa, Homo sapiens
MPRSPGTRLKPAKYIPVATAAALLVGSSTLFFVFTCPWLTRAVSPAVPVYNGIIFLFVLANFSMATFMDPGVFPRADEDEDKEDDFRAPLYKNVDVRGIQVRMKWCATCHFYRPPRCSHCSVCDNCVEDFDHHCPWVNNCIGRRNYRYFFLFLLSLSAHMVGVVAFGLVYVLNHAEGLGAAHTTITMAVMCVAGLFFIPVIGLTGFHVVLVTRGRTTNEQVTGKFRGGVNPFTRGCCGNVEHVLCSPLAPRYVVEPPRLPLAVSLKPPFLRPELLDRAAPLKVKLSDNGLKAGLGRSKSKGSLDRLDEKPLDLGPPLPPKIEAGTFSSDLQTPRPGSAESALSVQRTSPPTPAMYKFRPAFPTGPKVPFCGPGEQVPGPDSLTLGDDSIRSLDFVSEPSLDLPDYGPGGLHAAYPPSPPLSASDAFSGALRSLSLKASSRRGGDHVALQPLRSEGGPPTPHRSIFAPHALPNRNGSLSYDSLLNPGSPGGHACPAHPAVGVAGYHSPYLHPGATGDPPRPLPRSFSPVLGPRPREPSPVRYDNLSRTIMASIQERKDREERERLLRSQADSLFGDSGVYDAPSSYSLQQASVLSEGPRGPALRYGSRDDLVAGPGFGGARNPALQTSLSSLSSSVSRAPRTSSSSLQADQASSNAPGPRPSSGSHRSPARQGLPSPPGTPHSPSYAGPKAVAFIHTDLPEPPPSLTVQRDHPQLKTPPSKLNGQSPGLARLGPATGPPGPSASPTRHTLVKKVSGVGGTTYEISV

SEQ ID NO: 5846 - protein, 549 aa, Homo sapiens
MDFLIVLVCLIFSVLSTIEQYAALATGTLFWMEIVLVVFFGTEYVVRLWSAGCRSKYVGLWGRLRFARKPISIIDLIVVVASMVVLCVGSKGQVFATSAIRGIRFLQILRMLHVDRQGGTWRLLGSVVFIHRQELITTLYIGFLGLIFSSYFVYLAEKDAVNESGRVEFGSYADALWWGVVTVTTIGYGDKVPQTWVGKTIASCFSVFAISFFALPAGILGSGFALKVQQKQRQKHFNRQIPAAASLIQTAWRCYAAENPDSSTWKIYIRKAPRSHTLLSPSPKPKKSVVVKKKKFKLDKDNGVTPGEKMLTVPHITCDPPEERRLDHFSVDGYDSSVRKSPTLLEVSMPHFMRTNSFAEDLDLEGETLLTPITHISQLREHHRATIKVIRRMQYFVAKKKFQQARKPYDVRDVIEQYSQGHLNLMVRIKELQRRLDQSIGKPSLFISVSEKSKDRGSNTIGARLNRVEDKVTQLDQRLALITDMLHQLLSLHGGSTPGSGGPPREGGAHITQPCGSGGSVDPELFLPSNTLPTYEQLTVPRRGPDEGS

SEQ ID NO: 5847 - protein, 712 aa, Homo sapiens
MGDYGFGVLVQSNTGNKSAFPVRFHPHLQPPHHHQNATPSPAAFINNNTAANGSSAGSAWLFPAPATHNIQDEILGSEKAKSQQQEQQDPLEKQQLSPSPGQEAGILPETEKAKSEENQGDNSSENGNGKEKIRIESPVLTGFDYQEATGLGTSTQPLTSSASSLTGFSNWSAAIAPSSSTIINEDASFFHQGGVPAASANNGALLFQNFPHHVSPGFGGSFSPQIGPLSQHHPHHPHFQHHHSQHQQQRRSPASPHPPPFTHRNAAFNQLPHLANNLNKPPSPWSSYQSPSPTPSSSWSPGGGGYGGWGGSQGRDHRRGLNGGITPLNSISPLKKNFASNHIQLQKYARPSSAFAPKSWMEDSLNRADNIFPFPDRPRTFDMHSLESSLIDIMRAENDTIKARTYGRRRGQSSLFPMEDGFLDDGRGDQPLHSGLGSPHCFSHQNGERVERYSRKVFVGGLPPDIDEDEITASFRRFGPLIVDWPHKAESKSYFPPKGYAFLLFQDESSVQALIDACIEEDGKLYLCVSSPTIKDKPVQIRPWNLSDSDFVMDGSQPLDPRKTIFVGGVPRPLRAVELAMIMDRLYGGVCYAGIDTDPELKYPKGAGRVAFSNQQSYIAAISARFVQLQHGEIDKRVEVKPYVLDDQLCDECQGARCGGKFAPFFCANVTCLQYYCEYCWAAIHSRAGREFHKPLVKEGGDRPRHISFRWN

SEQ ID NO: 5848 - protein, 624 aa, Homo sapiens
MNSGGGFGLGLGFGLTPTSVIQVTNLSSAVTSEQMRTLFSFLGEIEELRLYPPDNAPLAFSSKVCYVKFRDPSSVGVAQHLTNTVFIDRALIVVPCAEGKIPEESKALSLLAPAPTMTSLMPGAGLLPIPTPNPLTTLGVSLSSLGAIPAAALDPNIATLGEIPQPPLMGNVDPSKIDEIRRTVYVGNLNSQTTTADQLLEFFKQVGEVKFVRMAGDETQPTRFAFVEFADQNSVPRALAFNGVMFGDRPLKINHSNNAIVKPPEMTPQAAAKELEEVMKRVREAQSFISAAIEPESGKSNERKGGRSRSHTRSKSRSSSKSHSRRKRSQSKHRSRSHNRSRSRQKDRRRSKSPHKKRSKSRERRKSRSRSHSRDKRKDTREKIKEKERVKEKDREKEREREKEREKEKERGKNKDRDKEREKDREKDKEKDREREREKEHEKDRDKEKEKEQDKEKEREKDRSKEIDEKRKKDKKSRTPPRSYNASRRSRSSSRERRRRRSRSSSRSPRTSKTIKRKSSRSPSPRSRNKKDKKREKERDHISERRERERSTSMRKSSNDRDGKEKLEKNSTSLKEKEHNKEPDSSVSKEVDDKDAPRTEENKIQHNGNCQLNEENLSTKTEAV

SEQ ID NO: 5849 - protein, 2567 aa, Homo sapiens
MAISSRLALWEQKIREEDKSPPPSSPPPLFSVIPGGFIKQLVRGTEKEAKEARQRKQLAVASPEREIPEISISQPNSKSSSGTRSGSQQISQDDQSSSPGSSDILGKESEGSRSPDPEQMTSINGEKAQELGSSATPTKKTVPFKRGVRRGDVLLMVAKLDPDSAKPEKTHPHDAPPCKTSPPATDTGKEKKGETSRTPCGSQASTEILAPKAEKTRTGGLGDPGQGTVALKKGEEGQSIVGKGLGTPKTTELKEAEPQGKDRQGTRPQAQGPGEGVRPGKAEKEGAEPTNTVEKGNVSKDVGSEGKHVRPQIPGRKWGGFLGRRSKWDGPQNKKDKEGVLLSKAEKTGEPQTQMEKTSQVQGELGDDLRMGEKAGELRSTTGKAGESWDKKEKMGQPQGKSGNAGEARSQTEKGCEAPKEVSTMVESPAAPGKGGWPGSRGQEAEEPCSRAGDGAGALETELEGPSQPALEKDAERPRIRKENQDGPAPQEEGKGGQSRDSDQAPEDRWYEAEKVWLAQKDGFTLATVLKPDEGTADLPAGRVRLWIDADKTITEVDEEHVHRANPPELDQVEDLASLISVNESSVLNTLLQRYKAQLLHTCTGPDLIVLQPRGPSVPSAGKVPKGRRDGLPAHIGSMAQRAYWALLNQRRDQSIVALGWSGAGKTTCCEQVLEHLVGMAGSVDGRVSVEKIRATFTVLRAFGSVSMAHSRSATRFSMVMSLDFNATGRITAAQLQTMLLEKSRVARQPEGESNFLVFSQMLAGLDLDLRTELNLHQMADSSSFGMGVWSKPEDKQKAAAAFAQLQGAMEMLGISESEQRAVWRVLAAIYHLGAAGACKVGRKQFMRFEWANYAAEALGCEYEELNTATFKHHLRQIIQQMTFGPSRWGLEDEETSSGLKMTGVDCVEGMASGLYQELFAAVVSLINRSFSSHHLSMASIMVVDSPGFQNPRHQGKDRAATFEELCHNYAHERLQLLFYQRTFVSTLQRYQEEGVPVQFDLPDPSPGTTVAVVDQNPSQVRLPAGGGAQDARGLFWVLDEEVHVEGSSDSVVLERLCAAFEKKGAGTEGSSALRTCEQPLQCEIFHQLGWDPVRYDLTGWLHRAKPNLSALDAPQVLHQSKREELRSLFQARAKLPPVCRAVAGLEGTSQQALQRSRMVRRTFASSLAAVRRKAPCSQIKLQMDALTSMIKRSRLHFIHCLVPNPVVESRSGQESPPPPQPGRDKPGAGGPLALDIPALRVQLAGFHILEALRLHRTGYADHMGLTRFRRQFQVLDAPLLKKLMSTSEGIDERKAVEELLETLDLEKKAVAVGHSQVFLKAGVISRLEKQREKLVSQSIVLFQAACKGFLSRQEFKKLKIRRLAAQCIQKNVAVFLAVKDWPWWQLLGSLQPLLSATIGTEQLRAKEEELTTLRRKLEKSEKLRNELRQNTDLLESKIADLTSDLADERFKGDVACQVLESERAERLQAFREVQELKSKHEQVQKKLGDVNKQLEEAQQKIQLNDLERNPTGGADEWQMRFDCAQMENEFLRKRLQQCEERLDSELTARKELEQKLGELQSAYDGAKKMAHQLKRKCHHLTCDLEDTCVLLENQQSRNHELEKKQKKFDLQLAQALGESVFEKGLREKVTQENTSVRWELGQLQQQLKQKEQEASQLKQQVEMLQDHKRELLGSPSLGENCVAGLKERLWKLESSALEQQKIQSQQENTIKQLEQLRQRFELEIERMKQMHQKDREDQEEELEDVRQSCQKRLHQLEMQLEQEYEEKQMVLHEKQDLEGLIGTLCDQIGHRDFDVEKRLRRDLRRTHALLSDVQLLLGTMEDGKTSVSKEELEKVHSQLEQSEAKCEEALKTQKVLTADLESMHSELENMTRNKSLVDEQLYRLQFEKADLLKRIDEDQDDLNELMQKHKDLIAQSAADIGQIQELQLQLEEAKKEKHKLQEQLQVAQMRIEYLEQSTVDRAIVSRQEAVICDLENKTEFQKVQIKRFEVLVIRLRDSLIKMGEELSQAATSESQQRESSQYYQRRLEELKADMEELVQREAEASRRCMELEKYVEELAAVRQTLQTDLETSIRRIADLQAALEEVASSDSDTESVQTAVDCGSSGRKEMDNVSILSSQPEGSLQSWLSCTLSLATDTMRTPSRQSATSSRILSPRINEEAGDTERTQSALALSRARSTNVHSKTSGDKPVSPHFVRRQKYCHFGDGEVLAVQRKSTERLEPASSPLASRSTNTSPLSREKLPSPSAALSEFVEGLRRKRAQRGQGSTLGLEDWPTLPIYQTTGASTLRRGRAGSDEGNLSLRVGAKSPLEIEGAAGGLLRSTSLKCISSDGVGGTTLLPEKSKTQFSSCESLLESRPSMGRKLSSPTTPRDMLLSPTLRPRRRCLESSVDDAGCPDLGKEPLVFQNRQFAHLMEEPLGSDPFSWKLPSLDYERKTKVDFDDFLPAIRKPQTPTSLAGSAKGGQDGSQRSSIHFETEEANRSFLSGIKTILKKSPEPKEDPAHLSDSSSSSGSIVSFKSADSIKSRPGIPRLAGDGGERTSPERREPGTGRKDDDVASIMKKYLQK

SEQ ID NO: 5850 - protein, 354 aa, Homo sapiens
MSSKYPRSVRRCLPLCALTLEAALILLFYFFTHYDASLEDQKGLVASYQVGQDLTVMAALGLGFLTSNFRRHSWSSVAFNLFMLALGVQWAILLDGFLSQFPPGKVVITLFSIRLATMSAMSVLISAGAVLGKVNLAQLVVMVLVEVTALGTLRMVISNIFNTDYHMNLRHFYVFAAYFGLTVAWCLPKPLPKGTEDNDQRATIPSLSAMLGALFLWMFWPSVNSALLRSPIQRKNAMFNTYYALAVSVVTAISGSSLAHPQRKISMTYVHSAVLAGGVAVGTSCHLIPSPWLAMVLGLVAGLISIGGAKCLPDWLPGPPQHWGTQLGHRDSSHVWSPDRFAPKSQNMESTSCG

SEQ ID NO: 5851 - protein, 340 aa, Homo sapiens
MRLLERMRKDWFMVGIVLAIAGAKLEPSIGVNGGPLKPEITVSYIAVATIFFNSGLSLKTEELTSALVHLKLHLFIQIFTLAFFPATIWLFLQLLSITPINEWLLKGLQTVGCMPPPVSSAVILTKAVGGNEAAAIFNSAFGSFLGIVITPLLLLLFLGSSSSVPFTSIFSQLFMTVVVPLIIGQIVRRYIKDWLERKKPPFGAISSSVLLMIIYTTFCDTFSNPNIDLDKFSLVLILFIIFSIQLSFMLLTFIFSTRNNSGFTPADTVAIIFCSTHKSLTLGIPMLKIVFAGHEHLSLISVPLLIYHPAQILLGSVLVPTIKSWMVSRQKGVKLTRPTV

SEQ ID NO: 5852 - protein, 421 aa, Homo sapiens
MMYRTVGFGTRSRNLKPWMIAVLIVLSLTVVAVTIGLLVHFLVFDQKKEYYHGSFKILDPQINNNFGQSNTYQLKDLRETTENLVSQVDEIFIDSAWKKNYIKNQVVRLTPEEDGVKVDVIMVFQFPSTEQRAVREKKIQSILNQKIRNLRALPINASSVQVNAMSSSTGELTVQASCGKRVVPLNVNRIASGVIAPKAAWPWQASLQYDNIHQCGATLISNTWLVTAAHCFQKYKNPHQWTVSFGTKINPPLMKRNVRRFIIHEKYRSAAREYDIAVVQVSSRVTFSDDIRQICLPEASASFQPNLTVHITGFGALYYGGESQNDLREARVKIISDDVCKQPQVYGNDIKPGMFCAGYMEGIYDACRGDSGGPLVTRDLKDTWYLIGIVSWGDNCGQKDKPGVYTQVTYYRNWIASKTGI

SEQ ID NO: 5853 - protein, 1154 aa, Homo sapiens
MGLLLMILASAVLGSFLTLLAQFFLLYRRQPEPPADEAARAGEGFRYIKPVPGLLLREYLYGGGRDEEPSGAAPEGGATPTAAPETPAPPTRETCYFLNATILFLFRELRDTALTRRWVTKKIKVEFEELLQTKTAGRLLEGLSLRDVFLGETVPFIKTIRLVRPVVPSATGEPDGPEGEALPAACPEELAFEAEVEYNGGFHLAIDVDLVFGKSAYLFVKLSRVVGRLRLVFTRVPFTHWFFSFVEDPLIDFEVRSQFEGRPMPQLTSIIVNQLKKIIKRKHTLPNYKIRFKPFFPYQTLQGFEEDEEHIHIQQWALTEGRLKVTLLECSRLLIFGSYDREANVHCTLELSSSVWEEKQRSSIKTVELIKGNLQSVGLTLRLVQSTDGYAGHVIIETVAPNSPAAIADLQRGDRLIAIGGVKITSTLQVLKLIKQAGDRVLVYYERPVGQSNQGAVLQDNFGQLEENFLSSSCQSGYEEEAAGLTVDTESRELDSEFEDLASDVRAQNEFKDEAQSLSHSPKRVPTTLSIKPLGAISPVLNRKLAVGSHPLPPKIQSKDGNKPPPLKTSEITDPAQVSKPTQGSAFKPPVPPRPQAKVPLPSADAPNQAEPDVLVEKPEKVVPPPLVDKSAEKQAKNVDAIDDAAAPKQFLAKQEVAKDVTSETSCPTKDSSDDRQTWESSEILYRNKLGKWTRTRASCLFDIEACHRYLNIALWCRDPFKLGGLICLGHVSLKLEDVALGCLATSNTEYLSKLRLEAPSPKAIVTRTALRNLSMQKGFNDKFCYGDITIHFKYLKEGESDHHVVTNVEKEKEPHLVEEVSVLPKEEQFVGQMGLTENKHSFQDTQFQNPTWCDYCKKKVWTKAASQCMFCAYVCHKKCQEKCLAETSVCGATDRRIDRTLKNLRLEGQETLLGLPPRVDAEASKSVNKTTGLTRHIINTSSRLLNLRQVSKTRLSEPGTDLVEPSPKHTPNTSDNEGSDTEVCGPNSPSKRGNSTGIKLVRKEGGLDDSVFIAVKEIGRDLYRGLPTEERIQKLEFMLDKLQNEIDQELEHNNSLVREEKETTDTRKKSLLSAALAKSGERLQALTLLMIHYRAGIEDIETLESLSLDQHSKKISKYTDDTEEDLDNEISQLIDSQPFSSISDDLFGPSESV

SEQ ID NO: 5854 - protein, 384 aa, Homo sapiens
MEVSGHPQARRCCPEALGKLFPGLCFLCFLVTYALVGAVVFSAIEDGQVLVAADDGEFEKFLEELCRILNCSETVVEDRKQDLQGHLQKVKPQWFNRTTHWSFLSSLFFCCTVFSTVGYGYIYPVTRLGKYLCMLYALFGIPLMFLVLTDTGDILATILSTSYNRFRKFPFFTRPLLSKWCPKSLFKKKPDPKPADEAVPQIIISAEELPGPKLGTCPSRPSCSMELFERSHALEKQNTLQLPPQAMERSNSCPELVLGRLSYSIISNLDEVGQQVERLDIPLPIIALIVFAYISCAAAILPFWETQLDFENAFYFCFVTLTTIGFGDTVLEHPNFFLFFSIYIIVGMEIVFIAFKLVQNRLIDIYKNVMLFFAKGKFYHLVKK

SEQ ID NO: 5855 - protein, 759 aa, Homo sapiens
MAEGEDMQTFTSIMDALVRISTSMKNMEKELLCPVCQEMYKQPLVLPCTHNVCQACAREVLGQQGYIGHGGDPSSEPTSPASTPSTRSPRLSRRTLPKPDRLDRLLKSGFGTYPGRKRGALHPQVIMFPCPACQGDVELGERGLAGLFRNLTLERVVERYRQSVSVGGAILCQLCKPPPLEATKGCTECRATFCNECFKLFHPWGTQKAQHEPTLPTLSFRPKGLMCPDHKEEVTHYCKTCQRLVCQLCRVRRTHSGHKITPVLSAYQALKDKLTKSLTYILGNQDTVQTQICELEEAVRHTEVSGQQAKEEVSQLVRGLGAVLEEKRASLLQAIEECQQERLARLSAQIQEHRSLLDGSGLVGYAQEVLKETDQPCFVQAAKQLHNRIARATEALQTFRPAASSSFRHCQLDVGREMKLLTELNFLRVPEAPVIDTQRTFAYDQIFLCWRLPPHSPPAWHYTVEFRRTDVPAQPGPTRWQRREEVRGTSALLENPDTGSVYVLRVRGCNKAGYGEYSEDVHLHTPPAPVLHFFLDSRWGASRERLAISKDQRAVRSVPGLPLLLAADRLLTGCHLSVDVVLGDVAVTQGRSYWACAVDPASYLVKVGVGLESKLQESFQGAPDVISPRYDPDSGHDSGAEDATVEASPPFAFLTIGMGKILLGSGASSNAGLTGRDGPTAGCTVPLPPRLGICLDYERGRVSFLDAVSFRGLLECPLDCSGPVCPAFCFIGGGAVQLQEPVGTKPERKVTIGGFAKLD

SEQ ID NO: 5856 - protein, 516 aa, Homo sapiens
MPTNGLHQVLKIQFGLVNDTDRYLTAESFGFKVNASAPSLKRKQTWVLEPDPGQGTAVLLRSSHLGRYLSAEEDGRVACEAEQPGRDCRFLVLPQPDGRWVLRSEPHGRFFGGTEDQLSCFATAVSPAELWTVHLAIHPQAHLLSVSRRRYVHLCPREDEMAADGDKPWGVDALLTLIFRSRRYCLKSCDSRYLRSDGRLVWEPEPRACYTLEFKAGKLAFKDCDGHYLAPVGPAGTLKAGRNTRPGKDELFDLEESHPQVVLVAANHRYVSVRQGVNVSANQDDELDHETFLMQIDQETKKCTFYSSTGGYWTLVTHGGIHATATQVSANTMFEMEWRGRRVALKASNGRYVCMKKNGQLAAISDFVGPPPRPAWTGKVAGGAAQQTLSPPGKDEEFTLKLINRPILVLRGLDGFVCHHRGSNQLDTNRSVYDVFHLSFSDGAYRIRGRDGGFWYTGSHGSVCSDGERAEDFVFEFRERGRLAIRARSGKYLRGGASGLLRADADAPAGTALWEY

SEQ ID NO: 5857 - protein, 446 aa, Homo sapiens
MAVNPLLTPTGQQTIPLIPSPFGPPTVDRDVLPSTVAPTDPRQFCVPSQFGSSVLPNTNMANVLSSRIYPGWGILPPESIKAVARRNEMIQRHHTARTEMEMYAIYQQRRMEKINPKGLAGLGIPFLYGSSVPAAPAAYHGRSMLPAGDLHFHRSTLRNLQGNPMLAATAPHFEESWGQRCRRLRKNTGNQKALDSDAESSKSQAEEKILGQTHAVPYEEDHYAKDPDIEAPSNQKSSETNEKPTTALANTCGELEPTHRKPWGSHTTTLKAKAWDDGKEEASEQIFATCDEKNGVCPPVPRPSLPGTHALVTIGGNLSLDEDIQKWTVDDVHSFIRSLPGCSDYAQVFKDHAIDGETLPLLTEEHLRGTMGLKLGPALKIQSQVSQHVGSMFYKKTLSFPIRQAFDQPADTSPLLDPNSWSDTMNIFCPQDTIIPKGIERGSMRN

SEQ ID NO: 5858 - protein, 1250 aa, Homo sapiens
MEASRRFPEAEALSPEQAAHYLRYVKEAKEATKNGDLEEAFKLFNLAKDIFPNEKVLSRIQKIQEALEELAEQGDDEFTDVCNSGLLLYRELHNQLFEHQKEGIAFLYSLYRDGRKGGILADDMGLGKTVQIIAFLSGMFDASLVNHVLLIMPTNLINTWVKEFIKWTPGMRVKTFHGPSKDERTRNLNRIQQRNGVIITTYQMLINNWQQLSSFRGQEFVWDYVILDEAHKIKTSSTKSAICARAIPASNRLLLTGTPIQNNLQELWSLFDFACQGSLLGTLKTFKMEYENPITRAREKDATPGEKALGFKISENLMAIIKPYFLRRTKEDVQKKKSSNPEARLNEKNPDVDAICEMPSLSRKNDLIIWIRLVPLQEEIYRKFVSLDHIKELLMETRSPLAELGVLKKLCDHPRLLSARACCLLNLGTFSAQDGNEGEDSPDVDHIDQVTDDTLMEESGKMIFLMDLLKRLRDEGHQTLVFSQSRQILNIIERLLKNRHFKTLRIDGTVTHLLEREKRINLFQQNKDYSVFLLTTQVGGVGLTLTAATRVVIFDPSWNPATDAQAVDRVYRIGQKENVVVYRLITCGTVEEKIYRRQVFKDSLIRQTTGEKKNPFRYFSKQELRELFTIEDLQNSVTQLQLQSLHAAQRKSDIKLDEHIAYLQSLGIAGISDHDLMYTCDLSVKEELDVVEESHYIQQRVQKAQFLVEFESQNKEFLMEQQRTRNEGAWLREPVFPSSTKKKCPKLNKPQPQPSPLLSTHHTQEEDISSKMASVVIDDLPKEGEKQDLSSIKVNVTTLQDGKGTGSADSIATLPKGFGSVEELCTNSSLGMEKSFATKNEAVQKETLQEGPKQEALQEDPLESFNYVLSKSTKADIGPNLDQLKDDEILRHCNPWPIISITNESQNAESNVSIIEIADDLSASHSALQDAQASEAKLEEEPSASSPQYACDFNLFLEDSADNRQNFSSQSLEHVEKENSLCGSAPNSRAGFVHSKTCLSWEFSEKDDEPEEVVVKAKIRSKARRIVSDGEDEDDSFKDTSSINPFNTSLFQFSSVKQFDASTPKNDISPPGRFFSSQIPSSVNKSMNSRRSLASRRSLINMVLDHVEDMEERLDDSSEAKGPEDYPEEGVEESSGEASKYTEEDPSGETLSSENKSSWLMTSKPSALAQETSLGAPEPLSGEQLVGSPQDKAAEATNDYETLVKRGKELKECGKIQEALNCLVKALDIKSADPEVMLLTLSLYKQLNNN

SEQ ID NO: 5859 - protein, 644 aa, Homo sapiens
MTSQSSVISNSCVTMERLSHMMERKAWCSQESALSEEEEDTTRPLETVTFKDVAVDLTQEEWEQMKPAQRNLYRDVMLENYSNLVTVGCQVTKPDVIFKLEQEEEPWVMEEEMFGRHCPEVWEVDEQIKKQQETLVRKVTSISKKILIKEKVIECKKVAKIFPLSSDIVTSRQSFYDCDSLDKGLEHNLDLLRYEKGCVREKQSNEFGKPFYHCASYVVTPFKCNQCGQDFSHKFDLIRHERIHAGEKPYECKECGKAFSRKENLITHQKIHTGEKPYKCNECGKAFIQMSNLIRHHRIHTGEKPYACKDCWKAFSQKSNLIEHERIHTGEKPYECKECGKSFSQKQNLIEHEKIHTGEKPYACNECGRAFSRMSSVTLHMRSHTGEKPYKCNKCGKAFSQCSVFIIHMRSHTGEKPYVCSECGKAFSQSSSLTVHMRNHTAEKPYECKECGKAFSRKENLITHQKIHTGEKPYECSECGKAFIQMSNLIRHQRIHTGEKPYACTVCGKAFSQKSNLTEHEKIHTGEKPYHCNQCGKAFSQRQNLLEHEKIHTGEKPFKCNECGKAFSRISSLTLHVRSHTGEKPYECNKCGKAFSQCSLLIIHMRSHTGEKPFECNECGKAFSQRASLSIHKRGHTGERHQVY

SEQ ID NO: 5860 - protein, 458 aa, Homo sapiens
MESSKLCGLEGSIFRNDWQSKSKIDLQGPEVGYFSQMKIISENVPSYKTHESLTLPRRTHDSEKPYEYKEYEKVFSCDLEFDEYQKIHTGGKNYECNQCWKTFGIDNSSMLQLNIHTGVKPCKYMEYGNTCSFYKDFNVYQKIHNEKFYKCKEYRRTFERVGKVTPLQRVHDGEKHFECSFCGKSFRVHAQLTRHQKIHTDEKTYKCMECGKDFRFHSQLTEHQRIHTGEKPYKCMHCEKVFRISSQLIEHQRIHTGEKPYACKECGKAFGVCRELARHQRIHTGKKPYECKACGKVFRNSSSLTRHQRIHTGEKPYKCKECEKAFGVGSELTRHERIHSGQKPYECKECGKFFRLTSALIQHQRIHSGEKPYECKVCGKAFRHSSALTEHQRIHTGEKPYECKACGKAFRHSSSFTKHQRIHTDDKPYECKECGNSFSVVGHLTCQPKIYTGEKSFD

SEQ ID NO: 5861 - protein, 839 aa, Homo sapiens
MGWVGGRRRDSASPPGRSRSAADDINPAPANMEGGGGSVAVAGLGARGSGAAAATVRELLQDGCYSDFLNEDFDVKTYTSQSIHQAVIAEQLAKLAQGISQLDRELHLQVVARHEDLLAQATGIESLEGVLQMMQTRIGALQGAVDRIKAKIVEPYNKIVARTAQLARLQVACDLLRRIIRILNLSKRLQGQLQGGSREITKAAQSLNELDYLSQGIDLSGIEVIENDLLFIARARLEVENQAKRLLEQGLETQNPTQVGTALQVFYNLGTLKDTITSVVDGYCATLEENINSALDIKVLTQPSQSAVRGGPGRSTMPTPGNTAALRASFWTNMEKLMDHIYAVCGQVQHLQKVLAKKRDPVSHICFIEEIVKDGQPEIFYTFWNSVTQALSSQFHMATNSSMFLKQAFEGEYPKLLRLYNDLWKRLQQYSQHIQGNFNASGTTDLYVDLQHMEDDAQDIFIPKKPDYDPEKALKDSLQPYEAAYLSKSLSRLFDPINLVFPPGGRNPPSSDELDGIIKTIASELNVAAVDTNLTLAVSKNVAKTIQLYSVKSEQLLSTQGDASQVIGPLTEGQRRNVAVVNSLYKLHQSVTKAIHALMENAVQPLLTSVGDAIEAIIITMHQEDFSGSLSSSGKPDVPCSLYMKELQGFIARVMSDYFKHFECLDFVFDNTEAIAQRAVELFIRHASLIRPLGEGGKMRLAADFAQMELAVGPFCRRVSDLGKSYRMLRSFRPLLFQASEHVASSPALGDVIPFSIIIQFLFTRAPAELKSPFQRAEWSHTRFSQWLDDHPSEKDRLLLIRGALEAYVQSVRSREGKEFAPVYPIMVQLLQKAMSALQ

SEQ ID NO: 5862 - protein, 3708 aa, Homo sapiens
MAGKLRKSHIPGVSIWQLVEEIPEGCSTPDFEQKPVTSALPEGKNAVFRAVVCGEPRPEVRWQNSKGDLSDSSKYKISSSPGSKEHVLQINKLTGEDTDLYRCTAVNAYGEAACSVRLTVIEVGFRKNRKRHREPQEDLRKELMDFRKLLKKRAPPAPKKKMDLEQIWQLLMTADRKDYEKICLKYGIVDYRGMLRRLQEMKKEQEDKMAQYINTISSLRHIRVTKDGNAKFDLELDLKDSQSKIYLYKDGEMIPYGFNNQTKHCLRRLGKRYEFQIQDLRPEDSGIYQVKVEDAVVFSTELEASAIPPRVVVPLAETHCEEQGDAVFECTLSSPCPSAAWHFRHRLLHPSDKYEVYVSPDGLTHRLVVRGARFSDMGPYSLGTGLYTSSAWLVVEAGKDKDLQSTSADHKLQRQGAQASGAEESGSIESQGEKSREQGPRGGSLEGAGPASGLQHIASPDRDGLGRHGYSLMGDKGTADSAWGPGQEGEGFPVAEGSRATLPRENQSHREGGWARSLAERPHLQGESSESGLGLPEKQQQDRGRDSNSDECWRKAGGWEAGSSRLQAGGLGSSREGKEHRGDSGRQLDRHAPEQLWDARLGPGRGKSDLQGCQSDPVGSWPRGKQIEISQDDSLAEMDRGDAPSRERGRGIVVWGGGTGLGEAGDSNGAGGPGTLELTGGRGSGSKVGMAPESWGSQGGRDADYGEARGYWGSGELLEQIPGGKDFQEPSISGGRKFLLGDGSPEIKAEDSLQEADGICRGESVVTGSAYKTGPGGPGDPRGCEGVLQELRGRDGQETAWASGEVEYDPRSFQSSQGWTAGHRAAGGIGRIESKGTSPWDDTPSSLRKTGAHHGPGVLGPSGGQEGMGGIWVAGLTESGQGVDARSHWLSRAPGLGAQGSGGTLGDKKGLRGPGSIGSEPDFWNGSGSSRVKGPRGETGYKDGLEGPGRMESRYEGGLGYSREISSKSGAGYSYGSGVPGEMGSGHGAGCRVSPRAPAGVESEEGGGYRHGSGAPGGVWSGNEDSGPAGGGSGRVASLKNGSGGPDGAPMNDTRNWASACQAGMDPRGGHHSDGGLGSPGVTGSAGRGGLKAPGVVETVGMGCVEAEPESSGRIRPWGQTGNYGGFRASEALGAFGEGGYEDGSGGPGAMGPGSLRAGSKVGEGDGTRCPGAKASGAGAGYRDDTRHPESLAPHNGAASGSQWAYGAGNVLGYEDGSELPGPQGTGVRTAYGERSRGLGPRSTGPGGEAGFRDGSGGLQGMGSADGPGCRKGIGSSGEMGSVDKEGYKKDLGAPENMGSGSKADYRDGVGGSGAMGSMDEAGYRKDLGAPEGISSGSKADYRGGLQDSREAGSGSKADYSGGLKGSREIGSMDETDNRKDLGVPEGMGAGYRAGLRGPGEMGSLDESGHRNGIGGYGEMGSGYREDLGAPEGMGTGSKAGYRDGLRGSGEMRSMDEAGYRKNLGAPERMDSGSKAGYRGGLRGSGEMGLIEAGYRKDLGVSEGGGSGSKAGYRGGLGSGEMGSVDKAGYRKDLGASEAIGSGSKAGFTDGLGGSEEMGSVNKAGYRKDLGAPKGMGSGSKASFRDGLGGSGEMGSVNEAGYRKDLGVPEGIGSGSKAGFRDGLGGSEEMGSVNKAGYRKDLGAPKGIGSGSKAGFRDGLGSSGEMGSMDEAGYRKNLGAPEGIGSGSKAGFRDGLGSSVEMGSVNEAGYRKDLGAPEGMGSGSKAGFRDGLGGSGEMGSVNEAGYRKDLGAPKGIGSGSKADFRDALGSSGEMGSMDEAGYRKDLWAPEGIGSGSKAGFRDGLGSSVEMGSVNEAGYRKDLGAPEGMGSGSKAGFRDGLGGSGEMGSVNEAGYRKDLGAPKGIGSGSKADFRDALGSSGEMGSMDEAGYRKDLWAPEGIGSGSKAGFRDGLGSSVEMGSVNEAGYRKDLGAPEGMGSGSKEGFRDGLGGSEEMGSVNKAGYRKDLGAPKGMGSGSKEGFRDGLGGSEEMGSMDEAGYRKDLGAPEGIGSGSKAGFRDGLGGSEEMRSMDEAGYRKDLGAPERIGSGSKAGFRDGLGSSVEMGSVNEAGYRKDLGAPKGMGSGSKTGFRDGLGGSEEMESMDEAGYRKDLGAPEGIGSGSKAGFRDGLGSSTEMGSVNEAGYRKDLGAPKGMGSESKAGFRDGLGSSGEMGSMDEAGYRKDLGAPEGMGSGSKAGFRDGLGGSEEMGSVNKAGYRKDLGAPKGMGSGSKAGFRDGLGSSGEMGSMDEADYRKDLGAPEEMGSGSYTDYRNGLGSSGKISSGDEAGYKNVLGGSGRNPLGSEAGSRGSLEDSGYILSWNEAGSRQGFGGTSGMGSGSEVSYRGGSGGSGETGPEGKMGYGDGSGRLGVPGSLAGIGHEAGPRGHKAMGHRSGYWVASEGDTNSKDGPERARETRLVDGAGPGVEPGMAGMPGTAGGMAHRDSLRGTGVLGSQGGRQTLSDERGSTKDLGGYGTSGIPEASEAAGAKGKPDVKEWQDSSGTPGSSRDRGAPRVKDRSPDQAGIMGASGFLDGKGAVEGETWAGMAALGSGYERDIWKAGPGMTDRGRVAGQGGLASQGGGDSLLGGRRVGSGSSVGTGQDLDSGSMPGGRGKSTSGPADRQGTSNAWAPDWENQGFSQGSIDAGKQPAGSRASGSLQEKDAAFGGTHEGPGGFKGGEGAPGQEAAGGCRSPWSLDSKGSSPGRGSSVDAEDSGILGKGNSTEWGNALTPKPGESGPQGAWNGLDGPFGRKASRDRSGGTQDLSSQRGKGQRGGKRSLGEQGSLEAENGEVQGPGALKEDEGQGVEEAGRSGRRPGSLRSRSQAQSGAEVGGGKRRGADEAGSMGWQPMGENWGCLEEMLNEDQSREPPGHLGSRRSGKDGRLDIYGERRDATRSSTSRYKPGTGSFSKDAQGPMGHFSQGLADMEVQPGEAATLSCTLTSDLGPGTWFKDGVKLTTQDGVIFKQDGLVHSLFITHVQGTQAGRYTFVAGDQQSEATLTVQDSPTIAPDVTEKLREPLVVKAGKPVIVKIPFQSHLPIQAAWRKDGAEVVGSSDREAQVDLGDGYTRLCLPSAGRKDCGQYSVTLRSEGGSVQAELTLQVIDKPDPPQGPMEVQDCHRAGVCLRWRPPRDNGGRTVECYVVERRQAGRSTWLKVGEAPADSTTFTDAHVEPGRKYTFRVRAVTSEGAGEALESEEILVAPEALPKAPSAPAILSASSQGITLTWTAPRGPGSAHILGYLIERRKKGSNTWTAVNDQPVPERRWTVADVRQGCQYEFRVTAVAPSGPGEPGPPSDAVFARDPMRPPGLVRNLQVTDRSNTSITLSWAGPDTQEGDEAQGYVVELCSSDSLQWLPCHVGTVPVTTYTAKGLRPGEGYFVRVTAVNEGGQSQPSALDTLVQAMPVTVCPKFLVDSSTKDLLTVKVGDTVRVPVSFEAMPMPEVTWLKDGLPLPKRSVTVTKDGLTQLLIPVAGLSDSGLYTVVLRTLQGKEVAHSFRIRVAACPQAPGPIHLQENVPGTVTAEWEPSPDEAQDVPLHYAVFTRSSAHGPWHEAADRIHTNRFTLLGILPGHEYHFRVVAKNELGASKPSDTSQPWCIPRQRDRFTVKAPCYREPDLSQKPRFLVGLRSHLLPQGCECCMSCAVQGSPRPHVTWFKNDRSLEGNPAVYSTDLLGVCSLTIPSVSPKDSGEYKAVAENTLGQAVSTATLIVIEPST

SEQ ID NO: 5863 - protein, 317 aa, Homo sapiens
MRNLSGGHVEEFVLVGFPTTPPLQLLLFVLFFAIYLLTLLENALIVFTIWLAPSLHRPMYFFLGHLSFLELWYINVTIPRLLAAFLTQDGRVSYVGCMTQLYFFIALACTECVLLAVMAYDRYLAICGPLLYPSLMPSSLATRLAAASWGSGFFSSMMKLLFISQLSYCGPNIINHFFCDISPLLNLTCSDKEQAELVDFLLALVMILLPLLAVVSSYTAIIAAILRIPTSRGRHKAFSTCAAHLAVVVIYYSSTLFTYARPRAMYTFNHNKIISVLYTIIVPFFNPAIYCLRNKEVKEAFRKTVMGRCHYPRDVQD

SEQ ID NO: 5864 - protein, 618 aa, Homo sapiens
MKKDVRILLVGEPRVGKTSLIMSLVSEEFPEEVPPRAEEITIPADVTPERVPTHIVDYSEAEQSDEQLHQEISQANVICIVYAVNNKHSIDKVTSRWIPLINERTDKDSRLPLILVGNKSDLVEYSSMETILPIMNQYTEIETCVECSAKNLKNISELFYYAQKAVLHPTGPLYCPEEKEMKPACIKALTRIFKISDQDNDGTLNDAELNFFQRICFNTPLAPQALEDVKNVVRKHISDGVADSGLTLKGFLFLHTLFIQRGRHETTWTVLRRFGYDDDLDLTPEYLFPLLKIPPDCTTELNHHAYLFLQSTFDKHDLDRDCALSPDELKDLFKVFPYIPWGPDVNNTVCTNERGWITYQGFLSQWTLTTYLDVQRCLEYLGYLGYSILTEQESQASAVTVTRDKKIDLQKKQTQRNVFRCNVIGVKNCGKSGVLQALLGRNLMRQKKIREDHKSYYAINTVYVYGQEKYLLLHDISESEFLTEAEIICDVVCLVYDVSNPKSFEYCARIFKQHFMDSRIPCLIVAAKSDLHEVKQEYSISPTDFCRKHKMPPPQAFTCNTADAPSKDIFVKLTTMAMYPHVTQADLKSSTFWLRASFGATVFAVLGFAMYKALLKQR

SEQ ID NO: 5865 - protein, 492 aa, Homo sapiens
MKMTFYGHFVAGEDQESIQPLLRHYRAFGVSAILDYGVEEDLSPEEAEHKEMESCTSAAERDGSGTNKRDKQYQAHWAFGDRRNGVISARTYFYANEAKCDSHMETFLRCIEASGRVSDDGFIAIKLTALGRPQFLLQFSEVLAKWRCFFHQMAVEQGQAGLAAMDTKLEVAVLQESVAKLGIASRAEIEDWFTAETLGVSGTMDLLDWSSLIDSRTKLSKHLVVPNAQTGQLEPLLSRFTEEEELQMTRMLQRMDVLAKKATEMGVRLMVDAEQTYFQPAISRLTLEMQRKFNVEKPLIFNTYQCYLKDAYDNVTLDVELARREGWCFGAKLVRGAYLAQERARAAEIGYEDPINPTYEATNAMYHRCLDYVLEELKHNAKAKVMVASHNEDTVRFALRRMEELGLHPADHRVYFGQLLGMCDQISFPLGQAGYPVYKYVPYGPVMEVLPYLSRRALENSSLMKGTHRERQLLWLELLRRLRTGNLFHRPA

SEQ ID NO: 5866 - protein, 1690 aa, Homo sapiens
MHPGLWLLLVTLCLTEELAAAGEKSYGKPCGGQDCSGSCQCFPEKGARGRPGPIGIQGPTGPQGFTGSTGLSGLKGERGFPGLLGPYGPKGDKGPMGVPGFLGINGIPGHPGQPGPRGPPGLDGCNGTQGAVGFPGPDGYPGLLGPPGLPGQKGSKGDPVLAPGSFKGMKGDPGLPGLDGITGPQGAPGFPGAVGPAGPPGLQGPPGPPGPLGPDGNMGLGFQGEKGVKGDVGLPGPAGPPPSTGELEFMGFPKGKKGSKGEPGPKGFPGISGPPGFPGLGTTGEKGEKGEKGIPGLPGPRGPMGSEGVQGPPGQQGKKGTLGFPGLNGFQGIEGQKGDIGLPGPDVFIDIDGAVISGNPGDPGVPGLPGLKGDEGIQGLRGPSGVPGLPALSGVPGALGPQGFPGLKGDQGNPGRTTIGAAGLPGRDGLPGPPGPPGPPSPEFETETLHNKESGFPGLRGEQGPKGNLGLKGIKGDSGFCACDGGVPNTGPPGEPGPPGPWGLIGLPGLKGARGDRGSGGAQGPAGAPGLVGPLGPSGPKGKKGEPILSTIQGMPGDRGDSGSQGFRGVIGEPGKDGVPGLPGLPGLPGDGGQGFPGEKGLPGLPGEKGHPGPPGLPGNGLPGLPGPRGLPGDKGKDGLPGQQGLPGSKGITLPCIIPGSYGPSGFPGTPGFPGPKGSRGLPGTPGQPGSSGSKGEPGSPGLVHLPELPGFPGPRGEKGLPGFPGLPGKDGLPGMIGSPGLPGSKGATGDIFGAENGAPGEQGLQGLTGHKGFLGDSGLPGLKGVHGKPGLLGPKGERGSPGTPGQVGQPGTPGSSGPYGIKGKSGLPGAPGFPGISGHPGKKGTRGKKGPPGSIVKKGLPGLKGLPGNPGLVGLKGSPGSPGVAGLPALSGPKGEKGSVGFVGFPGIPGLPGIPGTRGLKGIPGSTGKMGPSGRAGTPGEKGDRGNPGPVGIPSPRRPMSNLWLKGDKGSQGSAGSNGFPGPRGDKGEAGRPGPPGLPGAPGLPGIIKGVSGKPGPPGFMGIRGLPGLKGSSGITGFPGMPGESGSQGIRGSPGLPGASGLPGLKGDNGQTVEISGSPGPKGQPGESGFKGTKGRDGLIGNIGFPGNKGEDGKVGVSGDVGLPGAPGFPGVAGMRGEPGLPGSSGHQGAIGPLGSPGLIGPKGFPGFPGLHGLNGLPGTKGTHGTPGPSITGVPGPAGLPGPKGEKGYPGIGIGAPGKPGLRGQKGDRGFPGLQGPAGLPGAPGISLPSLIAGQPGDPGRPGLDGERGRPGPAGPPGPPGPSSNQGDTGDPGFPGIPGPKGPKGDQGIPGFSGLPGELGLKGMRGEPGFMGTPGKVGPPGDPGFPGMKGKAGPRGSSGLQGDPGQTPTAEAVQVPPGPLGLPGIDGIPGLTGDPGAQGPVGLQGSKGLPGIPGKDGPSGLPGPPGALGDPGLPGLQGPPGFEGAPGQQGPFGMPGMPGQSMRVGYTLVKHSQSEQVPPCPIGMSQLWVGYSLLFVEGQEKAHNQDLGFAGSCLPRFSTMPFIYCNINEVCHYARRNDKSYWLSTTAPIPMMPVSQTQIPQYISRCSVCEAPSQAIAVHSQDITIPQCPLGWRSLWIGYSFLMHTAAGAEGGGQSLVSPGSCLEDFRATPFIECSGARGTCHYFANKYSFWLTTVEERQQFGELPVSETLKAGQLHTRVSRCQVCMKSL

SEQ ID NO: 5867 - protein, 423 aa, Homo sapiens
MENKKKDKDKSDDRMARPSGRSGHNTRGTGSSSSGVLMVGPNFRVGKKIGCGNFGELRLGKNLYTNEYVAIKLEPMKSRAPQLHLEYRFYKQLGSGDGIPQVYYFGPCGKYNAMVLELLGPSLEDLFDLCDRTFSLKTVLMIAIQLISRMEYVHSKNLIYRDVKPENFLIGRPGNKTQQVIHIIDFGLAKEYIDPETKKHIPYREHKSLTGTARYMSINTHLGKEQSRRDDLEALGHMFMYFLRGSLPWQGLKADTLKERYQKIGDTKRATPIEVLCENFPEMATYLRYVRRLDFFEKPDYDYLRKLFTDLFDRKGYMFDYEYDWIGKQLPTPVGAVQQDPALSSNREAHQHRDKMQQSKNQVVSSTNGELNTDDPTAGRSNAPITAPTEVEVMDETNCQKVLNMWCCCFFKRRKRKTIQRHK

SEQ ID NO: 5868 - protein, 468 aa, Homo sapiens
MSFRLSGGSRRICSRTGSGRLSGGGTGFVAGNVCVGSGARSSFSCTLEGISSGGSFCNSGGGLGSGACAGFLGNEHSLLSGNEKVTMQNLNDRLASYLDHVHALEEANADLEQKIKGWYEKCEPGSSREHDHDYSRYFSVIEDLKRQIISATICNASIVLQNDNARLTADDFRLKYENELALHHSVEADTSGLRRVLDELTLCTTDLEIQCETLSEELTYLKKSHEEEMEVLQYTAGGNVNVEMNATPGVDLTVLLNNMRAEYEDLAEQNRKDAEAWFNERSATLQQQISDHEGAATAARNELTELKRNLQTLEIELQSLMAVKHSYECSLAETEGNYCNQLQQIQDQIGVMEEQLQQIRTETEGQKLEYEQLLDVKIFLEKEIDIYCNLLDGEERKSKSTCYKSKGYRPVNSGNQAKDSTEETIVKTVVEELDQIGNLLSLRVHSVEEKSSKISNITVEQRVPSKAP

SEQ ID NO: 5869 - protein, 823 aa, Homo sapiens
MGKKRTKGKTVPIDDSSETLEPVCRHIRKGLEQGNLKKALVNVEWNICQDCKTDNKVKDKAEEETEEKPSVWLCLKCGHQGCGRNSQEQHALKHYLTPRSEPHCLVLSLDNWSVWCYVCDNEVQYCSSNQLGQVVDYVRKQASITTPKPAEKDNGNIELENKKLEKESKNEQEREKKENMAKENPPMNSPCQITVKGLSNLGNTCFFNAVMQNLSQTPVLRELLKEVKMSGTIVKIEPPDLALTEPLEINLEPPGPLTLAMSQFLNEMQETKKGVVTPKELFSQVCKKAVRFKGYQQQDSQELLRYLLDGMRAEEHQRVSKGILKAFGNSTEKLDEELKNKVKDYEKKKSMPSFVDRIFGGELTSMIMCDQCRTVSLVHESFLDLSLPVLDDQSGKKSVNDKNLKKTVEDEDQDSEEEKDNDSYIKERSDIPSGTSKHLQKKAKKQAKKQAKNQRRQQKIQGKVLHLNDICTIDHPEDSEYEAEMSLQGEVNIKSNHISQEGVMHKEYCVNQKDLNGQAKMIESVTDNQKSTEEVDMKNINMDNDLEVLTSSPTRNLNGAYLTEGSNGEVDISNGFKNLNLNAALHPDEINIEILNDSHTPGTKVYEVVNEDPETAFCTLANREVFNTDECSIQHCLYQFTRNEKLRDANKLLCEVCTRRQCNGPKANIKGERKHVYTNAKKQMLISLAPPVLTLHLKRFQQAGFNLRKVNKHIKFPEILDLAPFCTLKCKNVAEENTRVLYSLYGVVEHSGTMRSGHYTAYAKARTANSHLSNLVLHGDIPQDFEMESKGQWFHISDTHVQAVPTTKVLNSQAYLLFYERIL

SEQ ID NO: 5870 - protein, 346 aa, Homo sapiens
MHLPGCAPAMADGSFSLAGHLLRSPGGSTSRLHSIEAILGFTKDDGILGTFPAERGARGAKERDRRLGARPACPKAPEEGSEPSPPPAPAPAPEYEAPRPYCPKEPGEARPSPGLPVGPATGEAKLSEEEQPKKKHRRNRTTFTTYQLHELERAFEKSHYPDVYSREELAGKVNLPEVRVQVWFQNRRAKWRRQEKLEVSSMKLQDSPLLSFSRSPPSATLSPLGAGPGSGGGPAGGALPLESWLGPPLPGGGATALQSLPGFGPPAQSLPASYTPPPPPPPFLNSPPLGPGLQPLAPPPPSYPCGPGFGDKFPLDEADPRNSSIAALRLKAKEHIQAIGKPWQAL

SEQ ID NO: 5871 - protein, 2966 aa, Homo sapiens
EIEKGGCGDPGIPAYGKRTGSSFLHGDTLTFECPAAFELVGERVITCQQNNQWSGNKPSCVFSCFFNFTASSGIILSPNYPEEYGNNMNCVWLIISEPGSRIHLIFNDFDVEPQFDFLAVKDDGISDITVLGTFSGNEVPSQLASSGHIVRLEFQSDHSTTGRGFNITYTTFGQNECHDPGIPINGRRFGDRFLLGSSVSFHCDDGFVKTQGSESITCILQDGNVVWSSTVPRCEAPCGGHLTASSGVILPPGWPGYYKDSLHCEWIIEAKPGHSIKITFDRFQTEVNYDTLEVRDGPASSSPLIGEYHGTQAPQFLISTGNFMYLLFTTDNSRSSIGFLIHYESVTLESDSCLDPGIPVNGHRHGGDFGIRSTVTFSCDPGYTLSDDEPLVCERNHQWNHALPSCDALCGGYIQGKSGTVLSPGFPDFYPNSLNCTWTIEVSHGKGVQMIFHTFHLESSHDYLLITEDGSFSEPVARLTGSVLPHTIKAGLFGNFTAQLRFISDFSISYEGFNITFSEYDLEPCDDPGVPAFSRRIGFHFGVGDSLTFSCFLGYRLEGATKLTCLGGGRRVWSAPLPRCVAECGASVKGNEGTLLSPNFPSNYDNNHECIYKIETEAGKGIHLRTRSFQLFEGDTLKVYDGKDSSSRPLGTFTKNELLGLILNSTSNHLWLEFNTNGSDTDQGFQLTYTSFDLVKCEDPGIPNYGYRIRDEGHFTDTVVLYSCNPGYAMHGSNTLTCLSGDRRVWDKPLPSCIAECGGQIHAATSGRILSPGYPAPYDNNLHCTWIIEADPGKTISLHFIVFDTEMAHDILKVWDGPVDSDILLKEWSGSALPEDIHSTFNSLTLQFDSDFFISKSGFSIQFSTSIAATCNDPGMPQNGTRYGDSREAGDTVTFQCDPGYQLQGQAKITCVQLNNRFFWQPDPPTCIAACGGNLTGPAGVILSPNYPQPYPPGKECDWRVKVNPDFVIALIFKSFNMEPSYDFLHIYEGEDSNSPLIGSYQGSQAPERIESSGNSLFLAFRSDASVGLSGFAIEFKEKPREACFDPGNIMNGTRVGTDFKLGSTITYQCDSGYKILDPSSITCVIGADGKPSWDQVLPSCNAPCGGQYTGSEGVVLSPNYPHNYTAGQICLYSITVPKEFVVFGQFAYFQTALNDLAELFDGTHAQARLLSSLSGSHSGETLPLATSNQILLRFSAKSGASARGFHFVYQAVPRTSDTQCSSVPEPRYGRRIGSEFSAGSIVRFECNPGYLLQGSTALHCQSVPNALAQWNDTIPSCVVPCSGNFTQRRGTILSPGYPEPYGNNLNCIWKIIVTEGSGIQIQVISFATEQNWDSLEIHDGGDVTAPRLGSFSGTTVPALLNSTSNQLYLHFQSDISVAAAGFHLEYKTVGLAACQEPALPSNSIKIGDRYMVNDVLSFQCEPGYTLQGRSHISCMPGTVRRWNYPSPLCIATCGGTLSTLGGVILSPGFPGSYPNNLDCTWRISLPIGYGAHIQFLNFSTEANHDFLEIQNGPYHTSPMIGQFSGTDLPAALLSTTHETLIHFYSDHSQNRQGFKLAYQAYELQNCPDPPPFQNGYMINSDYSVGQSVSFECYPGYILIGHPVLTCQHGINRNWNYPFPRCDAPCGYNVTSQNGTIYSPGFPDEYPILKDCIWLITVPPGHGVYINFTLLQTEAVNDYIAVWDGPDQNSPQLGVFSGNTALETAYSSTNQVLLKFHSDFSNGGFFVLNFHAFQLKKCQPPPAVPQAEMLTEDDDFEIGDFVKYQCHPGYTLVGTDILTCKLSSQLQFEGSLPTCEGSSGQSPLLVVLSGNHTEQSNFTSRSNQLYLRWSTDHATSKKGFKIRYAAPYCSLTHPLKNGGILNRTAGAVGSKVHYFCKPGYRMVGHSNATCRRNPLGMYQWDSLTPLCQAVSCGIPESPGNGSFTGNEFTLDSKVVYECHEGFKLESSQQATAVCQEDGLWSNKGKPPTCKPVACPSIEAQLSEHVIWRLVSGSLNEYGAQVLLSCSPGYYLEGWRLLRCQANGTWNIGDERPSCRVISCGSLSFPPNGNKIGTLTVYGATAIFTCNTGYTLVGSHVRECLANGLWSGSETRCLAGHCGSPDPIVNGHISGDGFSYRDTVVYQCNPGFRLVGTSVRICLQDHKWSGQTPVCVPITCGHPGNPAHGFTNGSEFNLNDVVNFTCNTGYLLQGVSRAQCRSNGQWSSPLPTCRVVNCSDPGFVENAIRHGQQNFPESFEYGMSILYHCKKGFYLLGSSALTCMANGLWDRSLPKCLAISCGHPGVPANAVLTGELFTYGAVVHYSCRGSESLIGNDTRVCQEDSHWSGALPHCTGNNPGFCGDPGTPAHGSRLGDDFKTKSLLRFSCEMGHQLRGSPERTCLLNGSWSGLQPVCEAVSCGNPGTPTNGMIVSSDGILFSSSVIYACWEGYKTSGLMTRHCTANGTWTGTAPDCTIISCGDPGTLANGIQFGTDFTFNKTVSYQCNPGYVMEAVTSATIRCTKDGRWNPSKPVCKAVLCPQPPPVQNGTVEGSDFRWGSSISYSCMDGYQLSHSAILSCEGRGVWKGEIPQCLPVFCGDPGIPAEGRLSGKSFTYKSEVFFQCKSPFILVGSSRRVCQADGTWSGIQPTCIDPAHNTCPDPGTPHFGIQNSSRGYEVGSTVFFRCRKGYHIQGSTTRTCLANLTWSGIQTECIPHACRQPETPAHADVRAIDLPTFGYTLVYTCHPGFFLAGGSEHRTCKADMKWTGKSPVCKIPSDVFFVNSLWKGYYEYLGKRQPATLTVDWFNATSSKVNATFSEASPVELKLTGIYKKEEAHLLLKAFQIKGQADIFVSKFENDNWGLDGYVSSGLERGGFTFQGDIHGKDFGKFKLERQDPLNPDQDSSSHYHGTSSGSVAAAILVPFFALILSGFAFYLYKHRTRPKVQYNGYAGHENSNGQASFENPMYDTNLKPTEAKAVRFDTTLNTVCTVV

SEQ ID NO: 5872 - protein, 1161 aa, Homo sapiens
MKKFSRMPKSEGGSGGGAAGGGAGGAGAGAGCGSGGSSVGVRVFAVGRHQVTLEESLAEGGFSTVFLVRTHGGIRCALKRMYVNNMPDLNVCKREITIMKELSGHKNIVGYLDCAVNSISDNVWEVLILMEYCRAGQVVNQMNKKLQTGFTEPEVLQIFCDTCEAVARLHQCKTPIIHRDLKVENILLNDGGNYVLCDFGSATNKFLNPQKDGVNVVEEEIKKYTTLSYRAPEMINLYGGKPITTKADIWALGCLLYKLCFFTLPFGESQVAICDGNFTIPDNSRYSRNIHCLIRFMLEPDPEHRPDIFQVSYFAFKFAKKDCPVSNINNSSIPSALPEPMTASEAAARKSQIKARITDTIGPTETSIAPRQRPKANSATTATPSVLTIQSSATPVKVLAPGEFGNHRPKGALRPGNGPEILLGQGPPQQPPQQHRVLQQLQQGDWRLQQLHLQHRHPHQQQQQQQQQQQQQQQQQQQQQQQQQQQHHHHHHHHLLQDAYMQQYQHATQQQQMLQQQFLMHSVYQPQPSASQYPTMMPQYQQAFFQQQMLAQHQPSQQQASPEYLTSPQEFSPALVSYTSSLPAQVGTIMDSSYSANRSVADKEAIANFTNQKNISNPPDMSGWNPFGEDNFSKLTEEELLDREFDLLRSNRLEERASSDKNVDSLSAPHNHPPEDPFGSVPFISHSGSPEKKAEHSSINQENGTANPIKNGKTSPASKDQRTGKKTSVQGQVQKGNDESESDFESDPPSPKSSEEEEQDDEEVLQGEQGDFNDDDTEPENLGHRPLLMDSEDEEEEEKHSSDSDYEQAKAKYSDMSSVYRDRSGSGPTQDLNTILLTSAQLSSDVAVETPKQEFDVFGAVPFFAVRAQQPQQEKNEKNLPQHRFPAAGLEQEEFDVFTKAPFSKKVNVQECHAVGPEAHTIPGYPKSVDVFGSTPFQPFLTSTSKSESNEDLFGLVPFDEITGSQQQKVKQRSLQKLSSRQRRTKQDMSKSNGKRHHGTPTSTKKTLKPTYRTPERARRHKKVGRRDSQSSNEFLTISDSKENISVALTDGKDRGNVLQPEESLLDPFGAKPFHSPDLSWHPPHQGLSDIRADHNTVLPGRPRQNSLHGSFHSADVLKMDDFGAVPFTELVVQSITPHQSQQSQPVELDPFGAAPFPSKQ

SEQ ID NO: 5873 - protein, 628 aa, Homo sapiens
MDSVVFEDVAVDFTLEEWALLDSAQRDLYRDVMLETFQNLASVDDETQFKASGSVSQQDIYGEKIPKESKIATFTRNVSWASVLGKIWDSLSIEDQTTNQGRNLSRNHGLERLCESNDQCGEALSQIPHLNLYKKIPPGVKQYEYNTYGKVFMHRRTSLKSPITVHTGHKPYQCQECGQAYSCRSHLRMHVRTHNGERPYVCKLCGKTFPRTSSLNRHVRIHTAEKTYECKQCGKAFIDFSSLTSHLRSHTGEKPYKCKECGKAFSYSSTFRRHTITHTGEKPYKCKECAEAFSYSSTFRRHMISHTGEKPHKCKECGEAFSYSSAFRRHMITHTGEKPYECKQCGKTFIYLQSFRRHERIHTGEKPYECKQCGKTFIYPQSFRRHERTHGGEKPYECNQCGKAFSHPSSFRGHMRVHTGEKPYECKQCGKTFNWPISLRKHMRTHTREKPYECKQCGKAFSLSACFREHVRMHPEDKSYECKLCGKAFYCHISLQKHMRRHTAEKLYKCKQCGKAFSWPELLQQHVRTHTVEKPYECKECGKVFKWPSSLPIHMRLHTGEKPYQCKHCGKAFNCSSSLRRHVRIHTTEKQYKCNVGHPPANEFMCSASEKSHQERDLIKVVNMVLPL

SEQ ID NO: 5874 - protein, 137 aa, Homo sapiens
MSYNCSSGNFSSCCFGSYLRYPVSTYNLFYPSNAIYSPNTCQLGSSLYNGCQETYCEPTSCQTSCTLARSYQTSCYCPKNSIFCSPRQTNYIRSLGCGNTGLGSLGCGSTGFQSLDCGSSFYHPTTFSSRNFQATCY

SEQ ID NO: 5875 - protein, 793 aa, Homo sapiens
MARELSQEALLDFLCQAGGRVTNAALLSHFKSFLRDPDASPSQHQHRRELFKGFVNSVAAVRQDPDGTKYVVLKRRYRDLLGEEGLQRPREPPAAAPSAGGAAPCSPRGARRGEPPQQQPRRRRREKEPEEEPAGAAARAADAACNGLPGSDSRRAPGKGGGSKGSPGQRPPVPAAAAAGAQARASCAAAKTQGRCCWECLQNNLAVLPGELGALPHSATAEEKPARALPAQDDRGASREREEGALAEPAPVPAVAHSPPATVEAATSRASPPALLPGPAPRGDRPELLTPSSLHYSTLQQQQQRTREWVARHPQVPEARDQGPIRAWSVLPDNFLQLPLEPGSTEPNSEPPDPCLSSHSLFPVVPDESWESWAGNPSLTVFRSIRCQLSLQDLDDFVDQESDGSEESSSGPKDSPGASEEGLQVVLGTPDRGKLRNPAGGLSVSRKEGSPSRSPQGLRNRGDGHISQQVPAGANGLAGHPLKPLPWPVPKLRRSLRRSSLAGRAKLSSSDEEYLDEGLLKRSRRPPRSRKPSKAGTAPSPRVDAGLSLKLAEVKAVVAERGWRHSLWVPSGEGSAALAPHRTSEHKSSLVPLDAREHEWIVKLASGSWIQVWTLFWEDPQLALHKDFLTGYTALHWIAKHGDLRALQDLVSGAKKAGIVLDVNVRSSCGYTPLHLAAIHGHQGVIKLLVQRLASRVNVRDSSGKKPWQYLTSNTSGEIWQLLGAPRGKPIFPVYPLVGSSSPTRKAKSKEISRSVTRKTSFAALLKSQHNKWKLANQYEKFHSPREREEYSD

SEQ ID NO: 5876 - protein, 352 aa, Homo sapiens
MAEPRQEFEVMEDHAGTYGLGDRKDQGGYTMHQDQEGDTDAGLKAEEAGIGDTPSLEDEAAGHVTQARMVSKSKDGTGSDDKKAKGADGKTKIATPRGAAPPGQKGQANATRIPAKTPPAPKTPPSSGEPPKSGDRSGYSSPGSPGTPGSRSRTPSLPTPPTREPKKVAVVRTPPKSPSSAKSRLQTAPVPMPDLKNVKSKIGSTENLKHQPGGGKVQIVYKPVDLSKVTSKCGSLGNIHHKPGGGQVEVKSEKLDFKDRVQSKIGSLDNITHVPGGGNKKIETHKLTFRENAKAKTDHGAEIVYKSPVVSGDTSPRHLSNVSSTGSIDMVDSPQLATLADEVSASLAKQGL

SEQ ID NO: 5877 - protein, 2215 aa, Homo sapiens
MEAEFYMVILTCLIFRNSEGFQIVHVQKQQCLFKNEKVVVGSCNRTIQNQQWMWTEDEKLLHVKSALCLAISNSSRGPSRSAILDRCSQAPRWTCYDQEGFLEVENASLFLQKQGSRVVVKKARKYLHSWMKIDVNKEGKLVNESLCLQKAGLGAEVSVRSTRNTAPPQILTTFNAVPDGLVFLIRNTTEAFIRNAAENYSQNSSERQHPNLHMTGITDTSWVLSTTQPFSSTTEETGLAEPERCNFTLAESKASSHSVSIQWRILGSPCNFSLIYSSDTLGAALCPTFRIDNTTYGCNLQDLQAGTIYNFRIISLDEERTVVLQTDPLPPARFGVSKEKTTSTSLHVWWTPSSGKVTSYEVQLFDENNQKIQGVQIQESTSWNEYTFFNLTAGSKYNIAITAVSGGKRSFSVYTNGSTVPSPVKDIGISTKANSLLISWSHGSGNVERYRLMLMDKGILVHGGVVDKHATSYAFHGLTPGYLYNLTVMTEAAGLQNYRWKLVRTAPMEVSNLKVTNDGSLTSLKVKWQRPPGNVDSYNITLSHKGTIKESRVLAPWITETHFKELVPGRLYQVTVSCVSGELSAQKMAVGRTFPDKVANLEANNNGRMRSLVVSWSPPAGDWEQYRILLFNDSVVLLNITVGKEETQYVMDDTGLVPGRQYEVEVIVESGNLKNSERCQGRTVPLAVLQLRVKHANETSLSIMWQTPVAEWEKYIISLADRDLLLIHKSLSKDAKEFTFTDLVPGRKYMATVTSISGDLKNSSSVKGRTVPAQVTDLHVANQGMTSSLFTNWTQAQGDVEFYQVLLIHENVVIKNESISSETSRYSFHSLKSGSLYSVVVTTVSGGISSRQVVVEGRTVPSSVSGVTVNNSGRNDYLSVSWLLAPGDVDNYEVTLSHDGKVVQSLVIAKSVRECSFSSLTPGRLYTVTITTRSGKYENHSFSQERTVPDKVQGVSVSNSARSDYLRVSWVHATGDFDHYEVTIKNKNNFIQTKSIPKSENECVFVQLVPGRLYSVTVTTKSGQYEANEQGNGRTIPEPVKDLTLRNRSTEDLHVTWSGANGDVDQYEIQLLFNDMKVFPPFHLVNTATEYRFTSLTPGRQYKILVLTISGDVQQSAFIEGFTVPSAVKNIHISPNGATDSLTVNWTPGGGDVDSYTVSAFRHSQKVDSQTIPKHVFEHTFHRLEAGEQYQIMIASVSGSLKNQINVVGRTVPASVQGVIADNAYSSYSLIVSWQKAAGVAERYDILLLTENGILLRNTSEPATTKQHKFEDLTPGKKYKIQILTVSGGLFSKEAQTEGRTVPAAVTDLRITENSTRHLSFRWTASEGELSWYNIFLYNPDGNLQERAQVDPLVQSFSFQNLLQGRMYKMVIVTHSGELSNESFIFGRTVPASVSHLRGSNRNTTDSLWFNWSPASGDFDFYELILYNPNGTKKENWKDKDLTEWRFQGLVPGRKYVLWVVTHSGDLSNKVTAESRTAPSPPSLMSFADIANTSLAITWKGPPDWTDYNDFELQWLPRDALTVFNPYNNRKSEGRIVYGLRPGRSYQFNVKTVSGDSWKTYSKPIFGSVRTKPDKIQNLHCRPQNSTAIACSWIPPDSDFDGYSIECRKMDTQEVEFSRKLEKEKSLLNIMMLVPHKRYLVSIKVQSAGMTSEVVEDSTITMIDRPPPPPPHIRVNEKDVLISKSSINFTVNCSWFSDTNGAVKYFTVVVREADGSDELKPEQQHPLPSYLEYRHNASIRVYQTNYFASKCAENPNSNSKSFNIKLGAEMESLGGKCDPTQQKFCDGPLKPHTAYRISIRAFTQLFDEDLKEFTKPLYSDTFFSLPITTESEPLFGAIEGVSAGLFLIGMLVAVVALLICRQKVSHGRERPSARLSIRRDRPLSVHLNLGQKGNRKTSCPIKINQFEGHFMKLQADSNYLLSKEYEELKDVGRNQSCDIALLPENRGKNRYNNILPYDATRVKLSNVDDDPCSDYINASYIPGNNFRREYIVTQGPLPGTKDDFWKMVWEQNVHNIVMVTQCVEKGRVKCDHYWPADQDSLYYGDLILQMLSESVLPEWTIREFKICGEEQLDAHRLIRHFHYTVWPDHGVPETTQSLIQFVRTVRDYINRSPGAGPTVVHCSAGVGRTGTFIALDRILQQLDSKDSVDIYGAVHDLRLHRVHMVQTECQYVYLHQCVRDVLRARKLRSEQENPLFPIYENVNPEYHRDPVYSRH

SEQ ID NO: 5878 - protein, 652 aa, Homo sapiens
MGNLQSEPSAGGGSRKVQPSDRAPDSRRTSLVEPEMTSQAMRLTRGLGVWFPGSATPPGLMVPREPQASPSTLPLTLERPSPVMPPPEEAAAVSAPPPAPAGTLLPGPSKWQKPAGTPVPRIRRLLEASHRGQGDPPSLRPLKPPPPPRQLSVKDTVPRAPSQFPPPLETWKPPPPLPSERQPADRRITPALATPASPPTESQAGPRNQGQTAGRARGGAPPHAGEGEMAQPADSESGLSLLCKITFKSRPSLAPPAASSSLAAKASLGGGGGGGLFAASGAISYAEVLKQGPLPPGAARPLGEVSRGAQEAEGGDGDGEGCSGPPSAPASQARALPPPPYTTFPGSKPKFDWVSAPDGPERHFRFNGAGGGIGAPRRRAAALSGPWGSPPPPPEQIHSAPGPRRPAPALLAPPTFIFPAPTNGEPMRPGPPGLQELPPLPPPTPPPTLQPPALQPTPLPVAPPLTPGLGHKESALAPTAAPALPPALAADQAPAPSPAPAPTVAEPSPPVSAPAPAAAPIKTRTRRNKGSRAARGATRKDGLHGDGPRERATATVPDSSGGGGGGSGASQTGAANTRAARHWLPFQVLNSCPCKCYCHHQPRHRRLPRNVSAWLSTSTNHLGEPPWVATIKLSGSLVAKLEHYDLQATHSN

SEQ ID NO: 5879 - protein, 1446 aa, Homo sapiens
MARAQALVLALTFQLCAPETETPAAGCTFEEASDPAVPCEYSQAQYDDFQWEQVRIHPGTRAPADLPHGSYLMVNTSQHAPGQRAHVIFQSLSENDTHCVQFSYFLYSRDGHSPGTLGVYVRVNGGPLGSAVWNMTGSHGRQWHQAELAVSTFWPNEYQVLFEALISPDRRGYMGLDDILLLSYPCAKAPHFSRLGDVEVNAGQNASFQCMAAGRAAEAERFLLQRQSGALVPAAGVRHISHRRFLATFPLAAVSRAEQDLYRCVSQAPRGAGVSNFAELIVKEPPTPIAPPQLLRAGPTYLIIQLNTNSIIGDGPIVRKEIEYRMARGPWAEVHAVSLQTYKLWHLDPDTEYEISVLLTRPGDGGTGRPGPPLISRTKCAEPMRAPKGLAFAEIQARQLTLQWEPLGYNVTRCHTYTVSLCYHYTLGSSHNQTIRECVKTEQGVSRYTIKNLLPYRNVHVRLVLTNPEGRKEGKEVTFQTDEDVPSGIAAESLTFTPLEDMIFLKWEEPQEPNGLITQYEISYQSIESSDPAVNVPGPRRTISKLRNETYHVFSNLHPGTTYLFSVRARTGKGFGQAALTEITTNISAPSFDYADMPSPLGESENTITVLLRPAQGRGAPISVYQVIVEEERARRLRREPGGQDCFPVPLTFEAALARGLVHYFGAELAASSLPEAMPFTVGDNQTYRGFWNPPLEPRKAYLIYFQAASHLKGETRLNCIRIARKAACKESKRPLEVSQRSEEMGLILGICAGGLAVLILLLGAIIVIIRKGRDHYAYSYYPKPVNMTKATVNYRQEKTHMMSAVDRSFTDQSTLQEDERLGLSFMDTHGYSTRGDQRSGGVTEASSLLGGSPRRPCGRKGSPYHTGQLHPAVRVADLLQHINQMKTAEGYGFKQEYESFFEGWDATKKKDKVKGSRQEPMPAYDRHRVKLHPMLGDPNADYINANYIDGYHRSNHFIATQGPKPEMVYDFWRMVWQEHCSSIVMITKLVEVGRVKCSRYWPEDSDTYGDIKIMLVKTETLAEYVVRTFALERRGYSARHEVRQFHFTAWPEHGVPYHATGLLAFIRRVKASTPPDAGPIVIHCSAGTGRTGCYIVLDVMLDMAECEGVVDIYNCVKTLCSRRVNMIQTEEQYIFIHDAILEACLCGETTIPVSEFKATYKEMIRIDPQSNSSQLREEFQTLNSVTPPLDVEECSIALLPRNRDKNRSMDVLPPDRCLPFLISTDGDSNNYINAALTDSYTRSAAFIVTLHPLQSTTPDFWRLVYDYGCTSIVMLNQLNQSNSAWPCLQYWPEPGRQQYGLMEVEFMSGTADEDLVARVFRVQNISRLQEGHLLVRHFQFLRWSAYRDTPDSKKAFLHLLAEVDKWQAESGDGRTIVHCLNGGGRSGTFCACATVLEMIRCHNLVDVFFAAKTLRNYKPNMVETMDQYHFCYDVALEYLEGLESR

SEQ ID NO: 5880 - protein, 1321 aa, Homo sapiens
MEPPGRRRGRAQPPLLLPLSLLALLALLGGGGGGGAAALPAGCKHDGRPRGAGRAAGAAEGKVVCSSLELAQVLPPDTLPNRTVTLILSNNKISELKNGSFSGLSLLERLDLRNNLISSIDPGAFWGLSSLKRLDLTNNRIGCLNADIFRGLTNLVRLNLSGNLFSSLSQGTFDYLASLRSLEFQTEYLLCDCNILWMHRWVKEKNITVRDTRCVYPKSLQAQPVTGVKQELLTCDPPLELPSFYMTPSHRQVVFEGDSLPFQCMASYIDQDMQVLWYQDGRIVETDESQGIFVEKNMIHNCSLIASALTISNIQAGSTGNWGCHVQTKRGNNTRTVDIVVLESSAQYCPPERVVNNKGDFRWPRTLAGITAYLQCTRNTHGSGIYPGNPQDERKAWRRCDRGGFWADDDYSRCQYANDVTRVLYMFNQMPLNLTNAVATARQLLAYTVEAANFSDKMDVIFVAEMIEKFGRFTKEEKSKELGDVMVDIASNIMLADERVLWLAQREAKACSRIVQCLQRIATYRLAGGAHVYSTYSPNIALEAYVIKSTGFTGMTCTVFQKVAASDRTGLSDYGRRDPEGNLDKQLSFKCNVSNTFSSLALKNTIVEASIQLPPSLFSPKQKRELRPTDDSLYKLQLIAFRNGKLFPATGNSTNLADDGKRRTVVTPVILTKIDGVNVDTHHIPVNVTLRRIAHGADAVAARWDFDLLNGQGGWKSDGCHILYSDENITTIQCYSLSNYAVLMDLTGSELYTQAASLLHPVVYTTAIILLLCLLAVIVSYIYHHSLIRISLKSWHMLVNLCFHIFLTCVVFVGGITQTRNASICQAVGIILHYSTLATVLWVGVTARNIYKQVTKKAKRCQDPDEPPPPPRPMLRFYLIGGGIPIIVCGITAAANIKNYGSRPNAPYCWMAWEPSLGAFYGPASFITFVNCMYFLSIFIQLKRHPERKYELKEPTEEQQRLAANENGEINHQDSMSLSLISTSALENEHTFHSQLLGASLTLLLYVALWMFGALAVSLYYPLDLVFSFVFGATSLSFSAFFVVHHCVNREDVRLAWIMTCCPGRSSYSVQVNVQPPNSNGTNGEAPKCPNSSAESSCTNKSASSFKNSSQGCKLTNLQAAAAQCHANSLPLNSTPQLDNSLTEHSMDNDIKMHVAPLEVQFRTNVHSSRHHKNRSKGHRASRLTVLREYAYDVPTSVEGSVQNGLPKSRLGNNEGHSRSRRAYLAYRERQYNPPQQDSSDACSTLPKSSRNFEKPVSTTSKKDALRKPAVVELENQQKSYGLNLAIQNGPIKSNGQEGPLLGTDSTGNVRTGLWKHETTV

SEQ ID NO: 5881 - protein, 1435 aa, Homo sapiens
MAQTPDGISCELRGEITRFLWPKEVELLLKTWLPGEGAVQNHVLALLRWRAYLLHTTCLPLRVDCTFSYLEVQAMALQETPPQVTFELESLRELVLEFPGVAALEQLAQHVAAAIKKVFPRSTLGKLFRRPTPASMLARLERSSPSESTDPCSPCGGFLETYEALCDYNGFPFREEIQWDVDTIYHRQGCRHFSLGDFSHLGSRDLALSVAALSYNLWFRCLSCVDMKLSLEVSEQILHMMSQSSHLEELVLETCSLRGDFVRRLAQALAGHSSSGLRELSLAGNLLDDRGMTALSRHLERCPGALRRLSLAQTGLTPRGMRALGRALATNAAFDSTLTHLDLSGNPGALGASEDSGGLYSFLSRPNVLSFLNLAGTDTALDTVRGCSVGGWMTGRADWRAGRGGLGPPAGVANSLPPQLFAAVSRGCCTSLTHLDASRNVFSRTKSRAAPAALQLFLSRARTLRHLGLAGCKLPPDALRALLDGLALNTHLRDLHLDLSACELRSAGAQVIQDLVCDAGAVSSLDLADNGFGSDMVTLVLAIGRSRSLRHVALGRNFNVRCKETLDDVLHRIVQLMQDDDCPLQSLSVAESRLKLGASVLLRALATNPNLTALDISGNAMGDAGAKLLAKALRVNSRLRSVVWDRNHTSALGLLDVAQALEQNHSLKAMPLPLNDVAQAQRSRPELTARAVHQIQACLLRNNRADPASSDHTTRLQPLGLVSDPSEQEVNELCQSVQEHVELLGCGAGPQGEAAVRQAEDAIQNANFSLSILPILYEAGSSPSHHWQLGQKLEGLLRQVGEVCRQDIQDFTQATLDTARSLCPQMLQGSSWREQLEGVLAGSRGLPELLPEQLLQDAFTRLRDMRLSITGTLAESIVAQALAGLSAARDQLVESLAQQATVTMPPALPAPDGGEPSLLEPGELEGLFFPEEKEEEKEKDDSPPQKWPELSHGLHLVPFIHSAAEEAEPEPELAAPGEDAEPQAGPSARGSPSPAAPGPPAGPLPRMDLPLAGQPLRHPTRARPRPRRQHHHRPPPGGPQVPPALPQEGNGLSARVDEGVEEFFSKRLIQQDRLWAPEEDPATEGGATPVPRTLRKKLGTLFAFKKPRSTRGPRTDLETSPGAAPRTRKTTFGDLLRPPTRPSRGEELGGAEGDTSSPDPAGRSRPRYTRDSKAYSMILLPAEEEATLGARPDKRRPLERGETELAPSFEQRVQVMLQRIGVSRGSGGAEGKRKQSKDGEIKKAGSDGDIMDSSTEAPPISIKSRTHSVSADPSCRPGPGSQGPESATWKTLGQQLNAELRSRGWGQQDGPGPPSPGQSPSPCRTSPSPDSLGLPEDPCLGPRNEDGQLRPRPLSAGRRAVSVHEDQLQAPAERPLRLQRSPVLKRRPKLEAPPSPSLGSGLGTEPLPPQPTEPSSPERSPPSPATDQRGGGPNP

SEQ ID NO: 5882 - protein, 811 aa, Homo sapiens
MLLLFHSKRMPVAEAPQVAGGQGDGGDGEEAEPEGMFKACEDSKRKARGYLRLVPLFVLLALLVLASAGVLLWYFLGYKAEVMVSQVYSGSLRVLNRHFSQDLTRRESSAFRSETAKAQKMLKELITSTRLGTYYNSSSVYSFGEGPLTCFFWFILQIPEHRRLMLSPEVVQALLVEELLSTVNSSAAVPYRAEYEVDPEGLVILEASVKDIAALNSTLGCYRYSYVGQGQVLRLKGPDHLASSCLWHLQGPKDLMLKLRLEWTLAECRDRLAMYDVAGPLEKRLITSVYGCSRQEPVVEVLASGAIMAVVWKKGLHSYYDPFVLSVQPVVFQACEVNLTLDNRLDSQGVLSTPYFPSYYSPQTHCSWHLTVPSLDYGLALWFDAYALRRQKYDLPCTQGQWTIQNRRLCGLRILQPYAERIPVVATAGITINFTSQISLTGPGVRVHYGLYNQSDPCPGEFLCSVNGLCVPACDGVKDCPNGLDERNCVCRATFQCKEDSTCISLPKVCDGQPDCLNGSDEEQCQEGVPCGTFTFQCEDRSCVKKPNPQCDGRPDCRDGSDEEHCDCGLQGPSSRIVGGAVSSEGEWPWQASLQVRGRHICGGALIADRWVITAAHCFQEDSMASTVLWTVFLGKVWQNSRWPGEVSFKVSRLLLHPYHEEDSHDYDVALLQLDHPVVRSAAVRPVCLPARSHFFEPGLHCWITGWGALREGGPISNALQKVDVQLIPQDLCSEVYRYQVTPRMLCAGYRKGKKDACQGDSGGPLVCKALSGRWFLAGLVSWGLGCGRPNYFGVYTRITGVISWIQQVVT

SEQ ID NO: 5883 - protein, 72 aa, Homo sapiens
MNYYGNYYGGLGYGYGGFDDLGYGYGCGCGSFRRLGYGGGYGGYGYGSGFGGYGYRSCRPSCYGGYGFSGFY

SEQ ID NO: 5884 - protein, 279 aa, Homo sapiens
MGRAGSPLPRSSWPRMDDCGSRSRCSPTLCSSLRTCYPRGNITMSEAPRAETFVFLDLEATGLPSVEPEIAELSLFAVHRSSLENPEHDESGALVLPRVLDKLTLCMCPERPFTAKASEITGLSSEGLARCRKAGFDGAVVRTLQAFLSRQAGPICLVAHNGFDYDFPLLCAELRRLGARLPRDTVCLDTLPALRGLDRAHSHGTRARGRQGYSLGSLFHRYFRAEPSAAHSAEGDVHTLLLIFLHRAAELLAWADEQARGWAHIEPMYLPPDDPSLEA

SEQ ID NO: 5885 - protein, 313 aa, Homo sapiens
MLLTDRNTSGTTFTLLGFSDYPELQVPLFLVFLAIYNVTVLGNIGLIVIIKINPKLHTPMYFFLSQLSFVDFCYSSIIAPKMLVNLVVKDRTISFLGCVVQFFFFCTFVVTESFLLAVMAYDRFVAICNPLLYTVNMSQKLCVLLVVGSYAWGVSCSLELTCSALKLCFHGFNTINHFFCEFSSLLSLSCSDTYINQWLLFFLATFNEISTLLIVLTSYAFIVVTILKMRSVSGRRKAFSTCASHLTAITIFHGTILFLYCVPNSKNSRHTVKVASVFYTVVIPMLNPLIYSLRNKDVKDTVTEILDTKVFSY

SEQ ID NO: 5886 - protein, 149 aa, Homo sapiens
MSTPARRRLMRDFKRLQEDPPAGVSGAPSENNIMVWNAVIFGPEGTPFEDGTFKLTIEFTEEYPNKPPTVRFVSKMFHPNDGSICLDILQNRWSPTYDVSSILTSIQSLLDEPNPNSPANSQAAQLYQENKREYEKRVSAIVEQSWRDC

SEQ ID NO: 5887 - protein, 834 aa, Homo sapiens
MAVEDEGLRVFQSVKIKIGEAKNLPSYPGPSKMRDCYCTVNLDQEEVFRTKIVEKSLCPFYGEDFYCEIPRSFRHLSFYIFDRDVFRRDSIIGKVAIQKEDLQKYHNRDTWFQLQHVDADSEVQGKVHLELRLSEVITDTGVVCHKLATRIVECQGLPIVNGQCDPYATVTLAGPFRSEAKKTKVKRKTNNPQFDEVFYFEVTRPCSYSKKSHFDFEEEDVDKLEIRVDLWNASNLKFGDEFLGELRIPLKVLRQSSSYEAWYFLQPRDNGSKSLKPDDLGSLRLNVVYTEDHVFSSDYYSPLRDLLLKSADVEPVSASAAHILGEVCREKQEAAVPLVRLFLHYGRVVPFISAIASAEVKRTQDPNTIFRGNSLASKCIDETMKLAGMHYLHVTLKPAIEEICQSHKPCEIDPVKLKDGENLENNMENLRQYVDRVFHAITESGVSCPTVMCDIFFSLREAAAKRFQDDPDVRYTAVSSFIFLRFFAPAILSPNLFQLTPHHTDPQTSRTLTLISKTVQTLGSLSKSKSASFKESYMATFYEFFNEQKYADAVKNFLDLISSSGRRDPKSVEQPIVLKEGFMIKRAQGRKRFGMKNFKKRWFRLTNHEFTYHKSKGDQPLYSIPIENILAVEKLEEESFKMKNMFQVIQPERALYIQANNCVEAKDWIDILTKVSQCNQKRLTVYHPSAYLSGHWLCCRAPSDSAPGCSPCTGGLPANIQLDIDGDRETERIYSLFNLYMSKLEKMQEACGSKSVYDGPEQEEYSTFVIDDPQETYKTLKQVIAGVGALEQEHAQYKRDKFKKTKYGSQEHPIGDKSFQNYIRQQSETSTHSI

SEQ ID NO: 5888 - protein, 263 aa, Homo sapiens
MGDIPAVGLSSWKASPGKVTEAVKEAIDAGYRHFDCAYFYHNEREVGAGIRCKIKEGAVRREDLFIATKLWCTCHKKSLVETACRKSLKALKLNYLDLYLIHWPMGFKPPHPEWIMSCSELSFCLSHPRVQDLPLDESNMVIPSDTDFLDTWEAMEDLVITGLVKNIGVSNFNHEQLERLLNKPGLRFKPLTNQILIRFQIQRNVIVIPGSITPSHIKENIQVFDFELTQHDMDNILSLNRNLRLAMFPITKNHKDYPFHIEY

SEQ ID NO: 5889 - protein, 126 aa, Homo sapiens
MAPGEVTITVRLIRSFEHRNFKPVVYHGVNLDQTVKEFIVFLKQDIPLRTNLPPPFRNYKYDALKIIHQAHKSKTNELVLSLEDDERLLLKEDSTLKAAGIASETEIAFFCEEDYKNYKANPISSW

SEQ ID NO: 5890 - protein, 463 aa, Homo sapiens
MPGPLRSLEMESLQFRDVAVEFSLEEWHCLDTAQQNLYRDVMLENYRHLVFLGIIVSKPDLITCLEQGIKPLTMKRHEMIAKPPVVCSHFAQDLWPEQSIKDSYQKVILRKFEKCGHGNLHFKKGCESVDECKLHKRGYNGLNQCLTTTQSKIFQCGKYVKVFHQFSNSKRHKRRHTEKKPLKYIEGDKAFNQSSTHTTHKKIDTGEKPYKCEECGKAFNRSSHLTTHKITHTREKPYKCEECGKVFKYFSSFTTHKKIHSGEKPYICEECGKAFMYPYTLTTHKIIHTGEQPYKCKECDKAFNHPATLSSHKKIHTGEKPYTCDKCGKAFISSSILSKHEKIHTGEKPYKCEECGKAFTRSSHLTMHKIIHTGEKPYKCEECGKAFTWSAGLHKHRRTHTGEKPYKCEECGKAYTTSSNLTEHKTTHTGEKPYKCKECGKAFNWSSDLNKHKRIHIGQKPRT

SEQ ID NO: 5891 - protein, 1835 aa, Homo sapiens
MANSTGKAPPDERRKGLAFLDELRQFHHSRGSPFKKIPAVGGKELDLHGLYTRVTTLGGFAKVSEKNQWGEIVEEFNFPRSCSNAAFALKQYYLRYLEKYEKVHHFGEDDDEVPPGNPKPQLPIGAIPSSYNYQQHSVSDYLRQSYGLSMDFNSPNDYNKLVLSLLSGLPNEVDFAINVCTLLSNESKHVMQLEKDPKIITLLLANAGVFDDTLGSFSTVFGEEWKEKTDRDFVKFWKDIVDDNEVRDLISDRNKSHEGTSGEWIWESLFHPPRKLGINDIEGQRVLQIAVILRNLSFEEGNVKLLAANRTCLRFLLLSAHSHFISLRQLGLDTLGNIAAELLLDPVDFKTTHLMFHTVTKCLMSRDRFLKMRGMEILGNLCKAEDNGVLICEYVDQDSYREIICHLTLPDVLLVISTLEVLYMLTEMGDVACTKIAKVEKSIDMLVCLVSMDIQMFGPDALAAVKLIEHPSSSHQMLSEIRPQAIEQVQTQTHVASAPASRAVVAQHVAPPPGIVEIDSEKFACQWLNAHFEVNPDCSVSRAEMYSEYLSTCSKLARGGILTSTGFYKCLRTVFPNHTVKRVEDSSSNGQAHIHVVGVKRRAIPLPIQMYYQQQPVSTSVVRVDSVPDVSPAPSPAGIPHGSQTIGNHFQRTPVANQSSNLTATQMSFPVQGVHTVAQTVSRIPQNPSPHTHQQQNAPVTVIQSKAPIPCEVVKATVIQNSIPQTGVPVSIAVGGGPPQSSVVQNHSTGPQPVTVVNSQTLLHHPSVIPQQSPLHTVVPGQIPSGTPVTVIQQAVPQSHMFGRVQNIPACTSTVSQGQQLITTSPQPVQTSSQQTSAGSQSQDTVIIAPPQYVTTSASNIVSATSVQNFQVATGQMVTIAGVPSPQASRVGFQNIAPKPLPSQQVSSTVVQQPIQQPQQPTQQSVVIVSQPAQQGQTYAPAIHQIVLANPAALPAGQTVQLTGQPNITPSSSPSPVPATNNQVPTAMSSSSTPQSQGPPPTVSQMLSVKRQQQQQHSPAPPPQQVQVQVQQPQQVQMQVQPQQSNAGVGQPASGESSLIKQLLLPKRGPSTPGGKLILPAPQIPPPNNARAPSPQVVYQVASNQAAGFGVQGQTPAQQLLVGQQNVQLVPSAMPPSGGVQTVPISNLQILPGPLISNSPATIFQGTSGNQVTITVVPNTSFAPATVSQGNATQLIAPAGITMSGTQTGVGLPVQTLPATQASPAGQSSCTTATPPFKGDKIICQKEEEAKEATGLHVHERKIEVMENPSCRRGATNTSNGDTKENEMHVGSLLNGRKYSDSSLPPSNSGKIQSETNQCSLISNGPSLELGENGASGKQNSEQIDMQDIKSDLRKPLVNGICDFDKGDGSHLSKNIPNHKTSNHVGNGEISPMEPQGTLDITQQDTAKGDQLERISNGPVLTLGGSSVSSIQEASNAATQQFSGTDLLNGPLASSLNSDVPQQRPSVVVSPHSTTSVIQGHQIIAVPDSGSKVSHSPALSSDVRSTNGTAECKTVKRPAEDTDRETVAGIPNKVGVRIVTISDPNNAGCSATMVAVPAGADPSTVAKVAIESAVQQKQQHPPTYVQNVVPQNTPMPPSPAVQVQGQPNSSQPSPFSGSSQPGDPMRKPGQNFMCLWQSCKKWFQTPSQVFYHAATEHGGKDVYPGQCLWEGCEPFQRQRFSFITHLQDKHCSKDALLAGLKQDEPGQAGSQKSSTKQPTVGGTSSTPRAQKAIVNHPSAALMALRRGSRNLVFRDFTDEKEGPITKHIRLTAALILKNIGKYSECGRRLLKRHENNLSVLAISNMEASSTLAKCLYELNFTVQSKEQEKDSEMLQ

SEQ ID NO: 5892 - protein, 502 aa, Homo sapiens
MPLVKRNIEPRHLCRGALPEGITSELECVTNSTLAAIIRQLSSLSKHAEDIFGELFNEANNFYIRANSLQDRIDRLAVKVTQLDSTVEEVSLQDINMKKAFKSSTVQDQQVVSKNSIPNPVADIYNQSDKPPPLNILTPYRDDKKDGLKFYTDPSYFFDLWKEKMLQDTEDKRKEKRRQKEQKRIDGTTREVKKVRKARNRRQEWNMMAYDKELRPDNRLSQSVYHGASSEGSLSPDTRSHASDVTDYSYPATPNHSLHPQPVTPSYAAGDVPPHGPASQAAEHEYRPPSASARHMALNRPQQPPPPPPPQAPEGSQASAPMAPADYGMLPAQIIEYYNPSGPPPPPPPPVIPSAQTAFVSPLQMPMQPPFPASASSTHAAPPHPPSTGLLVTAPPPPGPPPPPPGPPGPGSSLSSSPMHGPPVAEAKRQEPAQPPISDARSDLLAAIRMGIQLKKVQEQREQEAKREPVGNDVATILSRRIAVEYSDSDDDSEFDENDWSD

SEQ ID NO: 5893 - protein, 215 aa, Homo sapiens
MGLRTTKQMGRGTKAPGHQEDHMVKEPVEDTDPSTLSFNMSDKYPIQDTELPKAEECDTITLNCPRNSDMKNQGEENGFPDSTGDPLPEISKDNSCKENCTCSSCLLRAPTISDLLNDQDLLDVIRIKLDPCHPTVKNWRNFASKWGMSYDELCFLEQRPQSPTLEFLLRNSQRTVGQLMELCRLYHRADVEKVLRRWVDEEWPKRERGDPSRHF

SEQ ID NO: 5894 - protein, 838 aa, Homo sapiens
MNIDVEFHIRHNYPWNKLPANVRQSLGNSQREYEKQVVLYSIRNQLRYRNNLVKHVKKDERRYYEELLKYSRDHLMLYPYHLSDIMVKGLRITPFSYYTGIMEDIMNSEKSYDSLPNFTAADCLRLLGIGRNQYIDLMNQCRSSKKFFRRKTARDLLPIKPVEIAIEAWWVVQAGYITEDDIKICTLPEKCAVDKIIDSGPQLSGSLDYNVVHSLYNKGFIYLDVPISDDSCIAVPPLEGFVMNRVQGDYFETLLYKIFVSIDEHTNVAELANVLEIDLSLVKNAVSMYCRLGFAHKKGQVINLDQLHSSWKNVPSVNRLKSTLDPQKMLLSWDGGESRSPVQEASSATDTDTNSQEDPADTASVSSLSLSTGHTKRIAFLFDSTLTAFLMMGNLSPNLKSHAVTMFEVGKLSDESLDSFLIELEKVQSTGEGEAQRYFDHALTLRNTILFLRHNKDLVAQTAQPDQPNYGFPLDLLRCESLLGLDPATCSRVLNKNYTLLVSMAPLTNEIRPVSSCTPQHIGPAIPEVSSVWFKLYIYHVTGQGPPSLLLSKGTRLRKLPDIFQSYDRLLITSWGHDPGVVPTSNVLTMLNDALTHSAVLIQGHGLHGIGETVHVPFPFDETELQGEFTRVNMGVHKALQILRNRVDLQHLCGYVTMLNASSQLADRKLSDASDERGEPDLASGSDVNGSTESFEMVIEEATIDSATKQTSGATTEADWVPLELCFGIPLFSSELNRKVCRKIAAHGLCRKESLQNLLHSSRKLSLQVLNFVHSFQEGASILDIHTEPSFSSLLSQSSCADMGVPLPAKNLIFKDGVLSEWSGRSPSSLLIANLHLQ

SEQ ID NO: 5895 - protein, 447 aa, Homo sapiens
MGLSFFSKHLPIQEGQPWALKTPADIISTVEFNHTGELLATGDKGGRVVIFQREPESKNAPHSQGEYDVYSTFQSHEPEFDYLKSLEIEEKINKIKWLPQQNAAHSLLSTNDKTIKLWKITERDKRPEGYNLKDEEGKLKDLSTVTSLQVPVLKPMDLMVEVSPRRIFANGHTYHINSISVNSDCETYMSADDLRINLWHLAITDRSFNIVDIKPANMEDLTEVITASEFHPHHCNLFVYSSSKGSLRLCDMRAAALCDKHSKLFEEPEDPSNRSFFSEIISSVSDVKFSHSGRYMLTRDYLTVKVWDLNMEARPIETYQVHDYLRSKLCSLYENDCIFDKFECAWNGSDSVIMTGAYNNFFRMFDRNTKRDVTLEASRESSKPRAVLKPRRVCVGGKRRRDDISVDSLDFTKKILHTAWHPAENIIAIAATNNLYIFQDKVNSDMH

SEQ ID NO: 5896 - protein, 323 aa, Homo sapiens
MADLDKLNIDSIIQRLLEVRGSKPGKNVQLQENEIRGLCLKSREIFLSQPILLELEAPLKICGDIHGQYYDLLRLFEYGGFPPESNYLFLGDYVDRGKQSLETICLLLAYKIKYPENFFLLRGNHECASINRIYGFYDECKRRYNIKLWKTFTDCFNCLPIAAIVDEKIFCCHGGLSPDLQSMEQIRRIMRPTDVPDQGLLCDLLWSDPDKDVLGWGENDRGVSFTFGAEVVAKFLHKHDLDLICRAHQVVEDGYEFFAKRQLVTLFSAPNYCGEFDNAGAMMSVDETLMCSFQILKPAEKKKPNATRPVTPPRGMITKQAKK

SEQ ID NO: 5897 - protein, 523 aa, Homo sapiens
MESAPAAPDPAASEPGSSGADAAAGSRETPLNQESARKSEPPAPVRRQSYSSTSRGISVTKKTHTSQIEIIPCKICGDKSSGIHYGVITCEGCKGFFRRSQQSNATYSCPRQKNCLIDRTSRNRCQHCRLQKCLAVGMSRDAVKFGRMSKKQRDSLYAEVQKHRMQQQQRDHQQQPGEAEPLTPTYNISANGLTELHDDLSNYIDGHTPEGSKADSAVSSFYLDIQPSPDQSGLDINGIKPEPICDYTPASGFFPYCSFTNGETSPTVSMAELEHLAQNISKSHLETCQYLREELQQITWQTFLQEEIENYQNKQREVMWQLCAIKITEAIQYVVEFAKRIDGFMELCQNDQIVLLKAGSLEVVFIRMCRAFDSQNNTVYFDGKYASPDVFKSLGCEDFISFVFEFGKSLCSMHLTEDEIALFSAFVLMSADRSWLQEKVKIEKLQQKIQLALQHVLQKNHREDGILTKLICKVSTLRALCGRHTEKLMAFKAIYPDIVRLHFPPLYKELFTSEFEPAMQIDG

SEQ ID NO: 5898 - protein, 491 aa, Homo sapiens
MSLLMISENVKLAREYALLGNYDSAMVYYQGVLDQMNKYLYSVKDTYLQQKWQQVWQEINVEAKHVKDIMKTLESFKLDSTPLKAAQHDLPASEGEVWSMPVPVERRPSPGPRKRQSSQYSDPKSHGNRPSTTVRVHRSSAQNVHNDRGKAVRCREKKEQNKGREEKNKSPAAVTEPETNKFDSTGYDKDLVEALERDIISQNPNVRWDDIADLVEAKKLLKEAVVLPMWMPEFFKGIRRPWKGVLMVGPPGTGKTLLAKAVATECKTTFFNVSSSTLTSKYRGESEKLVRLLFEMARFYSPATIFIDEIDSICSRRGTSEEHEASRRVKAELLVQMDGVGGTSENDDPSKMVMVLAATNFPWDIDEALRRRLEKRIYIPLPSAKGREELLRISLRELELADDVDLASIAENMEGYSGADITNVCRDASLMAMRRRIEGLTPEEIRNLSKEEMHMPTTMEDFEMALKKVSKSVSAADIERYEKWIFEFGSC

SEQ ID NO: 5899 - protein, 336 aa, Homo sapiens
MTRALCSALRQALLLLAAAAELSPGLKCVCLLCDSSNFTCQTEGACWASVMLTNGKEQVIKSCVSLPELNAQVFCHSSNNVTKTECCFTDFCNNITLHLPTDNGTWTQLWLVSEYHEQGSLYDYLNRNIVTVAGMIKLALSIASGLAHLHMEIVGTQGKPAIAHRDIKSKNILVKKCETCAIADLGLAVKHDSILNTIDIPQNPKVGTKRYMAPEMLDDTMNVNIFESFKRADIYSVGLVYWEIARRCSVGGIVEEYQLPYYDMVPSDPSIEEMRKVVCDQKFRPSIPNQWQSCEALRVMGRIMRECWYANGAARLTALRIKKTISQLCVKEDCKA

SEQ ID NO: 5900 - protein, 457 aa, Homo sapiens
MLPKRRRARVGSPSGDAASSTPPSTRFPGVAIYLVEPRMGRSRRAFLTGLARSKGFRVLDACSSEATHVVMEETSAEEAVSWQERRMAAAPPGCTPPALLDISWLTESLGAGQPVPVECRHRLEVAGPRKGPLSPAWMPAYACQRPTPLTHHNTGLSEALEILAEAAGFEGSEGRLLTFCRAASVLKALPSPVTTLSQLQGLPHFGEHSSRVVQELLEHGVCEEVERVRRSERYQTMKLFTQIFGVGVKTADRWYREGLRTLDDLREQPQKLTQQQKAAPPGPEHPSPAVRCRCPAAGGGGSCGAGPAWGHRHADRRLPQGLILYHQHQHSCCESPTRLAQQSHMDAFERSFCIFRLPQPPGAAVGGSTRPCPSWKAVRVDLVVAPVSQFPFALLGWTGSKLFQRELRRFSRKEKGLWLNSHGLFDPEQKTFFQAASEEDIFRHLGLEYLPPEQRNA

SEQ ID NO: 5901 - protein, 158 aa, Homo sapiens
MLLLDCNPEVDGLKHLLETGASVNAPPDPCKQSPVHLAAGSGLACFLLWQLQTGADLNQQDVLGEAPLHKAAKVGSLECLSLLVASDAQIDLCNKNGQTAEDLAWSCGFPDCAKFLTTIKCMQTIKASEHPDRNDCVAVLRQKRSLGSVENTSGKRKC

SEQ ID NO: 5902 - protein, 752 aa, Homo sapiens
MQFFGRLVNTFSGVTNLFSNPFRVKEVAVADYTSSDRVREEGQLILFQNTPNRTWDCVLVNPRNSQSGFRLFQLELEADALVNFHQYSSQLLPFYESSPQVLHTEVLQHLTDLIRNHPSWSVAHLAVELGIRECFHHSRIISCANCAENEEGCTPLHLACRKGDGEILVELVQYCHTQMDVTDYKGETVFHYAVQGDNSQVLQLLGRNAVAGLNQVNNQGLTPLHLACQLGKQEMVRVLLLCNARCNIMGPNGYPIHSAMKFSQKGCAEMIISMDSSQIHSKDPRYGASPLHWAKNAEMARMLLKRGCNVNSTSSAGNTALHVAVMRNRFDCAIVLLTHGANADARGEHGNTPLHLAMSKDNVEMIKALIVFGAEVDTPNDFGETPTFLASKIGRQLQDLMHISRARKPAFILGSMRDEKRTHDHLLCLDGGGVKGLIIIQLLIAIEKASGVATKDLFDWVAGTSTGGILALAILHSKSMAYMRGMYFRMKDEVFRGSRPYESGPLEEFLKREFGEHTKMTDVRKPKVMLTGTLSDRQPAELHLFRNYDAPETVREPRFNQNVNLRPPAQPSDQLVWRAARSSGAAPTYFRPNGRFLDGGLLANNPTLDAMTEIHEYNQDLIRKGQANKVKKLSIVVSLGTGRSPQVPVTCVDVFRPSNPWELAKTVFGAKELGKMVVDCCTDPDGRAVDRARAWCEMVGIQYFRLNPQLGTDIMLDEVSDTVLVNALWETEVYIYEHREEFQKLIQLLLSP

SEQ ID NO: 5903 - protein, 854 aa, Homo sapiens
MPPCSGGDGSTPPGPSLRDRDCPAQSAEYPRDRLDPRPGSPSEASSPPFLRSRAPVNWYQEKAQVFLWHLMVSGSTTLLCLWKQPFHVSAFPVTASLAFRQSQGAGQHLYKDLQPFILLRLLMPEETQTQDQPMEEEEVETFAFQAEIAQLMSLIINTFYSNKEIFLRELISNSSDALDKIRYESLTDPSKLDSGKELHINLIPNKQDRTLTIVDTGIGMTKADLINNLGTIAKSGTKAFMEALQAGADISMIGQFGVGFYSAYLVAEKVTVITKHNDDEQYAWESSAGGSFTVRTDTGEPMGRGTKVILHLKEDQTEYLEERRIKEIVKKHSQFIGYPITLFVEKERDKEVSDDEAEEKEDKEEEKEKEEKESEDKPEIEDVGSDEEEEKKDGDKKKKKKIKEKYIDQEELNKTKPIWTRNPDDITNEEYGEFYKSLTNDWEDHLAVKHFSVEGQLEFRALLFVPRRAPFDLFENRKKKNNIKLYVRRVFIMDNCEELIPEYLNFIRGVVDSEDLPLNISREMLQQSKILKVIRKNLVKKCLELFTELAEDKENYKKFYEQFSKNIKLGIHEDSQNRKKLSELLRYYTSASGDEMVSLKDYCTRMKENQKHIYYITGETKDQVANSAFVERLRKHGLEVIYMIEPIDEYCVQQLKEFEGKTLVSVTKEGLELPEDEEEKKKQEEKKTKFENLCKIMKDILEKKVEKVVVSNRLVTSPCCIVTSTYGWTANMERIMKAQALRDNSTMGYMAAKKHLEINPDHSIIETLRQKAEADKNDKSVKDLVILLYETALLSSGFSLEDPQTHANRIYRMIKLGLGIDEDDPTADDTSAAVTEEMPPLEGDDDTSRMEEVD

SEQ ID NO: 5904 - protein, 971 aa, Homo sapiens
SGVSLGPPPTPQVNQGTLGPQVAPVAAGEVVKTAGGVCKFSGQRLSWWQAQESCEQQFGHLALQPPDGVLASRLRDPVWVGQREAPLRRPPQRRARTTAVLVFDERTADRAARLRSPLPELAALTACTHVQWDCASPDPAALFSVAAPALPNALQLRAFAEPGGVVRAALVVRGQHAPFLAAFRADGRWHHVCATWEQRGGRWALFSDGRRRAGARGLGAGHPVPSGGILVLGQDQDSLGGGFSVRHALSGNLTDFHLWARALSPAQLHRARACAPPSEGLLFRWDPGALDVTPSLLPTVWVRLLCPVPSEECPTWNPGPRSEGSELCLEPQPFLCCYRTEPYRRLQDAQSWPGQDVISRVNALANDIVLLPDPLSEVHGALSPAEASSFLGLLEHVLAMEMAPLGPAALLAVVRFLKRVVALGAGDPELLLTGPWEQLSQGVVSVASLVLEEQVADTWLSLREVIGGPMALVASVQRLAPLLSTSMTSERPRMRIQHRHAGLEVRSLRLREASTRGCLFTMPGGRPEGPGHIHIPASEVRRLLRKGLSGVTVIHSWFTSRVFQHTLEGPDLEPQAPASSEEANRVQRFLSTQVGSAIISSEVWDVTGEVNVAMTFHLQHRAQSPLFPPHPPSPYTGGAWATTGCSVAALYLDSTACFCNHSTSFAILLQIYEVQRGPEEESLLRTLSFVGCGVSFCALTTTFLLFLVAGVPKSERTTVHKNLTFSLASAEGFLMTSEWAKANEVACVAVTVAMHFLFLVAFSWMLVEGLLLWRKVVAVSMHPGPGMRLYHATGWGVPVGIVAVTLAMLPHDYVAPGHCWLNVHTNAIWAFVGPVLFVLTANTCILARVVMITVSSARRRARMLSPQPCLQQQIWTQIWATVKPVLVLLPVLGLTWLAGILVHLSPAWAYAAVGLNSIQGLYIFLVYAACNEEVRSALQRMAEKKVAEGPMALELPQHSPPLQTRRDRLWN

SEQ ID NO: 5905 - protein, 462 aa, Homo sapiens
MSIMMLPMEQKIQWVPTSLQDITAVLGTEAYTEEDKSMVSHAQKSQHSCLSHSRWLRSPQVTGGSWDLRIRPSKDSSSFRQAQCLRKDPGANNHLESQGVRGTAGDADRELRGPSEKATAGQPRVTLLPTPHVSGLSQEFESHWPEIAERSPCVAGVIPVIYYSVLLGLGLPVSLLTAVALARLATRTRRPSYYYLLALTASDIIIQVVIVFAGFLLQGAVLARQVPQAVVRTANILEFAANHASVWIAILLTVDRYTALCHPLHHRAASSPGRTRRAIAAVLSAALLTGIPFYWWLDMWRDTDSPRTLDEVLKWAHCLTVYFIPCGVFLVTNSAIIHRLRRRGRSGLQPRVGKSTAILLGITTLFTLLWAPRVFVMLYHMYVAPVHRDWRVHLALDVANMVAMLHTAANFGLYCFVSKTFRATVRQVIHDAYLPCTLASQPEGMAAKPVMEPPGLPTGAEV

SEQ ID NO: 5906 - protein, 3222 aa, Homo sapiens
MVTTVVAVGDTLAQPLAAAEVFIVEITLQDINDNPPVFPTDMLDLTVEENIGDGSKIMQLTAMDADEGANALVTYTIISGADDSFRIDPESGDLIATRRLDRERRSKYSLLVRADDGLQSSDMRINITVSDVNDHTPKFSRPVYSFDIPEDTIPGSLVAAILATDDDSGVNGEITYIVNEDDEDGIFFLNPITGVFNLTRLLDYEVQQYYILTVRAEDGGGQFTTIRVYFNILDVNDNPPIFSLNSYSTSLMENLPVGSTVLVFNVTDADDGINSQLTYSIASGDSLGQFTVDKNGVLKVLKALDRESQSFYNLVVQVHDLPQIPASRFTSTAQVSIILLDVNDNPPTFLSPKLTYIPENTPIDTVVFKAQATDPDSGPNSYIEYTLLNPLGNKFSIGTIDGEVRLTGELDREEVSNYTLTVVATDKGQPSLSSSTEVVVMVLDINDNNPIFAQALYKVEINENTLTGTDIIQVFAADGDEGTNGQVRYGIVNGNTNQEFRIDSVTGAITVAKPLDREKTPTYHLTVQATDRGSTPRTDTSTVSIVLLDINDFVPVFELSPYSVNVPENLGTLPRTILQVVARDDDRGSNSKLSYVLFGGNEDNAFTLSASGELGVTQSLDRETKERFVLMITATDSGSPALTGTGTINVIVDDVNDNVPTFASKAYFTTIPEDAPTGTDVLLVNASDADASKNAVIRIIGGNSQFTINPSTGQIITSALLDRETKDNYTLVVVCSDAGSPEPLSSSTSVLVTVTDVNDNPPRFQHHPYVTHIPSPTLPGSFVFAVTVTDADIGPNSELHYSLSGRNSEKFHIDPLRGAIMAAGPLNGASEVTFSVHVKDGGSFPKTDSTTVTVRFVNKADFPKVRAKEQTFMFPENQPVSSLVTTITGSSLRGEPMSYYIASGNLGNTFQIDQLTGQVSISQPLDFEKIQKYVVWIEARDGGFPPFSSYEKLDITVLDVNDNAPIFKEDPFISEILENLSPRKILTVSAMDKDSGPNGQLDYEIVNGNMENSFSINHATGEIRSVRPLDREKVSHYVLTIKSSDKGSPSQSTSVKVMINILDENDNAPRFSQIFSAHVPENSPLGYTVTRVTTSDEDIGINAISRYSIMDASLPFTINPSTGDIVISRPLNREDTDRYRIRVSAHDSGWTVSTDVTIFVTDINDNAPRFSRTSYYLDCPELTEIGSKVTQVFATDPDEGSNGQVFYFIKSQSEYFRINATTGEIFNKQILKYQNVTGFSNVNINRHSFIVTSSDRGKPSLISETTVTINIVDSNDNAPQFLKSKYFTPVTKNVKVGTKLIRVTAIDDKDFGLNSEVEYFISNDNHLGKFKLDNDTGWISVASSLISDLNQNFFITVTAKDKGNPPLSSQATVHITVTEENYHTPEFSQSHMSATIPESHSIGSIVRTVSARDRDAAMNGLIKYSISSGNEEGIFAINSSTGILTLAKALDYELCQKHEMTISAIDGGWVARTGYCSVTVNVIDVNDNSPVFLSDDYFPTVLENAPSGTTVIHLNATDADSGTNAVIAYTVQSSDSDLFVIDPNTGVITTQGFLDFETKQSYHLTVKAFNVPDEERCSFATVNIQLKGTNEYVPRFVSKLYYFEISEAAPKGTIVGEVFASDRDLGTDGEVHYLIFGNSRKKGFQINKKTGQIYVSGILDREKEERVSLKVLAKNFGSIRGADIDEVTVNVTVLDANDPPIFTLNIYSVQISEGVPIGTHVTFVSAFDSDSIPSWSRFSYFIGSGNENGAFSINPQTGQITVTAELDRETLPIYNLSVLAVDSGTPSATGSASLLVTLEDINDNGPMLTVSEGEVMENKRPGTLVMTLQSTDPDLPPNQGPFTYYLLSTGPATSYFSLSTAGVLSTTREIDREQIADFYLSVVTKDSGVPQMSSTGTVHITVIDQNDNPSQSRTVEIFVNYYGNLFPGGILGSVKPQDPDVLDSFHCSLTSGVTSLFSIPGGTCDLNSQPRSTDGTFDLTVLSNDGVHSTVTSNIRVFFAGFSNATVDNSILLRLGVPTVKDFLTNHYLHFLRIASSQLTGLGTAVQLYSAYEENNRTFLLAAVKRNHNQYVNPSGVATFFESIKEILLRQSGVKVESVDHDSCVHGPCQNGGSCLRRLAVSSVLKSRESLPVIIVANEPLQPFLCKCLPGYAGSWCEIDIDECLPSPCHSGGTCHNLVGGFSCSCPDGFTGRACERDINECLQSPCKNGAICQNFPGSFNCVCKTGYTGVFGKHCELNSYGFEELSYMEFPSLDPNNNYIYVKFATIKSHALLLYNYDNQTGDRAEFLALEIAEERLRFSYNLGSGTYKLTTMKKVSDGHFHTVIARRAGMAASLTVDSCSENQEPGYCTVSNVAVSDDWTLDVQPNRVTVGGIRSLEPILQRRGHVESHDFVGCIMEFAVNGRPLEPSQALAAQGILDQYGDFISYCFKEKKCKKVCFTVTPDTALSLEGKGRLDYHMSQNEKREYLLRQSLRGAMLEPFGVNSLEVKFRTRSENGVLIHIQESSNYTTVKIKNGKVYFTSDAGIAGKVERNIPEVYVADGHWHTFLIGKNGTATVLSVDRIYNRDIIHPTQDFGGLDVLTISLGGIPPNQAHRDAQTAGFDGCIASMWYGGESLPFSGKHSLASISKTDPSVKIGCRGPNICASNPCWGDLLCINQWYAYRCVPPGDCASHPCQNGGSCEPGLHSGFTCSCPDSHTGRTCEMVVACLGVLCPQGKVCKAGSPAGHVCVLSQGPEEISLPLWAVPAIVGSCATVLALLVLSLILCNQCRGKKAKNPKEEKKPKEKKKKGSENVAFDDPDNIPPYGDDMTVRKQPEGNPKPDIIERENPYLIYDETDIPHNSETIPSAPLASPEQEIEHYDIDNASSIAPSDADIIQHYKQFRSHTPKFSIQRHSPLGFARQSPMPLGASSLTYQPSYGQGLRTSSLSHSACPTPNPLSRHSPAPFSKSSTFYRNSPARELHLPIRDGNTLEMHGDTCQPGIFNYATRLGRRSKSPQAMASHGSRPGSRLKQPIGQIPLESSPPVGLSIEEVERLNTPRPRNPSICSADHGRSSSEEDCRRPLSRTRNPADGIPAPESSSDSDSHESFTCSEMEYDREKPMVYTSRMPKLSQVNESDADDEDNYGARLKPRRYHGRRAEGGPVGTQAAAPGTADNTLPMKLGQQAGTFNWDNLLNWGPGFGHYVDVFKDLASLPEKAAANEEGKAGTTKPVPKDGEAEQYV

SEQ ID NO: 5907 - protein, 413 aa, Homo sapiens
MTRALCSALRQALLLLAAAAELSPGLKCVCLLCDSSNFTCQTEGACWASVMLTNGKEQVIKSCVSLPELNAQVFCHSSNNVTKTECCFTDFCNNITLHLPTGLPLLVQRTIARTIVLQEIVGKGRFGEVWHGRWCGEDVAVKIFSSRDERSWFREAEIYQTVMLRHENILGFIAADNKDNGTWTQLWLVSEYHEQGSLYDYLNRNIVTVAGMIKLALSIASGLAHLHMEIVGTQGKPAIAHRDIKSKNILVKKCETCAIADLGLAVKHDSILNTIDIPQNPKVGTKRYMAPEMLDDTMNVNIFESFKRADIYSVGLVYWEIARRCSVGGIVEEYQLPYYDMVPSDPSIEEMRKVVCDQKFRPSIPNQWQSCEALRVMGRIMRECWYANGAARLTALRIKKTISQLCVKEDCKA

SEQ ID NO: 5908 - protein, 551 aa, Homo sapiens
MARGAEGGRGDAGWGLRGALAAVALLSALNAAGTVFALCQWRGLSSALRALEAQRGREQREDSALRSFLAELSRAPRGASAPPQDPASSARNKRSHSGEPAPHIRAESHDMLMMMTYSMVPIRVMVDLCNSTKGICLTGPSGPPGPPGAGGLPGHNGLDGQPGPQGPKGEKGANGKRGKMGIPGAAGNPGERGEKGDHGELGLQGNEGPPGQKGEKGDKGDVSNDVLLAGAKGDQGPPGPPGPPGPPGPPGPPGSRRAKGPRQPSMFNGQCPGETCAIPNDDTLVGKADEKASEHHSPQAESMITSIGNPVQVLKVTETFGTWIRESANKSDDRIWVTEHFSGIMVKEFKDQPSLLNGSYTFIHLPYYFHGCGHVVYNNSLYYHKGGSNTLVRFEFGQETSQTLKLENALYFDRKYLFANSKTYFNLAVDEKGLWIIYASSVDGSSILVAQLDERTFSVVQHVNTTYPKSKAGNAFIARGILYVTDTKDMRVTFAFDLLGGKQINANFDLRTSQSVLAMLAYNMRDQHLYSWEDGHLMLYPVQFLSTTLNQ

SEQ ID NO: 5909 - protein, 292 aa, Homo sapiens
MAVPTELDGGSVKETAAEEESRVLAPGAAPFGNFPHYSRFHPPEQRLRLLPPELLRQLFPESPENGPILGLDVGCNSGDLSVALYKHFLSLPDGETCSDASREFRLLCCDIDPVLVKRAEKECPFPDALTFITLDFMNQRTRKVLLSSFLSQFGRSVFDIGFCMSITMWIHLNHGDHGLWEFLAHLSSLCHYLLVEPQPWKCYRAAARRLRKLGLHDFDHFHSLAIRGDMPNQIVQILTQDHGMELICCFGNTSWDRSLLLFRAKQTIETHPIPESLIEKGKEKNRLSFQKQ

SEQ ID NO: 5910 - protein, 348 aa, Homo sapiens
MSDSKEPRVQQLGLLGCLGHGALVLQLLSFMLLAGVLVAILVQVSKVPSSLSQEQSEQDAIYQNLTQLKAAVGELSEKSKLQEIYQELTQLKAAVGELPEKSKLQEIYQELTRLKAAVGELPEKSKLQEIYQELTRLKAAVGELPEKSKLQEIYQELTELKAAVGELPEKSKLQEIYQELTQLKAAVGELPDQSKQQQIYQELTDLKTAFERLCRHCPKDWTFFQGNCYFMSNSQRNWHDSVTACQEVRAQLVVIKTAEEQNFLQLQTSRSNRFSWMGLSDLNQEGTWQWVDGSPLSPSFQRYWNSGEPNNSGNEDCAEFSGSGWNDNRCDVDNYWICKKPAACFRDE

SEQ ID NO: 5911 - protein, 533 aa, Homo sapiens
MGSGSSSYRPKAIYLDIDGRIQKVIFSKYCNSSDIMDLFCIATGLPRNTTISLLTTDDAMVSIDPTMPANSERTPYKVRPVAIKQLSEREELIQSVLAQVAEQFSRAFKINELKAEVANHLAVLEKRVELEGLKVVEIEKCKSDIKKMREELAARSSRTNCPCKYSFLDNHKKLTPRRDVPTYPKYLLSPETIEALRKPTFDVWLWEPNEMLSCLEHMYHDLGLVRDFSINPVTLRRWLFCVHDNYRNNPFHNFRHCFCVAQMMYSMVWLCSLQEKFSQTDILILMTAAICHDLDHPGYNNTYQINARTELAVRYNDISPLENHHCAVAFQILAEPECNIFSNIPPDGFKQIRQGMITLILATDMARHAEIMDSFKEKMENFDYSNEEHMTLLKMILIKCCDISNEVRPMEVAEPWVDCLLEEYFMQSDREKSEGLPVAPFMDRDKVTKATAQIGFIKFVLIPMFETVTKLFPMVEEIMLQPLWESRDRYEELKRIDDAMKELQKKTDSLTSGATEKSRERSRDVKNSEGDCA

SEQ ID NO: 5912 - protein, 291 aa, Homo sapiens
MEKLAASTEPQGPRPVLGRESVQVPDDQDFRSFRSECEAEVGWNLTYSRAGVSVWVQAVEMDRTLHKIKCRMECCDVPAETLYDVLHDIEYRKKWDSNVIETFDIARLTVNADVGYYSWRCPKPLKNRDVITLRSWLPMGADYIIMNYSVKHPKYPPRKDLVRAVSIQTGYLIQSTGPKSCVITYLAQVDPKGSLPKWVVNKSSQFLAPKAMKKMYKACLKYPEWKQKHLPHFKPWLHPEQSPLPSLALSELSVQHADSLENIDESAVAESREERMGGAGGEGSDDDTSLT

SEQ ID NO: 5913 - protein, 388 aa, Homo sapiens
MMSPSQASLLFLNVCIFICGEAVQGNCVHHSTDSSVVNIVEDGSNAKDESKSNDTVCKEDCEESCDVKTKITREEKHFMCRNLQNSIVSYTRSTKKLLRNMMDEQQASLDYLSNQVNELMNRVLLLTTEVFRKQLDPFPHRPVQSHGLDCTDIKDTIGSVTKTPSGLYIIHPEGSSYPFEVMCDMDYRGGGRTVIQKRIDGIIDFQRLWCDYLDGFGDLLGEFWLGLKKIFYIVNQKNTSFMLYVALESEDDTLAYASYDNFWLEDETRFFKMHLGRYSGNAGDAFRGLKKEDNQNAMPFSTSDVDNDGCRPACLVNGQSVKSCSHLHNKTGWWFNECGLANLNGIHHFSGKLLATGIQWGTWTKNNSPVKIKSVSMKIRRMYNPYFK

SEQ ID NO: 5914 - protein, 421 aa, Homo sapiens
MWYHRLSHLHSRLQDLLKGGVIYPALPQPNFKSLLPLAVHWHHTASKSLTCAWQQHEDHFELKYANTVMRFDYVWLRDHCRSASCYNSKTHQRSLDTASVDLCIKPKTIRLDETTLFFTWPDGHVTKYDLNWLVKNSYEGQKQKVIQPRILWNAEIYQQAQVPSVDCQSFLETNEGLKKFLQNFLLYGIAFVENVPPTQEHTEKLAERISLIRETIYGRMWYFTSDFSRGDTAYTKLALDRHTDTTYFQEPCGIQVFHCLKHEGTGGRTLLVDGFYAAEQVLQKAPEEFELLSKVPLKHEYIEDVGECHNHMIGIGPVLNIYPWNKELYLIRYNNYDRAVINTVPYDVVHRWYTAHRTLTIELRRPENEFWVKLKPGRVLFIDNWRVLHGRECFTGYRQLCGCYLTRDDVLNTARLLGLQA

SEQ ID NO: 5915 - protein, 441 aa, Homo sapiens
MALFGALFLALLAGAHAEFPGCKIRVTSKALELVKQEGLRFLEQELETITIPDLRGKEGHFYYNISEVKVTELQLTSSELDFQPQQELMLQITNASLGLRFRRQLLYWFLKVYDFLSTFITSGMRFLLNQQICPVLYHAGTVLLNSLLDTVPVRSSVDELVGIDYSLMKDPVASTSNLDMDFRGAFFPLTERNWSLPNRAVEPQLQEEERMVYVAFSEFFFDSAMESYFRAGALQLLLVGDKVPHDLDMLLRATYFGSIVLLSPAVIDSPLKLELRVLAPPRCTIKPSGTTISVTASVTIALVPPDQPEVQLSSMTMDARLSAKMALRGKALRTQLDLRRFRIYSNHSALESLALIPLQAPLKTMLQIGVMPMLNERTWRGVQIPLPEGINFVHEVVTNHAGFLTIGADLHFAKGLREVIEKNRPADVRASTAPTPSTAAV

SEQ ID NO: 5916 - protein, 304 aa, Homo sapiens
MLRGSASSTSMEKAKGKEWTSTEKSREEDQQASNQPNSIALPGTSAKRTKEKMSIKGSKVLCPKKKAEHTDNPRPQKKIPIPPLPSKLPPVNLIHRDILRAWCQQLKLSSKGQKLDAYKRLCAFAYPNQKDFPSTAKEAKIRKSLQKKLKVEKGETSLQSSETHPPEVALPPVGEPPALENSTALLEGVNTVVVTTSAPEALLASWARISARARTPEAVESPQEASGVRWCVVHGKSLPADTDGWVHLQFHAGQAWVPEKQEGRVSALFLLPASNFPPPHLEDNMLCPKCVHRNKVLIKSLQWE

SEQ ID NO: 5917 - protein, 1499 aa, Homo sapiens
MRILANKTRLPHPRRREAPGSPPLSPRGHCPPAPAKPMHPENKLTNHGKTGNGGAQSQHQNVNQGPTCNVGSKGVGAGNHGAKANQISPSNSSLKNPQAGVPPFSSLKGKVKRDRSVSVDSGEQREAGTPSLDSEAKEVAPRSKRRCVLERKQPYSGDEWCSGPDSEEDDKPIGATHNCNVADPAMAAPQLGPGQTTQLPLSESSVPGAPHGPPPGLRPDAPGGGGGGGGVPGKPPSQFVYVFTTHLANTAAEAVLQGRADSILAYHQQNVPRAKLDQAPKVPPTPEPLPLSTPSAGTPQSQPPPLPPPPPPAPGSAPPALPPEGPPEDSSQDLAPNSVGAASTGGGTGGTHPNTPTATTANNPLPPGGDPSSAPGPALLGEAAAPGNGQRSLVGSEGLSKEQLEHRERSLQTLRDIERLLLRSGETEPFLKGPPGGAGEGGPPAQAPPPPQQPPTAPPSGLKKYEEPLQSMISQTQSLGGPPLEHEVPGHPPGGDMGQQMNMMIQRLGQDSLTPEQVAWRKLQEEYYEEKRRKEEQIGLHGSRPLQDMMGMGGMMVRGPPPPYHSKPGDQWPPGMGAQLRGPMDVQDPMQLRGGPPFPGPRFPGNQIQRVPGFGGMQSMPMEVPMNAMQRPVRPGMGWTEDLPPMGGPSNFAQNTMPYPGGQGEAERFMTPRVREELLRHQLLEKRSMGMQRPLGMAGSGMGQSMEMERMMQAHRQMDPAMFPGQMAGGEGLAGTPMGMEFGGGRGLLSPPMGQSGLREVDPPMGPGNLNMNMNVNMNMNMNLNVQMTPQQQMLMSQKMRGPGDLMGPQGLSPEEMARVRAQNSSGVMGGPQKMLMPSQFPNQGQQGFSGGQGPYQAMSQDMGNTQDMFSPDQSSMPMSNVGTTRLSHMPLPPASNPPGTVHSAPNRGLGRRPSDLTISINQMGSPGMGHLKSPTLSQVHSPLVTSPSANLKSPQTPSQMVPLPSANPPGPLKSPQVLGSSLSVRSPTGSPSRLKSPSMAVPSPGWVASPKTAMPSPGVSQNKQPPLNMNSSTTLSNMEQGTLPPSGPRSSSSAPPANPPSGLMNPSLPFTSSPDPTPSQNPLSLMMTQMSKYAMPSSTPLYHNAIKTIATSDDELLPDRPLLPPPPPPQGSGPGISNSQPSQMHLNSAAAQSPMGMNLPGQQPLSHEPPPAMLPSPTPLGSNIPLHPNAQGTGGPPQNSMMMAPGGPDSLNAPCGPVPSSSQMMPFPPRLQQPHGAMAPTGGGGGGPGLQQHYPSGMALPPEDLPNQPPGPMPPQQHLMGKAMAGRMGDAYPPGVLPGVASVLNDPELSEVIRPTPTGIPEFDLSRIIPSEKPSSTLQYFPKSENQPPKAQPPNLHLMNLQNMMAEQTPSRPPNLPGQQGVQRGLNMSMCHPGQMSLLGRTGVPPQQGMVPHGLHQGVMSPPQGLMTQQNFMLMKQRGVGGEVYSQPPHMLSPQGSLMGPPPQQNLMVSHPLRQRSVSLDSQMGYLPAPGGMANLPF

SEQ ID NO: 5918 - protein, 1304 aa, Homo sapiens
MAKIAKTHEDIEAQIREIQGKKAALDEAQGVGLDSTGYYDQEIYGGSDSRFAGYVTSIAATELEDDDDDYSSSTSLLGQKKPGYHAPVALLNDIPQSTEQYDPFAEHRPPKIADREDEYKKHRRTMIISPERLDPFADGGKTPDPKMNARTYMDVMREQHLTKEEREIRQQLAEKAKAGELKVVNGAAASQPPSKRKRRWDQTADQTPGATPKKLSSWDQAETPGHTPSLRWDETPGRAKGSETPGATPGSKIWDPTPSHTPAGAATPGRGDTPGHATPGHGGATSSARKNRWDETPKTERDTPGHGSGWAETPRTDRGGDSIGETPTPGASKRKSRWDETPASQMGGSTPVLTPGKTPIGTPAMNMATPTPGHIMSMTPEQLQAWRWEREIDERNRPLSDEELDAMFPEGYKVLPPPAGYVPIRTPARKLTATPTPLGGMTGFHMQTEDRTMKSVNDQPSGNLPFLKPDDIQYFDKLLVDVDESTLSPEEQKERKIMKLLLKIKNGTPPMRKAALRQITDKAREFGAGPLFNQILPLLMSPTLEDQERHLLVKVIDRILYKLDDLVRPYVHKILVVIEPLLIDEDYYARVEGREIISNLAKAAGLATMISTMRPDIDNMDEYVRNTTARAFAVVASALGIPSLLPFLKAVCKSKKSWQARHTGIKIVQQIAILMGCAILPHLRSLVEIIEHGLVDEQQKVRTISALAIAALAEAATPYGIESFDSVLKPLWKGIRQHRGKGLAAFLKAIGYLIPLMDAEYANYYTREVMLILIREFQSPDEEMKKIVLKVVKQCCGTDGVEANYIKTEILPPFFKHFWQHRMALDRRNYRQLVDTTVELANKVGAAEIISRIVDDLKDEAEQYRKMVMETIEKIMGNLGAADIDHKLEEQLIDGILYAFQEQTTEDSVMLNGFGTVVNALGKRVKPYLPQICGTVLWRLNNKSAKVRQQAADLISRTAVVMKTCQEEKLMGHLGVVLYEYLGEEYPEVLGSILGALKAIVNVIGMHKMTPPIKDLLPRLTPILKNRHEKVQENCIDLVGRIADRGAEYVSAREWMRICFELLELLKAHKKAIRRATVNTFGYIAKAIGPHDVLATLLNNLKVQERQNRVCTTVAIAIVAETCSPFTVLPALMNEYRVPELNVQNGVLKSLSFLFEYIGEMGKDYIYAVTPLLEDALMDRDLVHRQTASAVVQHMSLGVYGFGCEDSLNHLLNYVWPNVFETSPHVIQAVMGALEGLRVAIGPCRMLQYCLQGLFHPARKVRDVYWKIYNSIYIGSQDALIAHYPRIYNDDKNTYIRYELDYIL

SEQ ID NO: 5919 - protein, 1079 aa, Homo sapiens
MESNFNTESSSTFTLQSSSETLFSIQLLDFKTSLLEALEELRMRREAEIHYEEQIGKIIVETQELKWQKETLQNQKETLAEQHKEAMAVFKKQLQMKMCALEEEKGKYQLATEIKEKEIEGLKETLKALQVSKYSLQKKVSEMEQKVQLHLLAKEDYHKQLSEIEKYYATITGQFGLVKENHEKLEQNVREAIQSNKRLSALNKKQEAEICSLKKELKKAASDLIKSKVTCQYKMGEENINLTIKEQKFQELQERLNMELELNEKINEEITHIQEEKQDIIISFQHMQQLLRQQIQANTEMEAELKVLKENNQTLERDNELQREKVKENEEKFLNLQNEHEKALGTWKRHAEELNGEINKIKNELSSLKETHIKLQEHYNKLCNQKTFEEDKKFQNVPEVNNENSEMSTEKSENTIIQKYNTEQEIREENMENFCSDTEYREKEEKKEGSFIEEIIIDDLQLFEKSFKNEIDTVVSQDENQSEISLSKTLSLDKEVISQGQTSNVTDNRKSVTTEIKDKICLEKDNGCTEFKSPNNHFVVLDTAIETEKIHLERTRGLDVHHTDVNLEVENNKTSFNSILNETAHNTYHNNNKDVSENEPFKQFRLLPGTREHALEKEITNSDQTKADLDSSLDIKKNPVPCQKYSLRNSSNVMLDDKQCKIKQIQLLTKKSECSILLSKQTSDFLQVCNDTLEKSELTVPCDIVIDHHVSYAAFSANSKLLLKNSDKNVHSMSMLVKPNSSPGGKTMCKNMSDMQNSQFNNCLGYLENTNVNISHLHLNNENSHASQAKDVKTAVHMKTCTETEFSNKKNQIDENQVTEATKNDLFLFVSINERQHTLLNNTEKTESLNDIVSGKMFSEGQLEESHSFHIEPSGDLVNRSGRSTFDLSTSDKKTEKTPVYMNFSDPGPWSKVNHIESQTASSSTPCISLLLKERPLDPSENKKIISMALCKNIGVDDVGKDIGPDTTSINRVADTLNNWSIHPDPKGEPSEEKNAMAKTFYDSSFPTEHVKTKPLISTPLQSHLQAIKTTKNTSGDDDWQSLITNQLNKSENLLSLENDNQPKKRKAEETLEKNNRLK

SEQ ID NO: 5920 - protein, 263 aa, Homo sapiens
MSLYCGIACRRKFFWCYRLLSTYVTKTRYLFELKEDDDACKKAQQTGAFYLFHSLAPLLQTSAHQYLAPRHSLLELERLLGKFGQDAQRIEDSVLIGCSEQQEAWFALDLGLDSSFSISASLHKPEMETELKGSFIELRKALFQLNARDASLLSTAQALLRWHDAHQFCSRSGQPTKKNVAGSKRVCPSNNIIYYPQIQVNLRELETAAWFSHDEVATALKRKGPYTQQQNGTFPFWLPPKLAISHQLIKEWVEKQTCSSLPA

SEQ ID NO: 5921 - protein, 668 aa, Homo sapiens
MELEVPDEAESAEAGAVPSEAAWAAESGAAAGLAQKKAAPTEVLSMTAQPGPGHGKKLGHRGVDASGETTYKKTTSSTLKGAIQLGIGYTVGHLSSKPERDVLMQDFYVVESIFFPSEGSNLTPAHHFQDFRFKTYAPVAFRYFRELFGIRPDDYLYSLCNEPLIELSNPGASGSLFYVTSDDEFIIKTVMHKEAEFLQKLLPGYYMNLNQNPRTLLPKFYGLYCVQSGGKNIRVVVMNNILPRVVKMHLKFDLKGSTYKRRASKKEKEKSFPTYKDLDFMQDMPEGLLLDADTFSALVKTLQRDCLVLESFKIMDYSLLLGVHNIDQHERERQAQGAQSTSDEKRPVGQKALYSTAMESIQGGAARGEAIESDDTMGGIPAVNGRGERLLLHIGIIDILQSYRFIKKLEHTWKALVHDGDTVSVHRPSFYAERFFKFMSNTVFRKNSSLKSSPSKKGRGGALLAVKPLGPTAAFSASQIPSEREEAQYDLRGARSYPTLEDEGRPDLLPCTPPSFEEATTASIATTLSSTSLSIPERSPSETSEQPRYRRRTQSSGQDGRPQEEPPAEEDLQQITVQVEPACSVEIVVPKEEDAGVEASPAGASAAVEVETASQASDEEGAPASQASDEEDAPATDIYFPTDERSWVYSPLHYSAQAPPASDGESDT

SEQ ID NO: 5922 - protein, 1732 aa, Homo sapiens
MSGEVRLRQLEQFILDGPAQTNGQCFSVETLLDILICLYDECNNSPLRREKNILEYLEWAKPFTSKVKQMRLHREDFEILKVIGRGAFGEVAVVKLKNADKVFAMKILNKWEMLKRAETACFREERDVLVNGDNKWITTLHYAFQDDNNLYLVMDYYVGGDLLTLLSKFEDRLPEDMARFYLAEMVIAIDSVHQLHYVHRDIKPDNILMDMNGHIRLADFGSCLKLMEDGTVQSSVAVGTPDYISPEILQAMEDGKGRYGPECDWWSLGVCMYEMLYGETPFYAESLVETYGKIMNHKERFQFPAQVTDVSENAKDLIRRLICSREHRLGQNGIEDFKKHPFFSGIDWDNIRNCEAPYIPEVSSPTDTSNFDVDDDCLKNSETMPPPTHTAFSGHHLPFVGFTYTSSCVLSDRSCLRVTAGPTSLDLDVNVQRTLDNNLATEAYERRIKRLEQEKLELSRKLQESTQTVQALQYSTVDGPLTASKDLEIKNLKEEIEKLRKQVTESSHLEQQLEEANAVRQELDDAFRQIKAYEKQIKTLQQEREDLNKELVQASERLKNQSKELKDAHCQRKLAMQEFMEINERLTELHTQKQKLARHVRDKEEEVDLVMQKVESLRQELRRTERAKKELEVHTEALAAEASKDRKLREQSEHYSKQLENELEGLKQKQISYSPGVCSIEHQQEITKLKTDLEKKSIFYEEELSKREGIHANEIKNLKKELHDSEGQQLALNKEIMILKDKLEKTRRESQSEREEFESEFKQQYEREKVLLTEENKKLTSELDKLTTLYENLSIHNQQLEEEVKDLADKKESVAHWEAQITEIIQWVSDEKDARGYLQALASKMTEELEALRNSSLGTRATDMPWKMRRFAKLDMSARLELQSALDAEIRAKQAIQEELNKVKASNIITECKLKDSEKKNLELLSEIEQLIKDTEELRSEKGIEHQDSQHSFLAFLNTPTDALDQFERSPSCTPASKGRRTVDSTPLSVHTPTLRKKGCPGSTGFPPKRKTHQFFVKSFTTPTKCHQCTSLMVGLIRQGCSCEVCGFSCHITCVNKAPTTCPVPPEQTKGPLGIDPQKGIGTAYEGHVRIPKPAGVKKGWQRALAIVCDFKLFLYDIAEGKASQPSVVISQVIDMRDEEFSVSSVLASDVIHASRKDIPCIFRVTASQLSASNNKCSILMLADTENEKNKWVGVLSELHKILKKNKFRDRSVYVPKEAYDSTLPLIKTTQAAAIIDHERIALGNEEGLFVVHVTKDEIIRVGDNKKIHQIELIPNDQLVAVISGRNRHVRLFPMSALDGRETDFYKLSETKGCQTVTSGKVRHGALTCLCVAMKRQVLCYELFQSKTRHRKFKEIQVPYNVQWMAIFSEQLCVGFQSGFLRYPLNGEGNPYSMLHSNDHTLSFIAHQPMDAICAVEISSKEYLLCFNSIGIYTDCQGRRSRQQELMWPANPSSCCYNAPYLSVYSENAVDIFDVNSMEWIQTLPLKKVRPLNNEGSLNLLGLETIRLIYFKNKMAEGDELVVPETSDNSRKQMVRNINNKRRYSFRVPEEERMQQRREMLRDPEMRNKLISNPTNFNHIAHMGPGDGIQILKDLPMNPRPQESRTVFSGSVSIPSITKSRPEPGRSMSASSGLSARSSAQNGSALKREFSGGSYSAKRQPMPSPSEGSLSSGGMDQGSDAPARDFDGEDSDSPRHSTASNSSNLSSPPSPASPRKTKSLSLESTDRGSWDP

SEQ ID NO: 5923 - protein, 776 aa, Homo sapiens
MSTRTPLPTVNERDTENHTSHGDGRQEVTSRTSRSGARCRNSIASCADEQPHIGNYRLLKTIGKGNFAKVKLARHILTGREVAIKIIDKTQLNPTSLQKLFREVRIMKILNHPNIVKLFEVIETEKTLYLIMEYASGGEVFDYLVAHGRMKEKEARSKFRQGCQAGQTIKVQVSFDLLSLMFTFIVSAVQYCHQKRIVHRDLKAENLLLDADMNIKIADFGFSNEFTVGGKLDTFCGSPPYAAPELFQGKKYDGPEVDVWSLGVILYTLVSGSLPFDGQNLKELRERVLRGKYRIPFYMSTDCENLLKRFLVLNPIKRGTLEQIMKDRWINAGHEEDELKPFVEPELDISDQKRIDIMVGMGYSQEEIQESLSKMKYDEITATYLLLGRKSSELDASDSSSSSNLSLAKVRPSSDLNNSTGQSPHHKVQRSVSSSQKQRRYSDHAGPAIPSVVAYPKRSQTSTADSDLKEDGISSRKSSGSAVGGKGIAPASPMLGNASNPNKADIPERKKSSTVPSSNTASGGMTRRNTYVCSERTTADRHSVIQNGKENSTIPDQRTPVASTHSISSAATPDRIRFPRGTASRSTFHGQPRERRTATYNGPPASPSLSHEATPLSQTRSRGSTNLFSKLTSKLTRRNMSFRFIKRLPTEYERNGRYEGSSRNVSAEQKDENKEAKPRSLRFTWSMKTTSSMDPGDMMREIRKVLDANNCDYEQRERFLLFCVHGDGHAENLVQWEMEVCKLPRLSLNGVRFKRISGTSIAFKNIASKIANELKL

SEQ ID NO: 5924 - protein, 491 aa, Homo sapiens
MGSGSSSYRPKAIYLDIDGRIQKEHDHLPADHRRRHGLHRPHHAREFRTHSVQSETCGHQATLRAFKINELKAEVANHLAVLEKRVELEGLKVVEIEKCKSDIKKMREELAARSSRTNCPCKYSFLDNHKKLTPRRDVPTYPKYLLSPETIEALRKPTFDVWLWEPNEMLSCLEHMYHDLGLVRDFSINPVTLRRWLFCVHDNYRNNPFHNFRHCFCVAQMMYSMVWLCSLQEKFSQTDILILMTAAICHDLDHPGYNNTYQINARTELAVRYNDISPLENHHCAVAFQILAEPECNIFSNIPPDGFKQIRQGMITLILATDMARHAEIMDSFKEKMENFDYSNEEHMTLLKMILIKCCDISNEVRPMEVAEPWVDCLLEEYFMQSDREKSEGLPVAPFMDRDKVTKATAQIGFIKFVLIPMFETVTKLFPMVEEIMLQPLWESRDRYEELKRIDDAMKELQKKTDSLTSGATEKSRERSRDVKNSEGDCA

SEQ ID NO: 5925 - protein, 1133 aa, Homo sapiens
MSPTQWDFPVELCCRPMAFVTLTGLDVVYNAVHRAVWDAFCANRRADRVPISFKVLPGDHEYPKCRPKRTSYEWYIPKGILKTGWMNKHLNLVPALVVVFYELDWDEPQWKEKQSECATRVEIVRQSLQGRNTKVAVVLIQKKTPLPPGEDVIASERAAALCNACELSGKSLFVLPHTDHLVGYIIRLENAFYEHAQTYYYTEIRRVKSHKEFLNKTTHQLLFVRHQFKIAFFSELKQDTQNALKNYRTAYNLVHELRAHETNILEIKTMAGFINYKICRLCFQHNTPLDAIAQFRKHIDLCKKKIGSAELSFEHDAWMSKQFQAFGDLFDEAIKLGLTAIQTQNPGFYYQQAAYYAQERKQLAKTLCNHEASVMYPNPDPLETQTGVLDFYGQRSWRQGILSFDLSDPEKEKVGILAIQLKERNVVHSEIIITLLSNAVAQFKKYKCPRMKSHLMVQMGEEYYYAKDYTKALKLLDYVMCDYRSEGWWTLLTSVLTTALKCSYLMAQLKDYITYSLELLGRASTLKDDQKSRIEKNLINVLMNESPDPEPDCDILAVKTAQKLWADRISLAGSNIFTIGVQDFVPFVQCKAKFHAPSFHVDVPVQFDIYLKADCPHPIRFSKLCVSFNNQEYNQFCVIEEASKANEVLENLTQGKMCLVPGKTRKLLFKFVAKTEDVGKKIEITSVDLALGNETGRCVVLNWQGGGGDAASSQEALQAARSFKRRPKLPDNEVHWDSIIIQASTMIISRVPNISVHLLHEPPALTNEMYCLVVTVQSHEKTQIRDVKLTAGLKPGQDANLTQKTHVTLHGTELCDESYPALLTDIPVGDLHPGEQLEKMLYVRCGTVGSRMFLVYVSYLINTTVEEKEIVCKCHKDETVTIETVFPFDVAVKFVSTKFEHLERVYADIPFLLMTDLLSASPWALTIVSSELQLAPSMTTVDQLESQVDNVILQTGESASECFCLQCPSLGNIEGGVATGHYIISWKRTSAMENIPIITTVITLPHVIVENIPLHVNADLPSFGRVRESLPVKYHLQNKTDLVQDVEISVEPSDAFMFSGLKQIRLRILPGTEQEMLYNFYPLMAGYQQLPSLNINLLRFPNFTNQLLRRFIPTSIFVKPQGRLMDDTSIAAA

SEQ ID NO: 5926 - protein, 420 aa, Homo sapiens
MLPGLRRLLQAPASACLLLMLLALPLAAPSCPMLCTCYSSPPTVSCQANNFSSVPLSLPPSTQRLFLQNNLIRTLRPGTFGSNLLTLWLFSNNLSTIYPGTFRHLQALEELDLGDNRHLRSLEPDTFQGLERLQSLHLYRCQLSSLPGNIFRGLVSLQYLYLQENSLLHLQDDLFADLANLSHLFLHGNRLRLLTEHVFRGLGSLDRLLLHGNRLQGVHRAAFRGLSRLTILYLFNNSLASLPGEALADLPSLEFLRLNANPWACDCRARPLWAWFQRARVSSSDVTCATPPERQGRDLRALREADFQACPPAAPTRPGSRARGNSSSNHLYGVAEAGAPPADPSTLYRDLPAEDSRGRQGGDAPTEDDYWGGYGGEDQRGEQMCPGAACQAPPDSRGPALSAGLPSPLLCLLLLVPHHL

SEQ ID NO: 5927 - protein, 865 aa, Homo sapiens
MSIVIPLGVDTAETSYLEMAAGSEPESVEASPVVVEKSNSYPHQLYTSSSHHSHSYIGLPYADHNYGARPPPTPPASPPPSVLISKNEVGIFTTPNFDETSSATTISTSEDGSYGTDVTRCICGFTHDDGYMICCDKCSVWQHIDCMGIDRQHIPDTYLCERCQPRNLDKERAVLLQRRKRENMSDGDTSATESGDEVPVELYTAFQHTPTSITLTASRVSKVNDKRRKKSGEKEQHISKCKKAFREGSRKSSRVKGSAPEIDPSSDGSNFGWETKIKAWMDRYEEANNNQYSEGVQREAQRIALRLGNGNDKKEMNKSDLNTNNLLFKPPVESHIQKNKKILKSAKDLPPDALIIEYRGKFMLREQFEANGYFFKRPYPFVLFYSKFHGLEMCVDARTFGNEARFIRRSCTPNAEVRHEIQDGTIHLYIYSIHSIPKGTEITIAFDFDYGNCKYKVDCACLKENPECPVLKRSSESMENINSGYETRRKKGKKDKDISKEKDTQNQNITLDCEGTTNKMKSPETKQRKLSPLRLSVSNNQEPDFIDDIEEKTPISNEVEMESEEQIAERKRKMTREERKMEAILQAFARLEKREKRREQALERISTAKTEVKTECKDTQIVSDAEVIQEQAKEENASKPTPAKVNRTKQRKSFSRSRTHIGQQRRRHRTVSMCSDIQPSSPDIEVTSQQNDIENTVLTIEPETETALAEIITETEVPALNKCPTKYPKTKKHLVNEWLSEKNEKTGKPSDGLSERPLRITTDPEVLATQLNSLPGLTYSPHVYSTPKHYIRFTSPFLSEKRRRKEPTENISGSCKKRWLKQALEEENSAILHRFNSPCQERSRSPAVNEYFFPRKFSRNKETHL

SEQ ID NO: 5928 - protein, 380 aa, Homo sapiens
MATLSFVFLLLGAVSWPPASASGQEFWPGQSAADILSGAASRRRYLLYDVNPPEGFNLRRDVYIRIASLLKTLLKTEEWVLVLPPWGRLYHWQSPDIHQVRIPWSEFFDLPSLNKNIPVIEYEQFIAESGGPFIDQVYVLQSYAEGWKEGTWEEKVDERPCIDQLLYSQDKHEYYRGWFWGYEETRGLNVSCLSVQGSASIVAPLLLRNTSARSVMLDRAENLLHDHYGGKEYWDTRRSMVFARHLREVGDEFRSRHLNSTDDADRIPFQEDWMKMKVKLGSALGGPYLGVHLRRKDFIWGHRQDVPSLEGAVRKIRSLMKTHRLDKVFVATDAVRKEYEELKKLLPEMVRFEPTWEELELYKDGGVAIIDQWICAHASS

SEQ ID NO: 5929 - protein, 581 aa, Homo sapiens
MATEGGGKEMNEIKTQFTTREGLYKLLPHSEYSRPNRVPFNSQGSNPVRVSFVNLNDQSGNGDRLCFNVGRELYFYIYKGVRKAADLSKPIDKRIYKGTQPTCHDFNHLTATAESVSLLVGFSAGQVQLIDPIKKETSKLFNEERLIDKSRVTCVKWVPGSESLFLVAHSSGNMYLYNVEHTCGTTAPHYQLLKQGESFAVHTCKSKSTRNPLLKWTVGEGALNEFAFSPDGKFLACVSQDGFLRVFNFDSVELHGTMKSYFGGLLCVCWSPDGKYIVTGGEDDLVTVWSFVDCRVIARGHGHKSWVSVVAFDPYTTSVEEGDPMEFSGSDEDFQDLLHFGRDRANSTQSRLSKRNSTDSRPVSVTYRFGSVGQDTQLCLWDLTEDILFPHQPLSRARTHTNVMNATSPPAGSNGNSVTTPGNSVPPPLPRSNSLPHSAVSNAGSKSSVMDGAIASGVSKFATLSLHDRKERHHEKDHKRNHSMGHISSKSSDKLNLVTKTKTDPAKTLGTPLCPRMEDVPLLEPLICKKIAHERLTVLIFLEDCIVTACQEGFICTWGRPGKVGSLSSPSQASSPGGTVV

SEQ ID NO: 5930 - protein, 532 aa, Homo sapiens
MMFQDSVAFEDVAVSFTQEEWALLDPSQKNLYRDVMQETFKNLTSVGKTWKVQNIEDEYKNPRRNLSLMREKLCESKESHHCGESFNQIADDMLNRKTLPGITPCESSVCGEVGTGHSSLNTHIRADTGHKSSEYQEYGENPYRNKECKKAFSYLDSFQSHDKACTKEKPYDGKECTETFISHSCIQRHRVMHSGDGPYKCKFCGKAFYFLNLCLIHERIHTGVKPYKCKQCGKAFTRSTTLPVHERTHTGVNADECKECGNAFSFPSEIRRHKRSHTGEKPYECKQCGKVFISFSSIQYHKMTHTGEKPYECKQCGKAFRCGSHLQKHGRTHTGEKPYECRQCGKAFRCTSDLQRHEKTHTEDKPYGCKQCGKGFRCASQLQIHERTHSGEKPHECKECGKVFKYFSSLRIHERTHTGEKPHECKQCGKAFRYFSSLHIHERTHTGDKPYECKVCGKAFTCSSSIRYHERTHTGEKPYECKHCGKAFISNYIRYHERTHTGEKPYQCKQCGKAFIRASSCREHERTHTINR

SEQ ID NO: 5931 - protein, 330 aa, Homo sapiens
MGSRKKEIALQVNISTQELWEEMLSSKGLTVVDVYQGWCGPCKPVVSLFQKMRIEVGLDLLHFALAEADRLDVLEKYRGKCEPTFLFYAGGELVAVVRGANAPLLQKTILDQLEAEKKVLAEGRERKVIKDEALSDEDECVSHGKNNGEDEDMVSSERTCTLAIIKPDAVAHGKTDEIIMKIQEAGFEILTNEERTMTEAEVRLFYQHKAGEEAFEKLVHHMCSGPSHLLILTRTEGFEDVVTTWRTVMGPRDPNVARREQPESLRAQYGTEMPFNAVHGSRDREDADRELALLFPSLKFSDKDTEAPQGGEAEATAGPTEALCFPEDVD

SEQ ID NO: 5932 - protein, 1026 aa, Homo sapiens
MTRTQKGKTFLPHCFYQSLPPRLGWGMILNYSKLKGKEECASVSSVPMVFFSSQYRLHRKSQYLKMAAANLTFSQEVVWQRGLPSIPYSQYSFDHLYNTNDIIHTPQIRKARPQKPVSFKFLGSSSPLTGDTSLAVKTESSANPEKKLKKSKPASTVREAPRPLIHHPCMHPDMLGRPPSLDVNLEEREAWLLPPEKEARAWEATVLEKLNERTARWIQSKRPRRPGASPNKWQSFLRQQYDWSHIRDELTSASDLELLKQLEAEETAEFEDQSVILPPQEKKKPELLLPVYYRLPSYFQQAETVEIMPGNKSTEDIHEKTSLSQPQTQSYFRQVTPRAGKFAYSTDNTFEQEIYFDEVQIIHQIGAKRDQIVLENLNRYNKQLSKVFPETPEKWSAQAIPEASYRPVQGALRWTALPTPAKDMLLQVGEKDVPIKTRRLKKQAKSLQEDVTWELVVLRRMLKEWKTAWALIIEWHHETVENLLQSLGDLHDDVRIKAITTCATAALERPRIATSQRDSDKTIQDLPEVLLPALEAALCDKNAHVRMAAAICQYAIQSHNPLARNIMQTALLKGNSVDSWAAAQCLALEGTATYPVIKRILHQLFTKKNEDTEEQSYILLSYLSEKTTLIHTMLAVELNSCQWKNRIVACQAFSRISGNVCLDMKHKLIQLMWNDWNKEVRRAAAQALGQMSLGKEVHDIIRVKLGQGNSQERVEALYLIGELKLMTAKLLPSFLHCFSDDFTAVRRAACLAAGALQIRDKMVLECLLNLMQRDPYWKIKAFAIRALGQIGQVSPELTDLLLWAIHYEESPGVRLEACRSILALKLQGDRVRDTFLDVLLLENHDAVLKEMYQTMKILNLGNEGNQEMLQEIKNRIKTLSQKDLLTHKILKLEMVMGKVREEAKRVYLKPKGEQGPLTLQTLLQETFQDEMVLPRRPSEVCDTEAVIKPVKPRAPNPWLQSSVPGLTTRSKVRSSLVKDLRTSPEKRIAVGPFRSDYPALYLGKFSERTFFSPIMSSPSGKKGAHL

SEQ ID NO: 5933 - protein, 2342 aa, Homo sapiens
MDGVSSEANEENDNIERPVRRRHSSILKPPRSPLQDLRGGNERVQESNALRNKKNSRRVSFADTIKVFQTESHMKIVRKSEMEGCSAMVPSQLQLLPPGFKRFSCLSLPETETGENLLLIQNKKLEDNYCEITGMNTLLSAPIHTQMQQKEFSIIEHTRERKHANDQTVIFSDENQMDLTSSHTVMITKGLLDNPISEKSTKIDTTSFLANLKLHTEDSRMKKEVNFSVDQNTSSENKIDFNDFIKRLKTGKCSAFPDVPDKENFEIPIYSKEPNSASSTHQMHVSLKEDENNSNITRLFREKDDGMNFTQCHTANIQTLIPTSSETNSRESKGNDITIYGNDFMDLTFNHTLQILPATGNFSEIENQTQNAMDVTTGYGTKASGNKTVFKSKQNTAFQDLSINSADKIHITRSHIMGAETHIVSQTCNQDARILAMTPESIYSNPSIQGCKTVFYSSCNDAMEMTKCLSNMREEKNLLKHDSNYAKMYCNPDAMSSLTEKTIYSGEENMDITKSHTVAIDNQIFKQDQSNVQIAAAPTPEKEMMLQNLMTTSEDGKMNVNCNSVPHVSKERIQQSLSNPLSISLTDRKTELLSGENMDLTESHTSNLGSQVPLAAYNLAPESTSESHSQSKSSSDECEEITKSRNEPFQRSDIIAKNSLTDTWNKDKDWVLKILPYLDKDSPQSADCNQEIATSHNIVYCGGVLDKQITNRNTVSWEQSLFSTTKPLFSSGQFSMKNHDTAISSHTVKSVLGQNSKLAEPLRKSLSNPTPDYCHDKMIICSEEEQNMDLTKSHTVVIGFGPSELQELGKTNLEHTTGQLTTMNRQIAVKVEKCGKSPIEKSGVLKSNCIMDVLEDESVQKPKFPKEKQNVKIWGRKSVGGPKIDKTIVFSEDDKNDMDITKSYTIEINHRPLLEKRDCHLVPLAGTSETILYTCRQDDMEITRSHTTALECKTVSPDEITTRPMDKTVVFVDNHVELEMTESHTVFIDYQEKERTDRPNFELSQRKSLGTPTVICTPTEESVFFPGNGESDRLVANDSQLTPLEEWSNNRGPVEVADNMELSKSATCKNIKDVQSPGFLNEPLSSKSQRRKSLKLKNDKTIVFSENHKNDMDITQSCMVEIDNESALEDKEDFHLAGASKTILYSCGQDDMEITRSHTTALECKTLLPNEIAIRPMDKTVLFTDNYSDLEVTDSHTVFIDCQATEKILEENPKFGIGKGKNLGVSFPKDNSCVQEIAEKQALAVGNKIVLHTEQKQQLFAATNRTTNEIIKFHSAAMDEKVIGKVVDQACTLEKAQVESCQLNNRDRRNVDFTSSHATAVCGSSDNYSCLPNVISCTDNLEGSAMLLCDKDEEKANYCPVQNDLAYANDFASEYYLESEGQPLSAPCPLLEKEEVIQTSTKGQLDCVITLHKDQDLIKDPRNLLANQTLVYSQDLGEMTKLNSKRVSFKLPKDQMKVYVDDIYVIPQPHFSTDQPPLPKKGQSSINKEEVILSKAGNKSLNIIENSSAPICENKPKILNSEEWFAAACKKELKENIQTTNYNTALDFHSNSDVTKQVIQTHVNAGEAPDPVITSNVPCFHSIKPNLNNLNGKTGEFLAFQTVHLPPLPEQLLELGNKAHNDMHIVQATEIHNINIISSNAKDSRDEENKKSHNGAETTSLPPKTVFKDKVRRCSLGIFLPRLPNKRNCSVTGIDDLEQIPADTTDINHLETQPVSSKDSGIGSVAGKLNLSPSQYINEENLPVYPDEINSSDSINIETEEKALIETYQKEISPYENKMGKTCNSQKRTWVQEEEDIHKEKKIRKNEIKFSDTTQDREIFDHHTEEDIDKSANSVLIKNLSRTPSSCSSSLDSIKADGTSLDFSTYRSSQMESQFLRDTICEESLREKLQDGRITIREFFILLQVHILIQKPRQSNLPGNFTVNTPPTPEDLMLSQYVYRPKIQIYREDCEARRQKIEELKLSASNQDKLLVDINKNLWEKMRHCSDKELKAFGIYLNKIKSCFTKMTKVFTHQGKVALYGKLVQSAQNEREKLQIKIDEMDKILKKIDNCLTEMETETKNLEDEEKNNPVEEWDSEMRAAEKELEQLKTEEEELQRNLLELEVQKEQTLAQIDFMQKQRNRTEELLDQLSLSEWDVVEWSDDQAVFTFVYDTIQLTITFEESVVGFPFLDKRYRKIVDVNFQSLLDEDQAPPSSLLVHKLIFQYVEEKESWKKTCTTQHQLPKMLEEFSLVVHHCRLLGEEIEYLKRWGPNYNLMNIDINNNELRLLFSSSAAFAKFEITLFLSAYYPSVPLPSTIQNHVGNTSQDDIATILSKVPLENNYLKNVVKQIYQDLFQDCHFYH

SEQ ID NO: 5934 - protein, 1655 aa, Homo sapiens
MSVMQSGTQMIKLKRGTKGLVRLFYLDEHRTRLRWRPSRKSEKAKILIDSIYKVTEGRQSEIFHRQAEGNFDPSCCFTIYHGNHMESLDLITSNPEEARTWITGLKYLMAGISDEDSLAKRQRTHDQWVKQTFEEADKNGDGLLNIEEIHQLMHKLNVNLPRRKVRQMFQEADTDENQGTLTFEEFCVFYKMMSLRRDLYLLLLSYSDKKDHLTVEELAQFLKVEQKMNNVTTDYCLDIIKKFEVSEENKVKNVLGIEGFTNFMRSPACDIFNPLHHEVYQDMDQPLCNYYIASSHNTYLTGDQLLSQSKVDMYARVLQEGCRCVEVDCWDGPDGEPVVHHGYTLTSKILFRDVVETINKHAFVKNEFPVILSIENHCSIQQQRKIAQYLKGIFGDKLDLSSVDTGECKQLPSPQSLKGKILVKGKKLPYHLGDDAEEGEVSDEDSADEIEDECKFKLHYSNGTTEHQVESFIRKKLESLLKESQIRDKEDPDSFTVRALLKATHEGLNAHLKQSPDVKESGKKSHGRSLMTNFGKHKKTTKSRSKSYSTDDEEDTQQSTGKEGGQLYRLGRRRKTMKLCRELSDLVVYTNSVAAQDIVDDGTTGNVLSFSETRAHQVVQQKSEQFMIYNQKQLTRIYPSAYRIDSSNFNPLPYWNAGCQLVALNYQSEGRMMQLNRAKFKANGNCGYVLKPQQMCKGTFNPFSGDPLPANPKKQLILKVISGQQLPKPPDSMFGDRGEIIDPFVEVEIIGLPVDCCKDQTRVVDDNGFNPVWEETLTFTVHMPEIALVRFLVWDHDPIGRDFVGQRTVTFSSLVPGYRHVYLEGLTEASIFVHITINEIYGKNRQLQGLKGLFNKNPRHSSSENNSHYVRKRSIGDRILRRTASAPAKGRKKSKMGFQEMVEIKDSVSEATRDQDGVLRRTTRSLQARPVSMPVDRNLLGALSLPVSETAKDIEGKENSLAEDKDGRRKGKASIKDPHFLNFNKKLSSSSSALLHKDTSQGDTIVSTAHMSVTGEQLGMSSPRGGRTTSNATSNCQENPCPSKSLSPKQHLAPDPVVNPTQDLHGVKIKEKGNPEDFVEGKSILSGSVLSHSNLEIKNLEGNRGKGRAATSFSLSDVSMLCSDIPDLHSTAILQESVISHLIDNVTLTNENEPGSSISALIGQFDETNNQALTVVSHLHNTSVMSGHCPLPSLGLKMPIKHGFCKGKSKSSFLCSSPELIALSSSETTKHATNTVYETTCTPISKTKPDDDLSSKAKTAALESNLPGSPNTSRGWLPKSPTKGEDWETLKSCSPASSPDLTLEDVIADPTLCFNSGESSLVEIDGESENLSLTTCEYRREGTSQLASPLKLKYNQGVVEHFQRGLRNGYCKETLRPSVPEIFNNIQDVKTQSISYLAYQGAGFVHNHFSDSDAKMFQTCVPQQSSAQDMHVPVPKQLAHLPLPALKLPSPCKSKSLGDLTSEDIACNFESKYQCISKSFVTTGIRDKKGVTVKTKSLEPIDALTEQLRKLVSFDQEDNCQVLYSKQDANQLPRALVRKLSSRSQSRVRNIASRAKEKQEANKQKVPNPSNGAGVVLRNKPSAPTPAVNRHSTGSYIAGYLKNTKGGGLEGRGIPEGACTALHYGHVDQFCSDNSVLQTEPSSDDKPEIYFLLRL

SEQ ID NO: 5935 - protein, 295 aa, Homo sapiens
MRNTSKELQGATHRYAPCDWYYHVPVKRSEKAVDAPPASQIPGLSNLGDSHSENLPGTRRYWIKETDSEYVKLAKQGGRPDLLKHFAPGTRKGSPVAYSLPDWYIHHSKPPTASQQEVRAVSMPDYMVHEEFNPDQANGSYASRRGPFDFDMKTVWQREAEELEKEKKKLRLPAIDSKYLSKAGTPLGPKNPAGSRLSFPPVPGQKNSSPTNFSKLISNGYKDEWLQQQQRADSDKRTPKTSRASVLSQSPRDLEGPQDAARLQDAEASEGPEDTPESSQSPEESVSASTPAELK

SEQ ID NO: 5936 - protein, 1205 aa, Homo sapiens
MTKKEEPPPSRVPRAVRVASLLSEGEELSGDDQGDEEEDDHAYEGVPNGGWHTSSLSLSLPSTIAAPHPMDGPPGGSTPVTPVIKAGWLDKNPPQGSYIYQKRWVRLDTDHLRYFDSNKDAYSKRFISVACISHVAAIGDQKFEVITNNRTFAFRAESDVERKEWMQALQQAMAEQRARARLSSAYLLGVPGSEQPDRAGSLELRGFKNKLYVAVVGDKVQLYKNLEEYHLGIGITFIDMSVGNVKEVDRRSFDLTTPYRIFSFSADSELEKEQWLEAMQGAIAEALSTSEVAERIWAAAPNRFCADCGAPQPDWASINLCVVICKRCAGEHRGLGAGVSKVRSLKMDRKVWTETLIELFLQLGNGAGNRFWAANVPPSEALQPSSSPSTRRCHLEAKYREGKYRRYHPLFGNQEELDKALCAAVTTTDLAETQALLGCGAGINCFSGDPEAPTPLALAEQAGQTLQMEFLRNNRTTEVPRLDSMKPLEKHYSVVLPTVSHSGFLYKTASAGKLLQDRRAREEFSRRWCVLGDGVLSYFENERAVTPNGEIRASEIVCLAVPPPDTHGFEHTFEVYTEGERLYLFGLESAEQAHEWVKCIAKAFVPPLAEDLLARDFERLGRLPYKAGLSLQRAQEGWFSLSGSELRAVFPEGPCEEPLQLRKLQELSIQGDSENQVLVLVERRRTLYIQGERRLDFMGWLGAIQKAAASMGDTLSEQQLGDSDIPVIVYRCVDYITQCGLTSEGIYRKCGQTSKTQRLLESLRQDARSVHLKEGEQHVDDVSSALKRFLRDLPDGLFTRAQRLTWLEASEIEDEEEKVSRYRELLVRLPPVNRATVKALISHLYCVQCFSDTNQMNVHNLAIVFGPTLFQTDGQDYKAGRVVEDLINHYVVVFSVDEEELRKQREEITAIVKMRVAGTASGTQHAGDFICTVYLEEKKAETEQHIKVPASMTAEELTLEILDRRNVGIREKDYWTCFEVNEREEAERPLHFAEKVLPILHGLGTDSHLVVKKHQAMEAMLLYLASRVGDTKHGMMKFREDRSLLGLGLPSGGFHDRYFILNSSCLRLYKEVRSQRPWSGAPETSHRPEKEWPIKSLKVYLGVKKKLRPPTCWGFTVVHETEKHEKQQWYLCCDTQMELREWFATFLFVQHDGLVWPSEPSRVSRAVPEVRLGSVSLIPLRGSENEMRRSVAAFTADPLSLLRNV

SEQ ID NO: 5937 - protein, 376 aa, Homo sapiens
MGGGGSALRVCADHRGGINWLSLSPDGQRLLTGSEDGTARLWSTADGQCCALLQGHESYVTFCQLEDEAAFTCSADCTIRRWDVLTGQCLQVYRGHTSIVNRILVANNQLFSSSYDRTARVWSVDKGQMSREFRGHRNCVLTLAYSAPWDLPSTPCAEEAAAGGLLVTGSTDGTAKVWQVASGCCHQTLRGHTGAVLCLVLDTPGHTAFTGSTDATIRAWDILSGEQLRVFREHRGSVICLELVNRLVYSGSADRTVKCWLADTGECVRTFTAHRRNVSALKYHAGTLFTGSGDACARAFDAQSGELRRVFRGHTFIINCIQVHGQVLYTASHDGALRLWDVRGLRGAPRPPPPMRSLSRLFSNKVGCAAAPLQPA

SEQ ID NO: 5938 - protein, 312 aa, Homo sapiens
MDTGNWSQVAEFIILGFPHLQGVQIYLFLLLLLIYLMTVLGNLLIFLVVCLDSRLHTPMYHFVSILSFSELGYTAATIPKMLANLLSEKKTISFSGCLLQIYFFHSLGATECYLLTAMAYDRYLAICRPLHYPTLMTPTLCAEIAIGCWLGGLAGPVVEISLISRLPFCGPNRIQHVFCDFPPVLSLACTDTSINVLVDFVINSCKILATFLLILCSYVQIICTVLRIPSAAGKRKAISTCASHFTVVLIFYGSILSMYVQLKKSYSLDYDQALAVVYSVLTPFLNPFIYSLRNKEIKEAVRRQLKRIGILA

SEQ ID NO: 5939 - protein, 1160 aa, Homo sapiens
MHPQSLAEEEIKTEQEVVEGMDISTRSKDPGSAERTAQKRKFPSPPHSSNGHSPQDTSTSPIKKKKKPGLLNSNNKEQSELRHGPFYYMKQPLTTDPVDVVPQDGRNDFYCWVCHREGQVLCCELCPRVYHAKCLRLTSEPEGDWFCPECEKITVAECIETQSKAMTMLTIEQLSYLLKFAIQKMKQPGTDAFQKPVPLEQHPDYAEYIFHPMDLCTLEKNAKKKMYGCTEAFLADAKWILHNCIIYNGGNHKLTQIAKVVIKICEHEMNEIEVCPECYLAACQKRDNWFCEPCSNPHPLVWAKLKGFPFWPAKALRDKDGQVDARFFGQHDRAWVPINNCYLMSKEIPFSVKKTKSIFNSAMQEMEVYVENIRRKFGVFNYSPFRTPYTPNSQYQMLLDPTNPSAGTAKIDKQEKVKLNFDMTASPKILMSKPVLSGGTGRRISLSDMPRSPMSTNSSVHTGSDVEQDAEKKATSSHFSASEESMDFLDKSTASPASTKTGQAGSLSGSPKPFSPQLSAPITTKTDKTSTTGSILNLNLDRSKAEMDLKELSESVQQQSTPVPLISPKRQIRSRFQLNLDKTIESCKAQLGINEISEDVYTAVEHSDSEDSEKSDSSDSEYISDDEQKSKNEPEDTEDKEGCQMDKEPSAVKKKPKPTNPVEIKEELKSTSPASEKADPGAVKDKASPEPEKDFSEKAKPSPHPIKDKLKGKDETDSPTVHLGLDSDSESELVIDLGEDHSGREGRKNKKEPKEPSPKQDVVGKTPPSTTVGSHSPPETPVLTRSSAQTSAAGATATTSTSSTVTVTAPAPAATGSPVKKQRPLLPKETAPAVQRVVWNSSTVQQKEITQSPSTSTITLVTSTQSSPLVTSSGSMSTLVSSVNADLPIATASADVAADIAKYTSKMMDAIKGTMTEIYNDLSKNTTGSTIAEIRRLRIEIEKLQWLHQQELSEMKHNLELTMAEMRQSLEQERDRLIAEVKKQLELEKQQAVDETKKKQWCANCKKEAIFYCCWNTSYCDYPCQQAHWPEHMKSCTQSATAPQQEADAEVNTETLNKSSQGSSSSTQSAPSETASASKEKETSAEKSKESGSTLDLSGSRETPSSILLGSNQGSDHSRSNKSSWSSSDEKRGSTRSDHNTSTSTKSLLPKESRLDTFWD

SEQ ID NO: 5940 - protein, 447 aa, Homo sapiens
MELLKLNRSVQGTGPGPGASLCRPGAPLLNSSSVGNLSCEPPRIRGAGTRELELAIRITLYAVIFLMSVGGNMLIIVVLGLSRRLRTVTNAFLLSLAVSDLLLAVACMPFTLLPNLMGTFIFGTVICKAVSYLMGVSVSVSTLSLVAIALERYSAICRPLQARVWQTRSHAARVIVATWLLSGLLMVPYPVYTVVQPVGPRVLQCVHRWPSARVRQTWSVLLLLLLFFIPGVVMAVAYGLISRELYLGLRFDGDSDSDSQSRVRNQGGLPGAVHQNGRCRPETGAVGEDSDGCYVQLPRSRPALELTALTAPGPGSGSRPTQAKLLAKKRVVRMLLVIVVLFFLCWLPVYSANTWRAFDGPGAHRALSGAPISFIHLLSYASACVNPLVYCFMHRRFRQACLETCARCCPRPPRARPRALPDEDPPTPSIASLSRLSYTTISTLGPG

SEQ ID NO: 5941 - protein, 408 aa, Homo sapiens
MASKKFAVKCGNFAVLVDLHILPQGSNKDTSWFSEQKKEEVCLLLKETIDSRVQEYLEVRKQHRPSNAEFTRSNPLSLKGYGFQITAYFLKRGIRLRCIRSTQNAELCVFPDRFVVCVSQLAFSRDLLASQNEDLTERVLHGVSDYFAECAESSLPPSAKLRRNALKEIVKRTETKSSVTSKSQTRRDTVETSSDSVIAEIARRRNDGQASSSPPSESMGQAKDSIKAAESHWGLPVQKLEKVNQTQPEDTSGQQKPHPGERLKTGLLSRSPVCSCESASPCPKQSPRVAKTQQKRRNCSSAEDFDHHGRVSLGSDRLVPREIIVEKSKAVRVLPASELSDPGLLLKQDLAKTTSKEELHVLESLSSRHLMKNNPGQAQQTGLATNTERLSTIQNSPTKKRKKYERGH

SEQ ID NO: 5942 - protein, 1938 aa, Homo sapiens
MQSFREQSSYHGNQQSYPQEVHGSSRLEEFSPRQAQMFQNFGGTGGSSGSSGSGSGGGRRGAAAAAAAMASETSGHQGYQGFRKEAGDFYYMAGNKDPVTTGTPQPPQRRPSGPVQSYGPPQGSSFGNQYGSEGHVGQFQAQHSGLGGVSHYQQDYTGPFSPGSAQYQQQASSQQQQQQVQQLRQQLYQSHQPLPQATGQPASSSSHLQPMQRPSTLPSSAAGYQLRVGQFGQHYQSSASSSSSSSFPSPQRFSQSGQSYDGSYNVNAGSQYEGHNVGSNAQAYGTQSNYSYQPQSMKNFEQAKIPQGTQQGQQQQQPQQQQHPSQHVMQYTNAATKLPLQSQVGQYNQPEVPVRSPMQFHQNFSPISNPSPAASVVQSPSCSSTPSPLMQTGENLQCGQGSVPMGSRNRILQLMPQLSPTPSMMPSPNSHAAGFKGFGLEGVPEKRLTDPGLSSLSALSTQVANLPNTVQHMLLSDALTPQKKTSKRPSSSKKADSCTNSEGSSQPEEQLKSPMAESLDGGCSSSSEDQGERVRQLSGQSTSSDTTYKGGASEKAGSSPAQGAQNEPPRLNASPAAREEATSPGAKDMPLSSDGNPKVNEKTVGVIVSREAMTGRVEKPGGQDKGSQEDDPAATQRPPSNGGAKETSHASLPQPEPPGGGGSKGNKNGDNNSNHNGEGNGQSGHSAAGPGFTSRTEPSKSPGSLRYSYKDSFGSAVPRNVSGFPQYPTGQEKGDFTGHGERKGRNEKFPSLLQEVLQGYHHHPDRRYSRSTQEHQGMAGSLEGTTRPNVLVSQTNELASRGLLNKSIGSLLENPHWGPWERKSSSTAPEMKQINLTDYPIPRKFEIEPQSSAHEPGGSLSERRSVICDISPLRQIVRDPGAHSLGHMSADTRIGRNDRLNPTLSQSVILPGGLVSMETKLKSQSGQIKEEDFEQSKSQASFNNKKSGDHCHPPSIKHESYRGNASPGAATHDSLSDYGPQDSRPTPMRRVPGRVGGREGMRGRSPSQYHDFAEKLKMSPGRSRGPGGDPHHMNPHMTFSERANRSSLHTPFSPNSETLASAYHANTRAHAYGDPNAGLNSQLHYKRQMYQQQPEEYKDWSSGSAQGVIAAAQHRQEGPRKSPRQQQFLDRVRSPLKNDKDGMMYGPPVGTYHDPSAQEAGRCLMSSDGLPNKGMELKHGSQKLQESCWDLSRQTSPAKSSGPPGMSSQKRYGPPHETDGHGLAEATQSSKPGSVMLRLPGQEDHSSQNPLIMRRRVRSFISPIPSKRQSQDVKNSSTEDKGRLLHSSKEGADKAFNSYAHLSHSQDIKSIPKRDSSKDLPSPDSRNCPAVTLTSPAKTKILPPRKGRGLKLEAIVQKITSPNIRRSASSNSAEAGGDTVTLDDILSLKSGPPEGGSVAVQDADIEKRKGEVASDLVSPANQELHVEKPLPRSSEEWRGSVDDKVKTETHAETVTAGKEPPGAMTSTTSQKPGSNQGRPDGSLGGTAPLIFPDSKNVPPVGILAPEANPKAEEKENDTVTISPKQEGFPPKGYFPSGKKKGRPIGSVNKQKKQQQPPPPPPQPPQIPEGSADGEPKPKKQRQRRERRKPGAQPRKRKTKQAVPIVEPQEPEIKLKYATQPLDKTDAKNKSFYPYIHVVNKCELGAVCTIINAEEEEQTKLVRGRKGQRSLTPPPSSTESKALPASSFMLQGPVVTESSVMGHLVCCLCGKWASYRNMGDLFGPFYPQDYAATLPKNPPPKRATEMQSKVKVRHKSASNGSKTDTEEEEEQQQQQKEQRSLAAHPRFKRRHRSEDCGGGPRSLSRGLPCKKAATEGSSEKTVLDSKPSVPTTSEGGPELELQIPELPLDSNEFWVHEGCILWANGIYLVCGRLYGLQEALEIAREMKCSHCQEAGATLGCYNKGCSFRYHYPCAIDADCLLHEENFSVRCPKHKVRLWR

SEQ ID NO: 5943 - protein, 1476 aa, Homo sapiens
MTSSSPAGLEGSDLSSINTMMSAVMSVGKVTENGGSPQGIKSPSKPPGPNRIGRRNQETKEEKSSYNCPLCEKICTTQHQLTMHIRQHNTDTGGADHSCSICGKSLSSASSLDRHMLVHSGERPYKCTVCGQSFTTNGNMHRHMKIHEKDPNSATATAPPSPLKRRRLSSKRKLSHDAESEREDPAPAKKMVEDGQSGDLEKKADEVFHCPVCFKEFVCKYGLETHMETHSDNPLRCDICCVTFRTHRGLLRHNALVHKQLPRDAMGRPFIQNNPSIPAGFHDLGFTDFSCRKFPRISQAWCETNLRRCISEQHRFVCDTCDKAFPMLCSLALHKQTHVAADQGQEKPQATPLPGDALDQKGFLALLGLQHTKDVRPAPAEEPLPDDNQAIQLQTLKCQLPQDPGCTNLLSLSPFEAASLGGSLTVLPATKDSIKHLSLQPFQKGFIIQPDSSIVVKPISGESAIELADIQQILKMAASAPPQISLPPFSKAPAAPLQAIFKHMPPLKPKPLVTPRTVVATSTPPPLINAQQASPGCISPSLPPPPLKLLKGSVEAASNAHLLQSKSGTQPHAATRLSLQQPRAELPGQPEMKTQLEQDSIIEALLPLSMEAKIKQEITEGELKAFMTAPGGKKTPAMRKVLYPCRFCNQVFAFSGVLRAHVRSHLGISPYQCNICDYIAADKAALIRHLRTHSGERPYICKICHYPFTVKANCERHLRKKHLKATRKDIEKNIEYVSSSAAELVDAFCAPDTVCRLCGEDLKHYRALRIHMRTHCGRGLGGGHKGRKPFECKECSAAFAAKRNCIHHILKQHLHVPEQDIESYVLAADGLGPAEAPAAEASGRGEDSGCAALGDCKPLTAFLEPQNGFLHRGPTQPPPPHVSIKLEPASSFAVDFNEPLDFSQKGLALVQVKQENISFLSPSSLVPYDCSMEPIDLSIPKNFRKGDKDLATPSEAKKPEEEAGSSEQPSPCPAPGPSLPVTLGPSGILESPMAPAPAATPEPPAQPLQGPVQLAVPIYSSALVSSPPLVGSSALLSGTALLRPLRPKPPLLLPKPPVTEELPPLASIAQIISSVSSAPTLLKTKVADPGPASTGSNTTASDSLGGSVPKAATTATPAATTSPKESSEPPAPASSPEAASPTEQGPAGTSKKRGRKRGMRSRPRANSGGVDLDSSGEFASIEKMLATTDTNKFSPFLQTAEDNTQDEVAGAPADHHGPSDEEQGSPPEDKLLRAKRNSYTNCLQKITCPHCPRVFPWASSLQRHMLTHTGQKPFPCQKCDAFFSTKSNCERHQLRKHGVTTCSLRRNGLIPQSKESDVGSHDSTGERPYKCQTCERTFTLKHSLVRHQRIHQKARHAKHHGKDSDKEERGEEDSENESTHSGNNAVSENEAELAPNASNHMAVTRSRKEGLASATKDCSHREEKVTAGWPSEPGQGDLNPESPAALGQDLLEPRSKRPAHPILATADGASQLVGME

SEQ ID NO: 5944 - protein, 313 aa, Homo sapiens
MSPENQSSVSEFLLLGLPIRPEQQAVFFTLFLGMYLTTVLGNLLIMLLIQLDSHLHTPMYFFLSHLALTDISFSSVTVPKMLMDMRTKYKSILYEECISQMYFFIFFTDLDSFLITSMAYDRYVAICHPLHYTVIMREELCVFLVAVSWILSCASSLSHTLLLTRLSFCAANTIPHVFCDLAALLKLSCSDIFLNELVMFTVGVVVITLPFMCILVSYGYIGATILRVPSTKGIHKALSTCGSHLSVVSLYYGSIFGQYLFPTVSSSIDKDVIVALMYTVVTPMLNPFIYSLRNRDMKEALGKLFSRATFFSW

SEQ ID NO: 5945 - protein, 546 aa, Homo sapiens
IPREELDERIAREEFRRPRESLLNICTEFYKHCGPRLKILQNLAGEPRVIALELLDVKSHMRLAEIAHSLLKLAPYDTQTMESRGLRRYIMEMLPITDWTAEAVRPALILILKRLDRMFNKIHKMPTLRRQVEWEPASNLIEGVCLTLQRQPIISFLPHLRSLINVCVNLVMGVVGPSSVADGLPLLHLSPYLSPPLPFSTAVVRLVALQIQALKEDFPLSHVISPFTNQERREGMLLNLLIPFVLTVGSGSKDSPWLEQPEVQLLLQTVINVLLPPRIISTSRSKNFMLESSPAHCSTPGDAGKDLRREGLAESTSQAAYLALKVILVCFERQLGSQWYWLSLQVKEMALRKVGGLALWDFLDFIVRTRIPIFVLLRPFIQCKLLAQPAENHEELSARQHIADQLERRFIPRPLCKSSLIAEFNSELKILKEAVHSGSAYQGKTSISTVGTSTSAYRLSLATMSRSNTGTGTVWEQDSEPSQQASQDTLSRTDEEDEENDSISMPSVVSEQEAYLLSAIGRRRFSSHVSSMSVPQAEVGMLPSQR

SEQ ID NO: 5946 - protein, 325 aa, Homo sapiens
MLWEETGAAPAPARASDLPYRIHFLSSGLILVTRQLTEDGKLIVEGMLDIFWGVKRPIQLKIQDEKPFSSFTSMKSSDVFSSKGMTRWGEFDDLYRISELDRTQIPMSEKRNSQEDYLSYHSNTLKPHAKDEPDSPVLYRTMSEAALVRKRMKPLMMDRKERQKNRASINGHFYNHETSIFIPAFESETKVRVNSNMRTEEVIKQLLQKFKIENSPQDFALHIIFATGEQRRLKKTDIPLLQRLLQGPSEKNARIFLMDKDAEEISSDVAQYINFHFSLLESILQRLNEEEKREIQRIVTKFNKEKAIILKCLQNKLVIKTETTV

SEQ ID NO: 5947 - protein, 576 aa, Homo sapiens
MERGWPQGDSCPGERPAACRRAHSVCDSLDLHGASAGRAAAALQAALCAASEQPARPRSVCSGGPEPPPTGARGLLLGLLRPRLGRRGLAPSGPPVSPAPSPASSPAPTRRSRTRGEPTPRPRPASMTFLEVNRLELAAAEAPGAGLGRAGSAGFLRGAALWSSQRWPVLRGGRGPEGPRRGLAALRKSFSFRLRRGQEVRRSESGLLARPPRARTRSDGDAGSLGAFPSRRDLLGSDAPRAAPEPGRPRTAAGLWRLLTSRFRRREPAPAAPLWGRRAAAAPELLRAPSDSFVNSQEWTLSRSVPELKVGIVGNLSSGKSALVHRYLTGTYVQEESPEGGRFKKEIVVDGQSYLLLIRDEGGPPELQFAAWVDAVVFVFSLEDEISFQTVYNYFLRLCSFRNASEVPMVLVGTQDAISAANPRVIDDSRARKLSTDLKRCTYYETCATYGLNVERVFQDVAQKVVALRKKQQLAIGPCKSLPNSPSHSAVSAASIPAVHINQATNGGGSAFSDYSSSVPSTPSISQRELRIETIAASSTPTPIRKQSKRRSNIFTICATVSNFSSTKRPFQLLPN

SEQ ID NO: 5948 - protein, 462 aa, Homo sapiens
MDNGMFSGFIMIKNLLLFCISMNLSSHFGFSQMPTSSVKDETNDNITIFTRILDGLLDGYDNRLRPGLGERITQVRTDIYVTSFGPVSDTEMEYTIDVFFRQSWKDERLRFKGPMQRLPLNNLLASKIWTPDTFFHNGKKSIAHNMTTPNKLLRLEDDGTLLYTMRLTISAECPMQLEDFPMDAHACPLKFGSYAYPNSEVVYVWTNGSTKSVVVAEDGSRLNQYHLMGQTVGTENISTSTGEYTIMTAHFHLKRKIGYFVIQTYLPCIMTVILSQVSFWLNRESVPARTVFGVTTVLTMTTLSISARNSLPKVAYATAMDWFIAVCYAFVFSALIEFATVNYFTKRGWAWDGKKALEAAKIKKKREVILNKSTNAFTTGKMSHPPNIPKEQTPAGTSNTTSVSVKPSEEKTSESKKTYNSISKIDKMSRIVFPVLFGTFNLVYWATYLNREPVIKGAASPK

SEQ ID NO: 5949 - protein, 318 aa, Homo sapiens
MQRANHSTVTQFILVGFSVFPHLQLMLFLLFLLMYLFTLLGNLLIMATVWSERSLHTPMYLFLCALSVSEILYTVAIIPRMLADLLSTQRSIAFLACASQMFFSFSFGFTHSFLLTVMGYDRYVAICHPLRYNVLMSPRGCACLVGCSWAGGLVMGMVVTSAIFHLAFCGHKEIHHFACHVPPLLKLACGDDVLVVAKGVGLVCITALLGCFLLILLSYAFIVAAILKIPSAEGRNKAFSTCASHLTVVVVHYGFASVIYLKPKSPQSLEGDTLMGITYTVLTPFLSPIIFSLRNKELKVAMKKTFFSKLYPEKNVMM

SEQ ID NO: 5950 - protein, 222 aa, Homo sapiens
MGDIPAVGLSSWKASPGKVTEAVKEAIDAGYRHFDCAYFYHNEREVGAGIRCKIKEGAVRREDLFIATKLWCTCHKKSLVETACRKSLKALKLNYLDLYLIHWPMGFKPPHPEWIMSCSELSFCLSHPRVQDLPLDESNMVIPSDTDFLDTWEILIRFQIQRNVIVIPGSITPSHIKENIQVFDFELTQHDMDNILSLNRNLRLAMFPITKNHKDYPFHIEY

SEQ ID NO: 5951 - protein, 258 aa, Homo sapiens
MQALNITPEQFSRLLRDHNLTREQFIALYRLRPLVYTPELPGRAKLALVLTGVLIFALALFGNALVFYVVTRSKAMRTVTNIFICSLALSDLLITFFCIPVTMLQNISDNWLGGAFICKMVPFVQSTAVVTEILTMTCIAVERHQGLVHPFKMKWQYTNRRAFTMLGVVWLVAVIVGSPMWHVQQLEIKYDFLYEKEHICCLEEWTSPVHQKIYTTFILVILFLLPLMEEETSCHYDGDSGGSLCCVLGTIPCCPYDD

SEQ ID NO: 5952 - protein, 1194 aa, Homo sapiens
MMCEVMPTISEDGRRGSALGPDEAGGELERLMVTMLTERERLLETLREAQDGLATAQLRLRELGHEKDSLQRQLSIALPQEFAALTKELNLCREQLLEREEEIAELKAERNNTRLLLEHLECLVSRHERSLRMTVVKRQAQSPGGVSSEVEVLKALKSLFEHHKALDEKVRERLRMALERVAVLEEELELSNQETLNLREQLSRRRSGLEEPGKDGDGQTLANGLGPGGDSNRRTAELEEALERQRAEVCQLRERLAVLCRQMSQLEEELGTAHRELGKAEEANSKLQRDLKEALAQREDMEERITTLEKRYLSAQREATSLHDANDKLENELASKESLYRQSEEKSRQLAEWLDDAKQKLQQTLQKAETLPEIEAQLAQRVAALNKAEERHGNFEERLRQLEAQLEEKNQELQRARQREKMNDDHNKRLSETVDKLLSESNERLQLHLKERMGALEEKNSLSEEIANMKKLQDELLLNKEQLLAEMERMQMEIDQLRGRPPSSYSRSLPGSALELRYSQAPTLPSGAHLDPYVAGSGRAGKRGRWSGVKEEPSKDWERSAPAGSIPPPFPGELDGSDEEEAEGMFGAELLSPSGQADVQTLAIMLQEQLEAINKEIKLIQEEKETTEQRAEELESRVSSSGLDSLGRYRSSCSLPPSLTTSTLASPSPPSSGHSTPRLAPPSPAREGTDKANHVPKEEAGAPRGEGPAIPGDTPPPTPRSARLERMTQALALQAGSLEDGGPPRGSEGTPDSLHKAPKKKSIKSSIGRLFGKKEKGRMGPPGRDSSSLAGTPSDETLATDPLGLAKLTGPGDKDRRNKRKHELLEEACRQGLPFAAWDGPTVVSWLELWVGMPAWYVAACRANVKSGAIMANLSDTEIQREIGISNPLHRLKLRLAIQEMVSLTSPSAPASSRTSTGNVWMTHEEMESLTATTKPETKEISWEQILAYGDMNHEWVGNDWLPSLGLPQYRSYFMESLVDARMLDHLNKKELRGQLKMVDSFHRVSLHYGIMCLKRLNYDRKDLERRREESQTQIRDVMVWSNERVMGWVSGLGLKEFATNLTESGVHGALLALDETFDYSDLALLLQIPTQNAQARQLLEKEFSNLISLGTDRRLDEDSAKSFSRSPSWRKMFREKDLRGVTPDSAEMLPPNFRSAAAGALGSPGLPLRKLQPEGQTSGSSRADGVSVRTYSC

SEQ ID NO: 5953 - protein, 1132 aa, Homo sapiens
MGANASNYPHSCSPRVGGNSQAQQTFIGTSSYSQQGYGCESKLYSLDHGHEKPQDKKKRTSGLATLKKKFIKRRKSNRSADHAKQMRELLSGWDVRDVNALVEEYEGTSALKELSLQASLARPEARTLQKDMADLYEYKYCTDVDLIFQETCFPVHRAILAARCPFFKTLLSSSPEYGAEIIMDINTAGIDMPMFSALLHYLYTGEFGMEDSRFQNVDILVQLSEEFGTPNSLDVDMRGLFDYMCYYDVVLSFSSDSELVEAFGGNQNCLDEELKAHKAVISARSPFFRNLLQRRIRTGEEITDRTLRTPTRIILDESIIPKKYATVILHCMYTDVVDLSVLHCSPSVGSLSEVQALVAGKPNMTRAEEAMELYHIALFLEFNMLAQGCEDIIAESISLDTLIAILKWSSHPYGSKWVHRQALHFLCEEFSQVMTSDVFYELSKDHLLTAIQSDYLQASEQDILKYLIKWGEHQLMKRIADREPNLLSGTAHSVNKRGVKRRDLDMEELREILSSLLPFVRIEHILPINSEVLSDAMKRGLISTPPSDMLPTTEGGKSNAWLRQKNAGIYVRPRLFSPYVEEAKSVLDEMMVEQTDLVRLRMVRMSNVPDTLYMVNNAVPQCCHMISHQQISSNQSSPPSVVANEIPVPRLLIMKDMVRRLQELRHTEQVQRAYALNCGEGATVSYEIQIRVLREFGLADAAAELLQNPHKFFPDERFGDESPLLTMRQPGRCRVNSTPPAETMFTDLDSFVAFHPPLPPPPPPYHPPATPIHNQLKAGWKQRPPSQHPSRSFSYPCNHSLFHSRTAPKAGPPPVYLPSVKAAPPDCTSTAGLGRQTVAAAAATTTSTATAAAAAASEKQVRTQPVLNDLMPDIAVGVSTLSLKDRRLPELAVDTELSQSVSEAGPGPPQHLSCIPQRHTHTSRKKHTLEQKTDTRENPQEYPDFYDFSNAACRPSTPALSRRTPSPSQGGYFGPDLYSHNKASPSGLKSAYLPGQTSPKKQEEARREYPLSPDGHLHRQKNEPIHLDVVEQPPQRSDFPLAAPENASTGPAHVRGRTAVETDLTFGLTPNRPSLSACSSEAPEERSGRRLADSESLGHGAQRNTDLEREDSISRGRRSPSKPDFLYKKSAL

SEQ ID NO: 5954 - protein, 611 aa, Homo sapiens
MACCLCQFKNSIEAVCKTVKLHCNSACLTNTTHCPEEASVGNPEGAFMKVLQARKNYTSTELIIEPEEPSDSSGINLSGFGSEQLDTNDESDVTSTLSYILPYFSAVNLDVKSLLLPFIKLPTTGNSLAKIQTVGKNRQRLNRVLMGPRSIQKRHFKEVGRQSIRREQGAQASVENTAEEKRLGSPAPRELKQPHTQQGPEKLAGNAVYTKPSFTQEHKAAVSVLKPFSKGAPSTSSPAKALPQVRDRWKDLTHAISILESAKARVTNMKTSKPIVHSRKKYRFHKTRSRMTHRTPKVKKSPKVRKKSYLSRLMLSNRLPFSAAKSLINSPSQGAFSSLRDLSPQENPFLEVSAPSEHFIENNNTKDTTARNAFEENVFMENTNMPEGTISENTNYNHPPEADSAGTAFNLGPTVKQTETKWEYNNVGTDLSPEPKSFNYPLLSSPGDQFEIQLTQQLQSVIPNNNVRRLIAHVIRTLKMDCSGAHVQVTCAKLVSRTGHLMKLLSGQQEVKASKIEWDTDQWKTENYINESTEAQSEQKEKSLEFTKELPGYGYTKKLILALIVTGILTILIILLCLIEICCHRRSLQEDEEGFSRDSEAPTEEESEALP

SEQ ID NO: 5955 - protein, 867 aa, Homo sapiens
MDNPQALPLFLLLASLVGILTLRASSGLQQTNFSSAFSSDSKSSSQGLGVEVPSIKPPSWKVPDQFLDSKASAGISDSSWFPEALSSNMSGSFWSNVSAEGQDLSPVSPFSETPGSEVFPDISDPQVPAKDPKPSFTVKTPASNISTQVSHTKLSVEAPDSKFSPDDMDLKLSAQSPESKFSAETHSAASFPQQVGGPLAVLVGTTIRLPLVPIPNPGPPTSLVVWRRGSKVLAAGGLGPGAPLISLDPAHRDHLRFDQARGVLELASAQLDDAGVYTAEVIRAGVSQQTHEFTVGVYEPLPQLSVQPKAPETEEGAAELRLRCLGWGPGRGELSWSRDGRALEAAESEGAETPRMRSEGDQLLIVRPVRSDHARYTCRVRSPFGHREAAADVSVFYGPDPPTITVSSDRDAAPARFVTAGSNVTLRCAAASRPPADITWSLADPAEAAVPAGSRLLLPAVGPGHAGTYACLAANPRTGRRRRSLLNLTVADLPPGAPQCSVEGGPGDRSLRFRCSWPGGAPAASLQFQGLPEGIRAGPVSSVLLAAVPAHPRLSGVPITCLARHLVATRTCTVTPEAPREVLLHPLVAETRLGEAEVALEASGCPPPSRASWAREGRPLAPGGGSRLRLSQDGRKLHIGNFSLDWDLGNYSVLCSGALGAGGDQITLIGPSISSWRLQRARDAAVLTWDVERGALISSFEIQAWPDGPALGRTSTYRDWVSLLILGPQERSAVVPLPPRNPGTWTFRILPILGGQPGTPSQSRVYRAGPTLSHGAIAGIVLGSLLGLALLAVLLLLCICCLCRFRGKTPEKKKHPSTLVPVVTPSEKKMHSVTPVEISWPLDLKVPLEDHSSTRAYQAQTPVQLSL

SEQ ID NO: 5956 - protein, 448 aa, Homo sapiens
MYIKMATLANGQADNASLSTNGLGSSPGSAGHMNGLSHSPGNPSTIPMKDHDAIKLFIGQIPRNLDEKDLKPLFEEFGKIYELTVLKDRFTGMHKGCAFLTYCERESALKAQSALHEQKTLPGMNRPIQVKPADSESRGEDRKLFVGMLNKQQSEDDVRRLFEAFGNIEECTILRGPDGNSKGCAFVKYSSHAEAQAAINALHGSQTMPGASSSLVVKFADTDKERTMRRMQQMAGQMGMFNPMAIPFGAYGAYAQALMQQQAALMASVAQGGYLNPMAAFAAAQMQQMAALNMNGLAAAPMTPTSGGSTPPGITAPAVPSIPSPIGVNGFTGLPPQANGQPAAEAVFANGIHPYPAQSPTAADPLQQAYAGVQQYAGPAAYPAAYGQISQAFPQPPPMIPQQQREGFVSFDNPASAQTAIQAMNGFQIGMKRLKVQLKRPKDANRPY

SEQ ID NO: 5957 - protein, 507 aa, Homo sapiens
MAGAIASRMSFSSLKRKQPKTFTVRIVTMDAEMEFNCEVKKQILDEKIYCPPEASVLLASYAVQAKYGDYDPSVHKRGFLAQEELLPKRVINLYQMTPEMWEERITAWYAEHRGRARDEAEMEYLKIAQDLEMYGVNYFAIRNKKGTELLLGVDALGLHIYDPENRLTPKISFPWNEIRNISYSDKEFTIKPLDKKIDVFKFNSSKLRVNKLILQLCIGNHDLFMRRRKADSLEVQQMKAQAREEKARKQMERQRLAREKQMREEAERTRDELERRLLQMKEEATMANEALMRSEETADLLAEKAQITEEEAKLLAQKAAEAEQEMQRIKATAIRTEEEKRLMEQKVLEAEVLALKMAEESERRAKEADQLKQDLQEAREAERRAKQKLLEIATKPTYPPMNPIPAPLPPDIPSFNLIGDSLSFDFKDTDMKRLSMEIEKEKVEYMEKSKHLQEQLNELKTEIEALKLKERETALDILHNENSDRGGSSKHNTIKKPQAQGRRPICI

SEQ ID NO: 5958 - protein, 1027 aa, Homo sapiens
MGNLESAEGVPGEPPSVPLLLPPGKMPMPEPCELEERFALVLSSMNLPPDKARLLRQYDNEKKWDLICDQERFQVKNPPHTYIQKLQSFLDPSVTRKKFRRRVQESTKVLRELEISLRTNHIGWVREFLNDENKGLDVLVDYLSFAQCSVMFDFEGLESGDDGAFDKLRSWSRSIEDLQPPSALSAPFTNSLARSARQSVLRYSTLPGRRALKNSRLVSQKDDVHVCILCLRAIMNYQYGFNLVMSHPHAVNEIALSLNNKNPRTKALVLELLAAVCLVRGGHEIILAAFDNFKEVCKELHRFEKLMEYFRNEDSNIDFMVACMQFINIVVHSVEDMNFRVHLQYEFTKLGLEEFLQKSRHTESEKLQVQIQAYLDNVFDVGGLLEDAETKNVALEKVEELEEHVSHLTEKLLDLENENMMRVAELEKQLLQREKELESIKETYENTSHQVHTLRRLIKEKEEAFQRRCHLEPNVRGLESVDSEALARVGPAELSEGMPPSDLDLLAPAPPPEEVLPLPPPPAPPLPPPPPPLPDKCPPAPPLPGAAPSVVLTVGLSAIRIKKPIKTKFRLPVFNWTALKPNQISGTVFSELDDEKILEDLDLDKFEELFKTKAQGPALDLICSKNKTAQKAASKVTLLEANRAKNLAITLRKAGRSAEEICRAIHTFDLQTLPVDFVECLMRFLPTEAEVKLLRQYERERQPLEELAAEDRFMLLFSKVERLTQRMAGMAFLGNFQDNLQMLTPQLNAIIAASASVKSSQKLKQMLEIILALGNYMNSSKRGAVYGFKLQSLDLLLDTKSTDRKMTLLHFIALTVKEKYPDLANFWHELHFVEKAAAVSLENVLLDVKELGRGMELIRRECSIHDNSVLRNFLSTNEGKLDKLQRDAKTAEEAYNAVVRYFGESPKTTPPSVFFPVFVRFIRSYKEAEQENEARKKQEEVMREKQLAQEAKKLDAKTPSQRNKWQQQELIAELRRRQAKEHRPVYEGKDGTIEDIITGLHCQPMVVRHQARSAAPPSGPPRAPGPH

SEQ ID NO: 5959 - protein, 458 aa, Homo sapiens
MLEQRREPWSGESEVKIAKNSDGRECIKGVNTGSSYALGSNAEDKPIKKQLGVSFHLHLSELELFPDERVINGCNQVENFINHSSSVSCLQEMSSSVKTPIFNRNDFDDSSFLPQEQKVHLREKPYECNEHSKVFRVSSSLTKHQVIHTVEKPYKCNSCGKVFSRNSHLAEHCRIHTGEKPYKCNVCGKVFSYNSNFARHQRIHTREKPYECNECGKVFSNNSYLARHQRIHAEEKPYKCNECGKGFSHKSSLANHWRIYTGEKPYKCDECGKAFYRIALLVRHQKIHTGEKPYKCNECGKVFIQNSHLAQHWRIHTGEKPYKCNECGKVFNQLSNLARHRRIHTGEKPYKCNECGKAFSEYSGLSAHLVIHTGEKPYKCSECGKAFRHKLSLTNHQRIHTGERPYKCNECGKVFNRIAHLARHRKIHTGEKPYKCNECGKAFSRISYLAQHWTIHMG

SEQ ID NO: 5960 - protein, 955 aa, Homo sapiens
DSMPAMQLASKDRVSERSSAGAHKTDCLKLAEAGETGRIILPNVNSDSVHTKSEKNFQAVSQGSVPSSVMSAVNTMCNTKTDVITSAADTTSVSSWGGSEVISSLSNTILASTSSECVSSKSVSQPVAQKQECKVSTTAPVTLASSKTGSVVQPSSGFSGTTDFIHLKKHKAALAAAQYKSSNASETEPNAIKNQTLSASLPLDSTVICSTINKANSVGNGQASQTSQPNYHTKLKKAWLTRHSEEDKNTNKMENSGNSVSEIIKPCSVNLIASTSSDIQNSVDSKIIVDKYVKDDKVNRRKAKRTYESGSESGDSDESESKSEQRTKRQPKPTYKKKQNDLQKRKGEIEEDLKPNGVLSRSAKERSKLKLQSNSNTKIAWKRAVRGVREMCDACEATLFNIHWVCQKCGFVVCLDCYKAKERKSSRDKELYAWMKCVKGQPHDHKHLMPTQIIPGSVLTDLLDAMHTLREKYGIKSHCHCTNKQNLQVGNFPTMNGVSQVLQNVLNHSNKISLCMPESQQQNTPPKSEKNGGSSPESDVGTDNKLTPPESQSPLHWLADLAEQKAREEKKENKELTLENQIKEEREQDNSESPNGRTSPLVSQNNEQGSTLRDLLTTTAGKLRVGSTDAGIAFAPVYSMGAPSSKSGRTMPNILDDIIASVVENKIPPSKTSKINVKPELKEEPEESIISAVDENNKLYSDIPHSWICEKHILWLKDYKNSSNWKLFKECWKQGQPAVVSGVHKKMNISLWKAESISLDFGDHQADLLNCKDSIISNANVKEFWDGFEEVSKRQKNKSGETVVLKLKDWPSGEDFKTMMPARYEDLLKSLPLPEYCNPEGKFNLASHLPGFFVRPDLGPRLCSAYGVVAAKDHDIGTTNLHIEVSDVVNILVYVGIAKGNGILSKAGILKKFEEEDLDDILRKRLKDSSEIPGALWHIYAGKDVDKIREFLQKV

SEQ ID NO: 5961 - protein, 843 aa, Homo sapiens
MATKKAGSRLETEIERCRSECQWERIPELVKQLSAKLIANDDMAELLLGESKLEQYLKEHPLRQGASPRGPKPQLTEVRKHLTAALDRGNLKSEFLQESNLIMAKLNYVEGDYKEALNIYARVGLDDLPLTAVPPYRLRVIAEAYATKGLCLEKLPISSSTSNLHVDREQDVITCYEKAGDIALLYLQEIERVILSNIQNRSPKPGPAPHDQELGFFLETGLQRAHVLYFKNGNLTRGVGRFRELLRAVETRTTQNLRMTIARQLAEILLRGMCEQSYWNPLEDPPCQSPLDDPLRKGANTKTYTLTRRARVYSGENIFCPQENTEEALLLLLISESMANRDAVLSRIPEHKSDRLISLQSASVVYDLLTIALGRRGQYEMLSECLERAMKFAFEEFHLWYQFALSLMAAGKSARAVKVLKECIRLKPDDATIPLLAAKLCMGSLHWLEEAEKFAKTVVDVGEKTSEFKAKGYLALGLTYSLQATDASLRGMQEVLQRKALLAFQRAHSLSPTDHQAAFYLALQLAISRQIPEALGYVRQALQLQGDDANSLHLLALLLSAQKHYHDALNIIDMALSEYPENFILLFSKVKLQSLCRGPDEALLTCKHMLQIWKSCYNLTNPSDSGRGSSLLDRTIADRRQLNTITLPDFSDPETGSVHATSVAASRVEQALSEVASSLQSSAPKQGPLHPWMTLAQIWLHAAEVYIGIGKPAEATACTQEAANLFPMSHNVLYMRGQIAELRGSMDEARRWYEEALAISPTHVKSMQRLALILHQLGRYSLAEKILRDAVQVNSTAHEVWNGLGEVLQAQGNDAAATECFLTALELEASSPAVPFTIIPRVL

SEQ ID NO: 5962 - protein, 318 aa, Homo sapiens
MAAAALPPRPLLLLPLVLLLSGRPTRADSKVFGDLDQVRMTSEGSDCRCKCIMRPLSKDACSRVRSGRARVEDFYTVETVSSGTDCRCSCTAPPSSLNPCENEWKMEKLKKQAPELLKSIKANLSRENEVVKDSVRHLSEQLRHYENHSAIMLGIKKELSRLGLQLLQKDAAAAPATPATGTGSKAQDTARGKGKDISKYGSVQKSFADRGLPKPPKEKLLQVEKLRKESGKGSFLQPTAKPRALAQQQAVIRGFTYYKAGKQEVTEAVADNTLQGTSWLEQLPPKVEGRSNSAEPNSAEQDEAEPRSSERVDLASGT

SEQ ID NO: 5963 - protein, 703 aa, Homo sapiens
MEALLEGIQNRGHGGGFLTSCEAELQELMKQIDIMVAHKKSEWEGRTHALETCLKIREQELKSLRSQLDVTHKEVGMLHQQVEEHEKIKQEMTMEYKQELKKLHEELCILKRSYEKLQKKQMREFRGNTKNHREDRSEIERLTAKIEEFRQKSLDWEKQRLIYQQQVSSLEAQRKALAEQSEIIQAQLVNRKQKLESVELSSQSEIQHLSSKLERANDTICANELEIERLTMRVNDLVGTSMTVLQEQQQKEEKLRESEKLLEALQEEKRELKAALQSQENLIHEARIQKEKLQEKVKATNTQHAVEAIRPREESLAEKKYTSQGQGDLDSVLSQLNFTHTSEDLLQAEVTCLEGSLESVSATCKQLSQELMEKYEELKRMEAHNNEYKAEIKKLKEQILQGEQSYSSALEGMKMEISHLTQELHQRDITIASTKGSSSDMEKRLRAEMQKAEDKAVEHKEILDQLESLKLENRHLSEMVMKLELGLHEAKEISLADLQENYIEALNKLVSENQQLQKDLMNTKSQLEISTQMCKKQNDRIFKPTHSRTTEFKNTEFKPTHGQHRHDGIKTEHYKTDLHSPRGQASDSINPMSRVLSPLSPQISPCSSTRSLTSYSLCKTHSLPSALDTNEANFSDTMSESMNDQEEFISSCSLPVSPLGSIATRFLEEEELRSHHILERLDAHIEELKRESEKTVRQFTALK

SEQ ID NO: 5964 - protein, 325 aa, Homo sapiens
MGKMVSVINTVDTSHEDMIHDAQMDYYGTRLATCSSDRSVKIFDVRNGGQILIADLRGHEGPVWQVAWAHPMYGNILASCSYDRKVIIWREENGTWEKSHEHAGHDSSVNSVCWAPHDYGLILACGSSDGAISLLTYTGEGQWEVKKINNAHTIGCNAVSWAPAVVPGSLIDHPSGQKPNYIKRFASGGCDNLIKLWKEEEDGQWKEEQKLEAHSDWVRDVAWAPSIGLPTSTIASCSQDGRVFIWTCDDASSNTWSPKLLHKFNDVVWHVSWSITANILAVSGGDNKVTLWKESVDGQWVCISDVNKGQGSVSASVTEGQQNEQ

SEQ ID NO: 5965 - protein, 446 aa, Homo sapiens
MKCFSRYLPYIFRPPNTILSSSCHTEADIISTVEFNHTGELLATGDKGGRVVIFQREQESKNQVHRRGEYNVYSTFQSHEPEFDYLKSLEIEEKINKIRWLPQQNAAYFLLSTNDKTVKLWKVSERDKRPEGYNLKDEEGRLRDPATITTLRVPVLRPMDLMVEATPRRVFANAHTYHINSISVNSDYETYMSADDLRINLWNFEITNQSFNIVDIKPANMEELTEVITAAEFHPHHCNTFVYSSSKGTIRLCDMRASALCDRHTKFFEEPEDPSNRSFFSEIISSISDVKFSHSGRYIMTRDYLTVKVWDLNMENRPIETYQVHDYLRSKLCSLYENDCIFDKFECVWNGSDSVIMTGSYNNFFRMFDRNTKRDVTLEASRENSKPRAILKPRKVCVGGKRRKDEISVDSLDFSKKILHTAWHPSENIIAVAATNNLYIFQDKVN

SEQ ID NO: 5966 - protein, 910 aa, Homo sapiens
MRRSAAPSQLQGNSFKKPKFIPPGRSNPGLNEEITKLNPDIKLFEGVAINNTFLPSQNDLRICSLNLPSEESTREINNRDNCSGKYCFEAPTLATLDPPHTVHSAPKEVAVSKEQEEKSDSLVKYFSVVWCKPSKKKHKKWEGDAVLIVKGKSFILKNLEGKDIGRGIGYKFKELEKIEEGQTLMICGKEIEVMGVISPDDFSSGRCFQLGGGSTAISHSSQVARKCFSNPFKSVCKPSSKENRQNDFQNCKPRHDPYTPNSLVMPRPDKNHQWVFNKNCFPLVDVVIDPYLVYHLRPHQKEGIIFLYECVMGMRMNGRCGAILADEMGLGKTLQCISLIWTLQCQGPYGGKPVIKKTLIVTPGSLVNNWKKEFQKWLGSERIKIFTVDQDHKVEEFIKSIFYSVLIISYEMLLRSLDQIKNIKFDLLICDEGHRLKNSAIKTTTALISLSCEKRIILTGTPIQNDLQEFFALIDFVNPGILGSLSSYRKIYEEPIILSREPSASEEEKELGERRAAELTCLTGLFILRRTQEIINKYLPPKIENVVFCRPGALQIELYRKLLNSQVVRFCLQGLLENSPHLICIGALKKLCNHPCLLFNSIKEKECSSTCDKNEEKSLYKGLLSVFPADYNPLLFTEKESGKLQVLSKLLAVIHELRPTEKVVLVSNYTQTLNILQEVCKRHGYAYTRLDGQTPISQRQQIVDGFNSQHSSFFIFLLSSKAGGVGLNLIGGSHLILYDIDWNPATDIQAMSRVWRDGQKYPVHIYRLLTTGTIEEKIYQRQISKQGLCGAVVDLTKTSEHIQFSVEELKNLFTLHESSDCVTHDLLDCECTGEEVHTGDSLEKFIVSRDCQLGPHHQKSNSLKPLSMSQLKQWKHFSGDHLNLTDPFLERITENVSFIFQNITTQATGT

SEQ ID NO: 5967 - protein, 837 aa, Homo sapiens
MFLWLFLILSALISSTNADSDISVEICNVCSCVSVENVLYVNCEKVSVYRPNQLKPPWSNFYHLNFQNNFLNILYPNTFLNFSHAVSLHLGNNKLQNIEGGAFLGLSALKQLHLNNNELKILRADTFLGIENLEYLQADYNLIKYIERGAFNKLHKLKVLILNDNLISFLPDNIFRFASLTHLDIRGNRIQKLPYIGVLEHIGRVVELQLEDNPWNCSCDLLPLKAWLENMPYNIYIGEAICETPSDLYGRLLKETNKQELCPMGTGSDFDVRILPPSQLENGYTTPNGHTTQTSLHRLVTKPPKTTNPSKISGIVAGKALSNRNLSQIVSYQTRVPPLTPCPAPCFCKTHPSDLGLSVNCQEKNIQSMSELIPKPLNAKKLHVNGNSIKDVDVSDFTDFEGLDLLHLGSNQITVIKGDVFHNLTNLRRLYLNGNQIERLYPEIFSGLHNLQYLYLEYNLIKEISAGTFDSMPNLQLLYLNNNLLKSLPVYIFSGAPLARLNLRNNKFMYLPVSGVLDQLQSLTQIDLEGNPWDCTCDLVALKLWVEKLSDGIVVKELKCETPVQFANIELKSLKNEILCPKLLNKPSAPFTSPAPAITFTTPLGPIRSPPGGPVPLSILILSILVVLILTVFVAFCLLVFVLRRNKKPTVKHEGLGNPDCGSMQLQLRKHDHKTNKKDGLSTEAFIPQTIEQMSKSHTCGLKESETGFMFSDPPGQKVVMRNVADKEKDLLHVDTRKRLSTIDELDELFPSRDSNVFIQNFLESKKEYNSIGVSGFEIRYPEKQPDKKSKKSLIGGNHSKIVVEQRKSEYFELKAKLQSSPDYLQVLEEQTALNKI

SEQ ID NO: 5968 - protein, 541 aa, Homo sapiens
MSSCVSSQPSSNRAAPQDELGGRGSSSSESQKPCEALRGLSSLSIHLGMESFIVVTECEPGCAVDLGLARDRPLEADGQEVPLDTSGSQARPHLSGRKLSLQERSQGGLAAGGSLDMNGRCICPSLPYSPVSSPQSSPRLPRRPTVESHHVSITGMQDCVQLNQYTLKDEIGKGSYGVVKLAYNENDNTYYAMKVLSKKKLIRQAGFPRRPPPRGTRPAPGGCIQPRGPIEQVYQEIAILKKLDHPNVVKLVEVLDDPNEDHLYMVFELVNQGPVMEVPTLKPLSEDQARFYFQDLIKGIEYLHYQKIIHRDIKPSNLLVGEDGHIKIADFGVSNEFKGSDALLSNTVGTPAFMAPESLSETRKIFSGKALDVWAMGVTLYCFVFGQCPFMDERIMCLHSKIKSQALEFPDQPDIAEDLKDLITRMLDKNPESRIVVPEIKLHPWVTRHGAEPLPSEDENCTLVEVTEEEVENSVKHIPSLATVILVKTMIRKRSFGNPFEGSRREERSLSAPGNLLTKQGSEDNLQGTDPPPVGEEEVLL

SEQ ID NO: 5969 - protein, 559 aa, Homo sapiens
MSSEQSAPGASPRAPRPGTQKSSGAVTKKGERAAKEKPATVLPPVGEEEPKSPEEYQCSGVLETDFAELCTRWGYTDFPKVVNRPRPHPPFVPSASLSEKATLDDPRLSGSCSLNSLESKYVFFRPTIQVELEQEDSKSVKEIYIRGWKVEERILGVFSKCLPPLTQLQAINLWKVGLTDKTLTTFIELLPLCSSTLRKVSLEGNPLPEQSYHKLMALDSTIAHLSLRNNNIDDRGAQLLGQALSTLHSCNRTLVSLNLGFNHIGDEGAGYIADGLRLNRSLLWLSLAHNRIQDKGALKLAEVLRAFELTHTEVVERRRLLLEKGTQERSRSPSSSRHGDSKTDREKSQMVGISNSALVDKTDKTQTMKTPKGLGKKKEKSWELAKKEEKLGSGQSPTQGTPKKEDATKAGKGKVTIPEQKPSRAKGIKIGSREKRSILLESELVVEATEVVNPLLEPVEHRDGKVFMPGNKVLLHLNLIRNRITEVGLEGFLATVQYQMQFSKAKSASKGPVGLLWLSLAKNCFAPQCPAYAIIQELMLPRDPIKAKLREDEAMAFFP

SEQ ID NO: 5970 - protein, 158 aa, Homo sapiens
MMRFMLLFSRQGKLRLQKWYLATSDKERKKMVRELMQVVLARKPKMCSFLEWRDLKVVYKRYASLYFCCAIEGQDNELITLELIHRYVELLDKYFGSVCELDIIFNFEKAYFILDEFLMGGDVQDTSKKSVLKAIEQADLLQEEDESPRSVLEEMGLA

SEQ ID NO: 5971 - protein, 567 aa, Homo sapiens
MIEDSGKRGNTMAERRQLFAEMRAQDLDRIRLSTYRTACKLRFVQKKCNLHLVDIWNVIEALRENALNNLDPNTELNVSRLEAVLSTIFYQLNKRMPTTHQIHVEQSISLLLNFLLAAFDPEGHGKISVFAVKMALATLCGGKIMDKLRYIFSMISDSSGVMVYGRYDQFLREVLKLPTAVFEGPSFGYTEQSARSCFSQQKKVTLNGFLDTLMSDPPPQCLVWLPLLHRLANVENVFHPVECSYCHSESMMGFRYRCQQCHNYQLCQDCFWRGHAGGSHSNQHQMKEYTSWKSPAKKLTNALSKSLSCASSREPLHPMFPDQPEKPLNLAHIVPPRPVTSMNDTLFSHSVPSSGSPFITRSSPPKDSEVEQNKLLARAAPAFLKGKGIQYSLNVADRLADEHVLIGLYVNMLRNNPSCMLESSNRLDEEHRLIARYAARLAAESSSSQPPQQRSAPDISFTIDANKQQRQLIAELENKNREILQEIQRLRLEHEQASQPTPEKAQQNPTLLAELRLLRQRKDELEQRMSALQESRRELMVQLEGLMKLLKEEELKQGVSYVPYCRS

SEQ ID NO: 5972 - protein, 183 aa, Homo sapiens
MASNKTTLQKMGKKQNGKSKKVEEAEPEEFVVEKVLDRRVVNGKVEYFLKWKGFTDADNTWEPEENLDCPELIEAFLNSQKAGKEKDGTKRKSLSDSESDDSKSKKKRDAADKPRGFARGLDPERIIGATDSSGELMFLMKWKDSDEADLVLAKEANMKCPQIVIAFYEERLTWHSCPEDEAQ

SEQ ID NO: 5973 - protein, 376 aa, Homo sapiens
MRGKTFRFEMQRDLVSFPLSPAVRVKLVSAGFQTAEELLEVKPSELSKEVGISKAEALETLQIIRRECLTNKPRYAGTSESHKKCTALELLEQEHTQGFIITFCSALDDILGGGVPLMKTTEICGAPGVGKTQLCMQLAVDVQIPECFGGVAGEAVFIDTEGSFMVDRVVDLATACIQHLQLIAEKHKGEEHRKALEDFTLDNILSHIYYFRCRDYTELLAQVYLLPDFLSEHSKVRLVIVDGIAFPFRHDLDDLSLRTRLLNGLAQQMISLANNHRLAVILTNQMTTKIDRNQALLVPALGESWGHAATIRLIFHWDRKQRLATLYKSPSQKECTVLFQIKPQGFRDTVVTSACSLQTEGSLSTRKRSRDPEEEL

SEQ ID NO: 5974 - protein, 184 aa, Homo sapiens
MCGTGGTDSKTRRPPHRASFLKRLESKPLKMADDLDFETGDAGASATFPMQCSALRKNGFVVLKGRPCKIVEMSTSKTGKHGHAKVHLVGIDIFTGKKYEDICPSTHNMDVPNIKRNDFQLIGIQDGYLSLLQDSGEVREDLRLPEGDLGKEIEQKYDCGEEILITVLSAMTEEAAVAIKAMAK

SEQ ID NO: 5975 - protein, 898 aa, Homo sapiens
MVWDRQTKMEYEWKPDEQGLQQILQLLKESQSPDTTIQRTVQQKLEQLNQYPDFNNYLIFVLTKLKSEDEPTRSLSGLILKNNVKAHFQNFPNGVTDFIKSECLNNIGDSSPLIRATVGILITTIASKGELQNWPDLLPKLCSLLDSEDYNTCEGAFGALQKICEDSAEILDSDVLDRPLNIMIPKFLQFFKHSSPKIRSHAVACVNQFIISRTQALMLHIDSFIENLFALAGDEEPEVRKNVCRALVMLLEVRMDRLLPHMHNIVEYMLQRTQDQDENVALEACEFWLTLAEQPICKDVLVRHLPKLIPVLVNGMKYSDIDIILLKGDVEEDETIPDSEQDIRPRFHRSRTVAQQHDEDGIEEEDDDDDEIDDDDTISDWNLRKCSAAALDVLANVYRDELLPHILPLLKELLFHHEWVVKESGILVLGAIAEGCMQGMIPYLPELIPHLIQCLSDKKALVRSITCWTLSRYAHWVVSQPPDTYLKPLMTELLKRILDSNKRVQEAACSAFATLEEEACTELVPYLAYILDTLVFAFSKYQHKNLLILYDAIGTLADSVGHHLNKPEYIQMLMPPLIQKWNMLKDEDKDLFPLLECLSSVATALQSGFLPYCEPVYQRCVNLVQKTLAQAMLNNAQPDQYEAPDKDFMIVALDLLSGLAEGLGGNIEQLVARSNILTLMYQCMQDKMPEVRQSSFALLGDLTKACFQHVKPCIADFMPILGTNLNPEFISVCNNATWAIGEISIQMGIEMQPYIPMVLHQLVEIINRPNTPKTLLENTAITIGRLGYVCPQEVAPMLQQFIRPWCTSLRNIRDNEEKDSAFRGICTMISVNPSGVIQDFIFFCDAVASWINPKDDLRDMFCKILHGFKNQVGDENWRRFSDQFPLPLKERLAAFYGV

SEQ ID NO: 5976 - protein, 404 aa, Homo sapiens
MLRAIAEERGRLSLRREVCGLGCFKDDRIVFWTWMFSTYFMEKWAPRQDDMLFYVRRKLAYSGSESGADGRKAAEPEVEVEVYRRDSKKLPGLGDPDIDWEESVCLNLILQKLDYMVTCAVCTRADGGDIHIHKKKSQQVFASPSKHPMDSKGEESKISYPNIFFMIDSFEEVFSDMTVGEGEMVCVELVASDKTNTFQGVIFQGSIRYEALKKVYDNRVSVAARMAQKMSFGFYKYSNMEFVRMKGPQGKGHAEMAVSRVSTGDTSPCGTEEDSSPASPMHERVTSFSTPPTPERNNRPAFFSPSLKRKVPRNRIAEMKKSHSANDSEEFFREDDGGADLHNATNLRSRSLSGTGRSLVGSWLKLNRADGNFLLYAHLTYVTLPLHRILTDILEVRQKPILMT

SEQ ID NO: 5977 - protein, 517 aa, Homo sapiens
MASDGARKQFWKRSNSKLPGSIQHVYGAQHPPFDPLLHGTLLRSTAKMPTTPVKAKRVSTFQEFESNTSDAWDAGEDDDELLAMAAESLNSEVVMETANRVLRNHSQRQGRPTLQEGPGLQQKPRPEAEPPSPPSGDLRLVKSVSESHTSCPAESASDAAPLQRSQSLPHSATVTLGGTSDPSTLSSSALSEREASRLDKFKQLLAGPNTDLEELRRLSWSGIPKPVRPMTWKLLSGYLPANVDRRPATLQRKQKEYFAFIEHYYDSRNDEVHQDTYRQIHIDIPRMSPEALILQPKVTEIFERILFIWAIRHPASGYVQGINDLVTPFFVVFICEYIEAEEVDTVDVSGVPAEVLCNIEADTYWCMSKLLDGIQDNYTFAQPGIQMKVKMLEELVSRIDEQVHRHLDQHEVRYLQFAFRWMNNLLMREVPLRCTIRLWDTYQSEPDGFSHFHLYVCAAFLVRWRKEILEEKDFQELLLFLQNLPTAHWDDEDISLLLAEAYRLKFAFADAPNHYKK

SEQ ID NO: 5978 - protein, 1204 aa, Homo sapiens
MGDAKEAGAEGPPAGAAARGGLSLLSQGESEESSAQGSALFLGGNEVKSRAVVKYSSAPPRTAFARLEEKTDLKLPPANWLRESAKLGPAGTTILGNSKKSKPFSSFGMAYDFIDSVGNDVDVVSDSENIKKLLKIPYSKSHVSMAVHRIGRTLLLDELDIQELFMRSSQTGDWTWLKEFYQRLIDQKWQRKKKSKEHWYQKAILSKFLYYSINGDGAAQPVSSTAEQQESSSSDQTNDSEGASWPAPFEMPSSVSEDPSASSQGLKNDFVRNILWTFEDIHMLVGSNMPIFGGGRYPAVSLRLRDNNKPINVLTGIDYWLDNLICNVPELVMCFHVNGIVQKYEMIKTEEIPNLENSNFSTKVIKDIAQNILSFLKSNCTKEGHTYWLFKASGSDIVKLYDLTTLCEETEDKYQNPFTMPVAILLYKVACNMMMKKNQNKKHYGTIRTLLLNCLKLLDKSRHPQIIASANYMLSELFQLDEPKKEENSESPLNENSDESYSEEEEEMPDSDENGSYSTSSDPSDDSKAVAIIKSVGELSVPEKYKSIHQIRPSCAFPVCHDTEERCRLVLSYVLEGLKSVDSSIKKESDLPAADPSTPIPLKYEDESSRGGPEGLEKQMALFLDKMGSLQKGNYSSQSGMIPGSWQHKMKLQLILKSSKAYYVLSDAAMSLQKYGRALRYIKLALQSHDTYCCLCTNMLSEVLLFLSQYLTLCGDIQLMLAQNANNRAAHLEEFHYQTKEDQEILHSLHRESSCQGFAWATDLSTDLESQLSVSCKCYEAANEILQFSDLKSQNPEHYVQVLKRMGNIRNEIGVFYMNQAAALQSERLVSKSVSAAEQQLWKKSFSCFEKGIHNFESIEDATNAALLLCNTGRLMRICAQAHCGAGDELKREFSPEEGLYYNKAIDYYLKALRSLGTRDIHPAVWDSVNWELSTTYFTMATLQQDYAPLSRKAQEQIEKEVSEAMMKSLKYCDVDSVSARQPLCQYRAATIHHRLASMYHSCLRNQVGDEHLRKQHRVLADLHYSKAAKLFQLLKDAPCELLRVQLERVAFAEFQMTSQNSNVGKLKTLSGALDIMVRTEHAFQLIQKELIEEFGQPKSGDAAAAADASPSLNREEVMKLLSIFESRLSFLLLQSIKLLSSTKKKTSNNIEDDTILKTNKHIYSQLLRATANKTATLLERINVIVHLLGQLAAGSAASSNAVQ

SEQ ID NO: 5979 - protein, 558 aa, Homo sapiens
MRKIRANAIAILTVAWILGTFYYLWQDNRAHAASSGGRGAQRAGRRSEQLREDRTIPLIVTGTPSKGFDEKAYLSAKQLKAGEDPYRQHAFNQLESDKLSPDRPIRDTRHYSCPSVSYSSDLPATSVIITFHNEARSTLLRTVKSVLNRTPANLIQEIILVDDFSSDPEDCLLLTRIPKVKCLRNDRREGLIRSRVRGADVAAATVLTFLDSHCEVNTEWLPPMLQRVKEDHTRVVSPIIDVISLDNFAYLAASADLRGGFDWSLHFKWEQIPLEQKMTRTDPTRPIRTPVIAGGIFVIDKSWFNHLGKYDAQMDIWGGENFELSFRVWMCGGSLEIVPCSRVGHVFRKRHPYNFPEGNALTYIRNTKRTAEVWMDEYKQYYYEARPSAIGKAFGSVATRIEQRKKMNCKSFRWYLENVYPELTVPVKEALPGIIKQGVNCLESQGQNTAGDFLLGMGICRGSAKNPQPAQAWLFSDHLIQQQGKCLAATSTLMSSPGSPVILQMCNPREGKQKWRRKGSFIQHSVSGLCLETKPAQLVTSKCQADAQAQQWQLLPHT

SEQ ID NO: 5980 - protein, 594 aa, Homo sapiens
MAAESGELIGACEFMKDRLYFATLRNRPKSTVNTHYFSIDEELVYENFYADFGPLNLAMVYRYCCKLNKKLKSYSLSRKKIVHYTCFDQRKRANAAFLIGAYAVIYLKKTPEEAYRALLSGSNPPYLPFRDASFGNCTYNLTILDCLQGIRKGLQHGFFDFETFDVDEYEHYERVENGDFNWIVPGKFLAFSGPHPKSKIENGYPLHAPEAYFPYFKKHNVTAVVRLNKKIYEAKRFTDAGFEHYDLFFIDGSTPSDNIVRRFLNICENTEGAIAVHCKAGLGRTGTLIACYVMKHYRFTHAEIIAWIRICRPGSIIGPQQHFLEEKQASLWVQGDIFRSKLKNRPSSEGSINKILSGLDDMSIGGNLSKTQNMERFGEDNLEDDDVEMKNGITQGDKLRALKSQRQPRTSPSCAFRSDDTKGHPRAVSQPFRLSSSLQGSAVTLKTSKMALSPSATAKRINRTSLSSGATVRSFSINSRLASSLGNLNAATDDPENKKTSSSSKAGFTASPFTNLLNGSSQPTTRNYPELNNNQYNRSSNSNGGNLNSPPGPHSAKTEEHTTILRPSYTGLSSSSARFLSRSIPSLQSEYVHY

SEQ ID NO: 5981 - protein, 795 aa, Homo sapiens
MSKRHRLDLGEDYPSGKKRAGTDGKDRDRDRDREDRSKDRDRERDRGDREREREKEKEKELRASTNAMLISAGLPPLKASHSAHSTHSAHSTHSTHSAHSTHAGHAGHTSLPQCINPFTNLPHTPRYYDILKKRLQLPVWEYKDRFTDILVRHQSFVLVGETGSGKTTQIPQWCVEYMRSLPGPKRGVACTQPRRVAAMSVAQRVADEMDVMLGQEVGYSIRFEDCSSAKTILKYMTDGMLLREAMNDPLLERYGVIILDEAHERTLATDILMGVLKEVVRQRSDLKVIVMSATLDAGKFQIYFDNCPLLTIPGRTHPVEIFYTPEPERDYLEAAIRTVIQIHMCEEEEGDLLLFLTGQEEIDEACKRIKREVDDLGPEVGDIKIIPLYSTLPPQQQQRIFEPPPPKKQNGAIGRKVVVSTNIAETSLTIDGVVFVIDPGFAKQKVYNPRIRVESLLVTAISKASAQQRAGRAGRTRPGKCFRLYTEKAYKTEMQDNTYPEILRSNLGSVVLQLKKLGIDDLVHFDFMDPPAPETLMRALELLNYLAALNDDGDLTELGSMMAEFPLDPQLAKMVIASCDYNCSNEVLSITAMLSVPQCFVRPTEAKKAADEAKMRFAHIDGDHLTLLNVYHAFKQNHESVQWCYDNFINYRSLMSADNVRQQLSRIMDRFNLPRRSTDFTSRDYYINIRKALVTGYFMQVAHLERTGHYLTVKDNQVVQLHPSTVLDHKPEWVLYNEFVLTTKNYIRTCTDIKPEWLVKIAPQYYDMSNFPQCEAKRQLDRIIAKLQSKEYSQY

SEQ ID NO: 5982 - protein, 606 aa, Homo sapiens
MVRGARQPQQPRSRLAPRLTGTVEKPPRKRRSRTEFALKEIMSSGGAEDDIPQGERKTVTDFCYLLDKSKQLFNGLRDLPQYGQKQWQSYFGRTFDVYTKLWKFQQQHRQVLDNRYGLKRWQIGEIASKIGQLYYHYYLRTSETSYLNEAFSFYSAIRQRSYYSQVNKEDRPELVVKKLRYYARFIVVCLLLNKMDVVKDLVKELSDEIEDYTHRFNTEDQVEWNLVLQEVAAFIEADPVMVLNDDNTIVITSNRLAETGAPLLEQGMIVGQLSLADALIIGNCNNQVKFSELTVDMFRMLQALEREPMNLASQMNKPGMQESADKPTRRENPHKYLLYKPTFSQLYTFLAASFKELPANSVLLIYLSATGVFPTGRSDSEGPYDFGGVLTNSNRDIINGDAIHKRNQSHKEMHCLHPGDLYPFTRKPLFIIVDSSNSVAYKNFTNLFGQPLVCLLSPTAYPKALQDQSQRGSLFTLFLNNPLMAFLFVSGLSSMRRGLWEKCQEYLRKINRDIAQLLTHSRSIDQAFLQFFGDEFLRLLLTRFIFCSATMRMHKIFRETRNYPESYPQLPRDETVENPHLQKHILELASILDVRNVFFENTIDDY

SEQ ID NO: 5983 - protein, 1565 aa, Homo sapiens
MLSWRLQTGPEKAELQELNARLYDYVCRVRELERENLLLEEELRGRRGREGLWAEGQARCAEEARSLRQQLDELSWATALAEGERDALRRELRELQRLDAEERAARGRLDAELGAQQRELQEALGARAALEALLGRLQAERRGLDAAHERDVRELRARAASLTMHFRARATGPAAPPPRLREVHDSYALLVAESWRETVQLYEDEVRELEEALRRGQESRLQAEEETRLCAQEAEALRREALGLEQLRARLEDALLRMREEYGIQAEERQRVIDCLEDEKATLTLAMADWLRDYQDLLQVKTGLSLEVATYRALLEGESNPEIVIWAEHVENMPSEFRNKSYHYTDSLLQRENERNLFSRQKAPLASFNHSSALYSNLSGHRGSQTGTSIGGDARRGFLGSGYSSSATTQQENSYGKAVSSQTNVRTFSPTYGLLRNTEAQVKTFPDRPKAGDTREVPVYIGEDSTIARESYRDRRDKVAAGASESTRSNERTVILGKKTEVKATREQERNRPETIRTKPEEKMFDSKEKASEERNLRWEELTKLDKEARQRESQQMKEKAKEKDSPKEKSVREREVPISLEVSQDRRAEVSPKGLQTPVKDAGGGTGREAEARELRFRLGTSDATGSLQGDSMTETVAENIVTSILKQFTQSPETEASADSFPDTKVTYVDRKELPGERKTKTEIVVESKLTEDVDVSDEAGLDYLLSKDIKEVGLKGKSAEQMIGDIINLGLKGREGRAKVVNVEIVEEPVSYVSGEKPEEFSVPFKVEEVEDVSPGPWGLVKEEEGYGESDVTFSVNQHRRTKQPQENTTHVEEVTEAGDSEGEQSYFVSTPDEHPGGHDRDDGSVYGQIHIEEESTIRYSWQDEIVQGTRRRTQKDGAVGEKVVKPLDVPAPSLEGDLGSTHWKEQARSGEFHAEPTVIEKEIKIPHEFHTSMKGISSKEPRQQLVEVIGQLEETLPERMREELSALTREGQGGPGSVSVDVKKVQGAGGSSVTLVAEVNVSQTVDADRLDLEELSKDEASEMEKAVESVVRESLSRQRSPAPGSPDEEGGAEAPAAGIRFRRWATRELYIPSGESEVAGGASHSSGQRTPQGPVSATVEVSSPTGFAQSQVLEDVSQAARHIKLGPSEVWRTERMSYEGPTAEVVEVSAGGDLSQAASPTGASRSVRHVTLGPGQSPLSREVIFLGPAPACPEAWGSPEPGPAESSADMDGSGRHSTFGCRQFHAEKEIIFQGPISAAGKVGDYFATEESVGTQTSVRQLQLGPKEGFSGQIQFTAPLSDKVELGVIGDSVHMEGLPGSSTSIRHISIGPQRHQTTQQIVYHGLVPQLGESGDSESTVHGEGSADVHQATHSHTSGRQTVMTEKSTFQSVVSESPQEDSAEDTSGAEMTSGVSRSFRHIRLGPTETETSEHIAIRGPVSRTFVLAGSADSPELGKLADSSRTLRHIAPGPKETSFTFQMDVSNVEAIRSRTQEAGALGVSDRGSWRDADSRNDQAVGVSFKASAGEGDQAHREQGKEQAMFDKKVQLQRMVDQRSVISDEKKVALLYLDNEEEENDGHWF

SEQ ID NO: 5984 - protein, 1726 aa, Homo sapiens
MATGSAQGNFTGHTKKTNGNNGTNGALVQSPSNQSALGAGGANSNGSAARVWGVATGSSSGLAHCSVSGGDGKMDTMIGDGRSQNCWGASNSNAGINLNLNPNANPAAWPVLGHEGTVATGNPSSICSPVSAIGQNMGNQNGNPTGTLGAWGNLLPQESTEPQTSTSQNVSFSAQPQNLNTDGPNNTNPMNSSPNPINAMQTNGLPNWGMAVGMGAIIPPHLQGLPGANGSSVSQVSGGSAEGISNSVWGLSPGNPATGNSNSGFSQGNGDTVNSALSAKQNGSSSAVQKEGSGGNAWDSGPPAGPGILAWGRGSGNNGVGNIHSGAWGHPSRSTSNGVNGEWGKPPNQHSNSDINGKGSTGWESPSVTSQNPTVQPGGEHMNSWAKAASSGTTASEGSSDGSGNHNEGSTGREGTGEGRRRDKGIIDQGHIQLPRNDLDPRVLSNTGWGQTPVKQNTAWEFEESPRSERKNDNGTEAWGCAATQASNSGGKNDGSIMNSTNTSSVSGWVNAPPAAVPANTGWGDSNNKAPSGPGVWGDSISSTAVSTAAAAKSGHAWSGAANQEDKSPTWGEPPKPKSQHWGDGQRSNPAWSAGGGDWADSSSVLGHLGDGKKNGSGWDADSNRSGSGWNDTTRSGNSGWGNSTNTKANPGTNWGETLKPGPQQNWASKPQDNNVSNWGGAASVKQTGTGWIGGPVPVKQKDSSEATGWEEPSPPSIRRKMEIDDGTSAWGDPSNYNNKTVNMWDRNNPVIQSSTTTNTTTTTTTTTSNTTHRVETPPPHQAGTQLNRSPLLGPVSSGWGEMPNVHSKTENSWGEPSSPSTLVDNGTAAWGKPPSSGSGWGDHPAEPPVAFGRAGAPVAASALCKPASKSMQEGWGSGGDEMNLSTSQWEDEEGDVWNNAASQESTSSCSSWGNAPKKGLQKGMKTSGKQDEAWIMSRLIKQLTDMGFPREPAEEALKSNNMNLDQAMSALLEKKVDVDKRGLGVTDHNGMAAKPLGCRPPISKESSVDRPTFLDKDGGLVEEPTPSPFLPSPSLKLPLSHSALPSQALGGIASGLGMQNLNSSRQIPSGNLGMFGNSGAAQARTMQQPPQPPVQPLNSSQPSLRAQVPQFLSPQVQAQLLQFAAKNIGLNPALLTSPINPQHMTMLNQLYQLQLAYQRLQIQQQMLQAQRNVSGSMRQQEQQVARTITNLQQQIQQHQRQLAQALLVKQPPPPPPPPHLSLHPSAGKSAMDSFPSHPQTPGLPDLQTKEQQSSPNTFAPYPLAGLNPNMNVNSMDMTGGLSVKDPSQSQSRLPQWTHPNSMDNLPSAASPLEQNPSKHGAIPGGLSIGPPGKSSIDDSYGRYDLIQNSESPASPPVAVPHSWSRAKSDSDKISNGSSINWPPEFHPGVPWKGLQNIDPENDPDVTPGSVPTGPTINTTIQDVNRYLLKSGGSSPPSSQNATLPSSSAWPLSASGYSSSFSSIASAPSVAGKLSDIKSTWSSGPTSHTQASLSHELWKVPRNSTAPTRPPPGLTNPKPSSTWGASPLGWTSSYSSGSAWSTDTSGRTSSWLVLRNLTPQIDGSTLRTLCLQHGPLITFHLNLTQGNAVVRYSSKEEAAKAQKSLHMCVLGNTTILAEFAGEEEVNRFLAQGQALPPTSSWQSSSASSQPRLSAAGSSHGLVRSDAGHWNAPCLGGKGSSELLWGGVPQYSSSLWGPPSADDSRVIGSPTPLTTLLPGDLLSGESL

SEQ ID NO: 5985 - protein, 326 aa, Homo sapiens
MAKMELSKAFSGQRTLLSAILSMLSLSFSTTSLLSNYWFVGTQKVPKPLCEKGLAAKCFDMPVSLDGDTNTSTQEVVQYNWETGDDRFSFRSFRSGMWLSCEETVEEPGERCRSFIELTPPAKREILWLSLGTQITYIGLQFISFLLLLTDLLLTGNPACGLKLSAFAAVSSVLSGLLGMVAHMMYSQVFQATVNLGPEDWRPHVWNYGWAFYMAWLSFTCCMASAVTTFNTYTRMVLEFKCKHSKSFKENPNCLPHHHQCFPRRLSSAAPTVGPLTSYHQYHNQPIHSVSEGVDFYSELRNKGFQRGASQELKEAVRSSVEEEQC

SEQ ID NO: 5986 - protein, 346 aa, Homo sapiens
MKFSPAHYLLPLLPALVLSTRQDYEELEKQLKEVFKERSTILRQLTKTSRELDGIKVNLQSLKNDEQSAKTDVQKLLELGQKQREEMKSLQEALQNQLKETSEKAEKHQATINFLKTEVERKSKMIRDLQNENKSLKNKLLSGNKLCGIHAEESKKIQAQLKELRYGKKDLLFKAQQLTDLEQKLAVAKNELEKAALDRESQMKAMKETVQLCLTSVFRDQPPPPLSLITSNPTRMLLPPRNIASKLPDAAAKSKPQQSASGNNESSQVESTKEGNPSTTACDSQDEGRPCSMKHKESPPSNATAETEPIPQKLQMPPCSECEVKKAPEKPLTSFEGMAAREEKIL

SEQ ID NO: 5987 - protein, 1204 aa, Homo sapiens
MSFFNFRKIFKLGSEKKKKQYEHVKRDLNPEDFWEIIGELGDGAFGKVYKAQNKETSVLAAAKVIDTKSEEELEDYMVEIDILASCDHPNIVKLLDAFYYENNLWILIEFCAGGAVDAVMLELERPLTESQIQVVCKQTLDALNYLHDNKIIHRDLKAGNILFTLDGDIKLADFGVSAKNTRTIQRRDSFIGTPYWMAPEVVMCETSKDRPYDYKADVWSLGITLIEMAEIEPPHHELNPMRVLLKIAKSEPPTLAQPSRWSSNFKDFLKKCLEKNVDARWTTSQLLQHPFVTVDSNKPIRELIAEAKAEVTEEVEDGKEEDEEEETENSLPIPASKRASSDLSIASSEEDKLSQNACILESVSEKTERSNSEDKLNSKILNEKPTTDEPEKAVEDINEHITDAQLEAMTELHDRTAVIKENEREKRPKLENLPDTEDQETVDINSVSEGKENNIMITLETNIEHNLKSEEEKDQEKQQMFENKLIKSEEIKDTILQTVDLVSQETGEKEANIQAVDSEVGLTKEDTQEKLGEDDKTQKDVISNTSDVIGTCEAADVAQKVDEDSAEDTQSNDGKEVVEVGQKLINKPMVGPEAGGTKEVPIKEIVEMNEIEEGKNKEQAINSSENIMDINEEPGTTEGEEITESSSTEEMEVRSVVADTDQKALGSEVQDASKVTTQIDKEKKEIPVSIKKEPEVTVVSQPTEPQPVLIPSININSDSGENKEEIGSLSKTETILPPESENPKENDNDSGTGSTADTSSIDLNLSISSFLSKTKDSGSISLQETRRQKKTLKKTRKFIVDGVEVSVTTSKIVTDSDSKTEELRFLRRQELRELRFLQKEEQRAQQQLNSKLQQQREQIFRRFEQEMMSKKRQYDQEIENLEKQQKQTIERLEQEHTNRLRDEAKRIKGEQEKELSKFQNMLKNRKKEEQEFVQKQQQELDGSLKKIIQQQKAELANIERECLNNKQQLMRAREAAIWELEERHLQEKHQLLKQQLKDQYFMQRHQLLKRHEKETEQMQRYNQRLIEELKNRQTQERARLPKIQRSEAKTRMAMFKKSLRINSTATPDQDRDKIKQFAAQEEKRQKNERMAQHQKHENQMRDLQLQCEANVRELHQLQNEKCHLLVEHETQKLKELDEEHSQELKEWREKLRPRKKTLEEEFARKLQEQEVFFKMTGESECLNPSTQSRISKFYPIPSLHSTGS

SEQ ID NO: 5988 - protein, 453 aa, Homo sapiens
MSWSLHPRNLILYFYALLFLSSTCVAYVATRDNCCILDERFGSYCPTTCGIADFLSTYQTKVDKDLQSLEDILHQVENKTSEVKQLIKAIQLTYNPDESSKPNMIDAATLKSRKMLEEIMKYEASILTHDSSIRYLQEIYNSNNQKIVNLKEKVAQLEAQCQEPCKDTVQIHDITGKDCQDIANKGAKQSGLYFIKPLKANQQFLVYCEIDGSGNGWTVFQKRLDGSVDFKKNWIQYKEGFGHLSPTGTTEFWLGNEKIHLISTQSAIPYALRVELEDWNGRTSTADYAMFKVGPEADKYRLTYAYFAGGDAGDAFDGFDFGDDPSDKFFTSHNGMQFSTWDNDNDKFEGNCAEQDGSGWWMNKCHAGHLNGVYYQGGTYSKASTPNGYDNGIIWATWKTRWYSMKKTTMKIIPFNRLTIGEGQQHHLGGAKQVRPEHPAETEYDSLYPEDDL

SEQ ID NO: 5989 - protein, 519 aa, Homo sapiens
MAFSELLDLVGGLGRFQVLQTMALMVSIMWLCTQSMLENFSAAVPSHRCWAPLLDNSTAQASILGSLSPEALLAISIPPGPNQRPHQCRRFRQPQWQLLDPNATATSWSEADTEPCVDGWVYDRSIFTSTIVAKWNLVCDSHALKPMAQSIYLAGILVGAAACGPASDRFGRRLVLTWSYLQMAVMVMEWTAARARPLVMTLNSLGFSFGHGLTAAVAYGVRDWTLLQLVVSVPFFLCFLYSWWLAESARWLLTTGRLDWGLQELWRVAAINGKGAVQDTLTPEVLLSAMREELSMGQPPASLGTLLRMPGLRFRTCISTLCWFAFGFTFFGLALDLQALGSNIFLLQMFIGVVDIPAKMGALLLLSHLGRRPTLAASLLLAGLCILANTLVPHEMGALRSALAVLGLGGVGAAFTCITIYSSELFPTVLRMTAVGLGQMAARGGAILGPLVRLLGVHGPWLPLLVYGTVPVLSGLAALLLPETQSLPLPDTIQDVQNQAVKKATHGTLGNSVLKSTQF

SEQ ID NO: 5990 - protein, 321 aa, Homo sapiens
MSDPSQLTQNVCLTQEMELSKAFSGQRTLLSAILSMLSLSFSTTSLLSNYWFVGTQKVPKPLCEKGLAAKCFDMPVSLDGDTNTSTQEVVQYNWETGDDRFSFRSFRSGMWLSCEETVEEPALLHPQSWKQFRALRSSGTAAAKGERCRSFIELTPPAKRGEKGLLEFATLQGPCHPTLRFGGKRLMEKASLPSPPLGLCGKNPMVIPGNADHLHRTSIHQLPPATNRLATHWEPCLWAQTERLCCCFLCPVRSPGDGGPHDVFTSLPSDCQLGSRRLETTCLELWLGLLHGLALLHLLHGVGCHHLQHVHQDGAGVQVQA

SEQ ID NO: 5991 - protein, 1027 aa, Homo sapiens
MAQNTENHDPVGSILIQIHEDLYQLKEKLTKFSPEEKGETLDIQSLETAIKRTEVGLRIHIEKYLNVVNQNVLTTSVNDESLYTPQASKWLLPTVIDQKSFIFPQESEGTFWQPQRQHSSSLPVFPRAKIKVSKLIKGSNISSLTVLPSSHCTDPYFTPIPVLQADAHKGILSMIERGLIPPTARITFQNPPITPRAAPLHSFDEARKIPTVATFTIPREPPPSPAEVKFFPKKQRSKGKSRRSRGHHDRKAMKVKTPLRALKSLWDYDFLIYDGVIDNTAPDFLAFKEHFSLAWGGIFSLLEHVEKFLRNYAIPEVKIKGNNLVALLPEFELTNKLTRYDLLSVLEDPAHVQMLINLPGQRYKGQDGNSEAAMKIQATWKCYKARKFFLFYRQQKWASGVIAIAWLLYCHKTRLKKILKESRQRHLENFRIRAKHLAANWNRIRTSRRTIIHIPSLGYSQPVREHIADFNTQQNMQLGRLCDILDANVNVIYICSHHMNDELVLYYKKILSLHAAVKSGNLEDRSDLQDRFKIITPEAVNIFPKHHMCLATHLMYSPKAIKRIKNLIRGTEAYIVSGLLHRDDLAVADMLDIPILGSEPELAHLYSTKSGGKRVFDSANVAVPPGIYDIYSQQQMIEQLSQLITDHLQIQRWLFKMDSEFRGNGTAFCDIPSYLKCYKWVLKESSRYGLEDWRKKWAQEPALVKISEELAGILAQHAQPVNEKRFPTWRKFLQTFLSQGGVIEAFPPADNVTNLTVDMLIEPNGKISVLSTGDQLHAESPFISSGTTVPQTSVDPQVLTYLCLQIGKACRMRDVVGYFSIDLVTFIDPSTLEQQVWATGLNLAYSDQLALTQLTLYLTNGHLDCSLSTLEVPRFVPKERKKTKCMSALSMPMLATSRYAVMTTQLRHSNLSLVFHYVFLQICRAHGIGYDVEERQGTVFILYEHLKRHKLGMLTIGEDLQGVLMTFARHLFIIHQEISAPNMQGETNFKTTIADIETILRVTKENKMRFEEEQQSKDDKNLSKPKK

SEQ ID NO: 5992 - protein, 888 aa, Homo sapiens
MEGDDCEFRYGDGTNEAQDNDFPTVERSRLQEMLSLLGLETYQVQKLSLQDSLQISFDSMKNWAPQVPKDLPWNFLRKLQALNADARNTTMVLDVLPDARPVEKESQMEEEIIYWDPADDLAADIYSFSELPTPDTPVNPLDLLCALLLSSDSFLQQEIALKMALCQFALPLVLPDSENHYHTFLLWAMRGIVRTWWSQPPRGMGSFREDSVVLSRAPAFAFVRMDVSSNSKSQLLNAVLSPGHRQWDCFWHRDLNLGTNAREISDGLVEISWFFPSGREDLDIFPEPVAFLNLRGDIGSHWLQFKLLTEISSAVFILTDNISKKEYKLLYSMKESTTKYYFILSPYRGKRNTNLRFLNKLIPVLKIDHSHVLVKVSSTDSDSFVKRIRAIVGNVLRAPCRRVSVEDMAHAARKLGLKVDEDCEECQKAKDRMERITRKIKDSDAYRRDELRLQGDPWRKAAQVEKEFCQLQWAVDPPEKHRAELRRRLLELRMQQNGHDPSSGVQEFISGISSPSLSEKQYFLRWMEWGLARVAQPRLRQPPETLLTLRPKHGGTTDVGEPLWPEPLGVEHFLREMGQFYEAESCLVEAGRLPAGQRRFAHFPGLASELLLTGLPLELIDGSTLSMPVRWVTGLLKELHVRLERRSRLVVLSTVGVPGTGKSTLLNTMFGLRFATGKSCGPRGAFMQLITVAEGFSQDLGCDHILVIDSGGLIGGALTSAGDRFELEASLATLLMGLSNVTVISLAETKDIPAAILHAFLRLEKTGHMPNYQFVYQNLHDVSVPGPRPRDKRQLLDPPGDLSRAAAQMEKQGDGFRALAGLAFCDPEKQHIWHIPGLWHGAPPMAAVSLAYSEAIFELKRCLLENIRNGLSNQNKNIQQLIELVRRL

SEQ ID NO: 5993 - protein, 706 aa, Homo sapiens
MGDERPHYYGKHGTPQKYDPTFKGPIYNRGCTDIICCVFLLLAIVGYVAVGIIAWTHGDPRKVIYPTDSRGEFCGQKGTKNENKPYLFYFNIVKCASPLVLLEFQCPTPQICVEKCPDRYLTYLNARSSRDFEYYKQFCVPGFKNNKGVAEVLQDGDCPAVLIPSKPLARRCFPAIHAYKGVLMVGNETTYEDGHGSRKNITDLVEGAKKANGVLEARQLAMRIFEDYTVSWYWIIIGLVIAMAMSLLFIILLRFLAGIMVWVMIIMVILVLGYGIFHCYMEYSRLRGEAGSDVSLVDLGFQTDFRVYLHLRQTWLAFMIILSILEVIIILLLIFLRKRILIAIALIKEASRAVGYVMCSLLYPLVTFFLLCLCIAYWASTAVFLSTSNEAVYKIFDDSPCPFTAKTCNPETFPSSNESRQCPNARCQFAFYGGESGYHRALLGLQIFNAFMFFWLANFVLALGQVTLAGAFASYYWALRKPDDLPAFPLFSAFGRALRYHTGSLAFGALILAIVQIIRVILEYLDQRLKAAENKFAKCLMTCLKCCFWCLEKFIKFLNRNAYIMIAIYGTNFCTSARNAFFLLMRNIIRVAVLDKVTDFLFLLGKLLIVGSVGILAFFFFTHRIRIVQDTAPPLNYYWVPILTVIVGSYLIAHGFFSVYGMCVDTLFLCFLEDLERNDGSAERPYFMSSTLKKLLNKTNKKAAES

SEQ ID NO: 5994 - protein, 725 aa, Homo sapiens
MESGRGSSTPPGPIAALGMPDTGPGSSSLGKLQALPVGPRAHCGDPVSLAAAGDGSPDIGPTGELSGSLKIPNRDSGIDSPSSSVAGENFPCEEGLEAGPSPTVLGAHAEMALDSQVPKVTPQEEADSDVGEEPDSENTPQKADKDAGLAQHSGPQKLLHIAQELLHTEETYVKRLHLLDQVFCTRLTDAGIPPEVIMGIFSNISSIHRFHGQFLLPELKTRITEEWDTNPRLGDILQKLAPFLKMYGEYVKNFDRAVGLVSTWTQRSPLFKDVVHSIQKQEVCGNLTLQHHMLEPVQRVPRYELLLKDYLKRLPQDAPDRKDAERSLELISTAANHSNAAIRKVEKMHKLLEVYEQLGGEEDIVNPANELIKEGQIQKLSAKNGTPQDRHLFLFNSMILYCVPKLRLMGQKFSVREKMDISGLQVQDIVKPNTAHTFIITGRKRSLELQTRTEEEKKEWIQIIQATIEKHKQNSETFKAFGGAFSQDEDPSLSPDMPITSTSPVEPVVTTEGSSGAAGLEPRKLSSKTRRDKEKQSCKSCGETFNSITKRRHHCKLCGAVICGKCSEFKAENSRQSRVCRDCFLTQPVAPESTEKTPTADPQPSLLCGPLRLSESGETWSEVWAAIPMSDPQVLHLQGGSQDGRLPRTIPLPSCKLSVPDPEERLDSGHVWKLQWAKQSWYLSASSAELQQQWLETLSTAAHGDTAQDSPGALQLQVPMGAAAP

SEQ ID NO: 5995 - protein, 786 aa, Homo sapiens
MGLQPLEFSDCYLDSPWFRERIRAHEAELERTNKFIKELIKDGKNLIAATKSLSVAQRKFAHSLRDFKFEFIGDAVTDDERCIDASLREFSNFLKNLEEQREIMALSVTETLIKPLEKFRKEQLGAVKEEKKKFDKETEKNYSLIDKHLNLSAKKKDSHLQEADIQVEQNRQHFYELSLEYVCKLQEIQERKKFEFVEPMLSFFQGMFTFYHQGHELAKDFNHYKMELQINIQNTRNRFEGTRSEVEELMNKIRQNPKDHKRASQFTAEGYLYVQEKRPAPFGSSWVKHYCMYRKAAKKFNMIPFEHRSGGKLGDGEVFFLKECTKRHTDSIDRRFCFDIEAADRPGVSLTMQAFSEEERKQWLEALGGKEALSHSFNTAIIPRPEGNAQLDKMGFTIIRKCISAVETRGINDQGLYRVVGVSSKVQRLLSMLMDVKTCNEVDLENSADWEVKTITSALKQYLRSLPEPLMTYELHGDFIVPAKSGSPESRVNAIHFLVHKLPEKNKEMLDILVKHLTNVSNHSKQNLMTVANLGVVFGPTLMRPQEETVAALMDLKFQNIVVEILIENHEKIFRTPPDTTFPEPTCLSASPPNAPPRQSKRQGQRTKRPVAVYNLCLELEDGDNPYPSKEDTPTSSLDSLSSPSPVTTAVPGPPGPDKNHLLADGGSFGDWASTIPGQTRSSMVQWLNPQSPTTTSSNSAVTPLSPGSSPFPFSPPATVADKPPESIRSRKARAVYPCEAEHSSELSFEIGAIFEDVQTSREPGWLEGTLNGKRGLIPQNYVKLL

SEQ ID NO: 5996 - protein, 327 aa, Homo sapiens
MTVVSVPQREPLVLGGRLAPLGFSSRGYFGALPMVTTAPPPLPRIPDPRALPPTLFLPHFLGGDGPCLTPQPRAPAALPNRSLAVAGGTPRAAPKKRRKKKVRASPAGQLPSRFHQYQQHRPSLEGGRSPATGPSGAQEVPGPAAALAPSPAAAAGTEGASPDLAPLRPAAPGQTPLRKEVLKSKMGKSEKIALPHGQLVHGIHLYEQPKINRQKSKYNLPLTKITSAKRNENNFWQDSVSSDRIQKQEKKPFKNTENIKNSHLKKSAFLTEVSQKENYAGAKFSDPPSPSVLPKPPSHWMGSTVENSNQNRELMAVHLKTLLKVQT

SEQ ID NO: 5997 - protein, 716 aa, Homo sapiens
MEDCLHTSSENLSKLVSWAHSHGTICSLIPNLKHLLSEGSHGNLTAMWGCSAGHAYHWPLTATCRAGSQERVCFQDNRSFNSDSPSIIGVPSETQTSPVERYPGRPVKAKLDCNRTRDSCDFSYCSEPSELDETVEEYEDENTLFDMVCESSVTDEDSDFEPQTQRPQSIARKRPGVVPSSLHSSSQTQMVDECSNDVIIKKIKQEIPEDYYIVANAELTGGVDGPALSLTQMAKPKPQTHAGPSCVGSAKLIPHVTSAISTELDPHGMSASPSVISRPIVQKTARVSLASPNRGPPGTHGTNQQVAMQMPVSTSHPNKQISIPLSALQLPGQDEQVASEEFLSHLPSQVSSCEVALSPSVNTEPEVSSSQQQPPVAPAITTEATAQCIPAYSTKLNKFPVFNINDDLNDLCTSAVSPNTTKATRYALNVWRYWCMTNGLKDHTDITKIPAVKLNELLENFYVTVKKSDGSDFLATSLHAIRRGLDRILKNAGVGFSITSSTFSSSTKKLKEKLWVLSKAGMSGARSRNIVYFSLSDEEEMWQAGCLGDDSPITLLSTVVKYNSQYLNMRTLQEHADLMYGDIELLKDPQNQPYFARTDSVKRESRSGSTRVCHGKIYHEHSRGHKQCPYCLLYKYMYIHRPPTQMEAKSPFYLTARKEATDMGSVWYEEQRMGLRSLRGIVPNLAKKVKLENCENFTFVSFTQVSRRLGSHSCCQ

SEQ ID NO: 5998 - protein, 465 aa, Homo sapiens
MSDVTIVKEGWVQKRGEYIKNWRPRYFLLKTDGSFIGYKEKPQDVDLPYPLNNFSVAKCQLMKTERPKPNTFIIRCLQWTTVIERTFHVDTPEEREEWTEAIQAVADRLQRQEEERMNCSPTSQIDNIGEEEMDASTTHHKRKTMNDFDYLKLLGKGTFGKVILVREKASGKYYAMKILKKEVIIAKDEVAHTLTESRVLKNTRHPFLTSLKYSFQTKDRLCFVMEYVNGGELFFHLSRERVFSEDRTRFYGAEIVSALDYLHSGKIVYRDLKLENLMLDKDGHIKITDFGLCKEGITDAATMKTFCGTPEYLAPEVLEDNDYGRAVDWWGLGVVMYEMMCGRLPFYNQDHEKLFELILMEDIKFPRTLSSDAKSLLSGLLIKDPNKRLGGGPDDAKEIMRHSFFSGVNWQDVYDKKLVPPFKPQVTSETDTRYFDEEFTAQTITITPPEKCQQSDCGMLGNWKK

SEQ ID NO: 5999 - protein, 588 aa, Homo sapiens
MSDTSESGAGLTRFQAEASEKDSSSMMQTLLTVTQNVEVPETPKASKATEVSKTPEAREAPATQASSTTQLTDTQVLAAENKSLAADTKKQNADPQAVTMPATETKKVSHVADTKVNTKAQETEAAPSQAPADEPEPESAAAQSQENQDTRPKVKAKKARKVKHLDGEEDGSSDQSQASGTTGGRRVSKALMASMARRASRGPIAFWARRASRTRLAAWARRALLSLRSPKARRGKARRRAAKLQSSQEPEAPPPRDVALLQGRANDLVKYLLAKDQTKIPIKRSDMLKDIIKEYTDVYPEIIERAGYSLEKVFGIQLKEIDKNDHLYILLSTLEPTDAGILGTTKDSPKLGLLMVLLSIIFMNGNRSSEAVIWEVLRKLGLRPGIHHSLFGDVKKLITDEFVKQKYLDYARVPNSNPPEYEFFWGLRSYYETSKMKVLKFACKVQKKDPKEWAAQYREAMEADLKAAAEAAAEAKARAEIRARMGIGLGSENAAGPCNWDEADIGPWAKARIQAGAEAKAKAQESGSASTGASTSTNNSASASASTSGGFSAGASLTATLTFGLFAGLGGAGASTSGSSGACGFSYK

SEQ ID NO: 6000 - protein, 2163 aa, Homo sapiens
MVNENTRMYIPEENHQGSNYGSPRPAHANMNANAAAGLAPEHIPTPGAALSWQAAIDAARQAKLMGSAGNATISTVSSTQRKRQQYGKPKKQGSTTATRPPRALLCLTLKNPIRRACISIVEWKPFEIIILLTIFANCVALAIYIPFPEDDSNATNSNLERVEYLFLIIFTVEAFLKVIAYGLLFHPNAYLRNGWNLLDFIIVVVGLFSAILEQATKADGANALGGKGAGFDVKALRAFRVLRPLRLVSGVPSLQVVLNSIIKAMVPLLHIALLVLFVIIIYAIIGLELFMGKMHKTCYNQEGIADVPAEDDPSPCALETGHGRQCQNGTVCKPGWDGPKHGITNFDNFAFAMLTVFQCITMEGWTDVLYWVNDAVGRDWPWIYFVTLIIIGSFFVLNLVLGVLSGEFSKEREKAKARGDFQKLREKQQLEEDLKGYLDWITQAEDIDPENEDEGMDEEKPRNRGTPAGMLDQKKGKFAWFSHSTETHVSMPTSETESVNTENVAGGDIEGENCGARLAHRISKSKFSRYWRRWNRFCRRKCRAAVKSNVFYWLVIFLVFLNTLTIASEHYNQPNWLTEVQDTANKALLALFTAEMLLKMYSLGLQAYFVSLFNRFDCFVVCGGILETILVETKIMSPLGISVLRCVRLLRIFKITRYWNSLSNLVASLLNSVRSIASLLLLLFLFIIIFSLLGMQLFGGKFNFDEMQTRRSTFDNFPQSLLTVFQILTGEDWNSVMYDGIMAYGGPSFPGMLVCIYFIILFICGNYILLNVFLAIAVDNLADAESLTSAQKEEEEEKERKKLARTASPEKKQELVEKPAVGESKEEKIELKSITADGESPPATKINMDDLQPNENEDKSPYPNPETTGEEDEEEPEMPVGPRPRPLSELHLKEKAVPMPEASAFFIFSSNNRFRLQCHRIVNDTIFTNLILFFILLSSISLAAEDPVQHTSFRNHILFYFDIVFTTIFTIEIALKMTAYGAFLHKGSFCRNYFNILDLLVVSVSLISFGIQSSAINVVKILRVLRVLRPLRAINRAKGLKHVVQCVFVAIRTIGNIVIVTTLLQFMFACIGVQLFKGKLYTCSDSSKQTEAECKGNYITYKDGEVDHPIIQPRSWENSKFDFDNVLAAMMALFTVSTFEGWPELLYRSIDSHTEDKGPIYNYRVEISIFFIIYIIIIAFFMMNIFVGFVIVTFQEQGEQEYKNCELDKNQRQCVEYALKARPLRRYIPKNQHQYKVWYVVNSTYFEYLMFVLILLNTICLAMQHYGQSCLFKIAMNILNMLFTGLFTVEMILKLIAFKPKHYFCDAWNTFDALIVVGSIVDIAITEVNPAEHTQCSPSMNAEENSRISITFFRLFRVMRLVKLLSRGEGIRTLLWTFIKSFQALPYVALLIVMLFFIYAVIGMQVFGKIALNDTTEINRNNNFQTFPQAVLLLFRCATGEAWQDIMLACMPGKKCAPESEPSNSTEGETPCGSSFAVFYFISFYMLCAFLIINLFVAVIMDNFDYLTRDWSILGPHHLDEFKRIWAEYDPEAKGRIKHLDVVTLLRRIQPPLGFGKLCPHRVACKRLVSMNMPLNSDGTVMFNATLFALVRTALRIKTEGNLEQANEELRAIIKKIWKRTSMKLLDQVVPPAGDDEVTVGKFYATFLIQEYFRKFKKRKEQGLVGKPSQRNALSLQAGLRTLHDIGPEIRRAISGDLTAEEELDKAMKEAVSAASEDDIFRRAGGLFGNHVSYYQSDGRSAFPQTFTTQRPLHINKAGSSQGDTESPSHEKLVDSTFTPSSYSSTGSNANINNANNTALGRLPRPAGYPSTVSTVEGHGPPLSPAIRVQEVAWKLSSNRCHSRESQAAMAGQEETSQDETYEVKMNHDTEACSEPSLLSTEMLSYQDDENRQLTLPEEDKRDIRQSPKRGFLRSASLGRRASFHLECLKRQKDRGGDISQKTVLPLHLVHHQALAVAGLSPLLQRSHSPASFPRPFATPPATPGSRGWPPQPVPTLRLEGVESSEKLNSSFPSIHCGSWAETTPGGGGSSAARRVRPVSLMVPSQAGAPGRQFHGSASSLVEAVLISEGLGQFAQDPKFIEVTTQELADACDMTIEEMESAADNILSGGAPQSPNGALLPFVNCRDAGQDRAGGEEDAGCVRARGRPSEEELQDSRVYVSSL

SEQ ID NO: 6001 - protein, 307 aa, Homo sapiens
MATAQLSHCITIHKASKETVFPSQITNEHESLKMVKKLFATSISCITYLRGLFPESSYGERHLDDLSLKILREDKKCPGSLHIIRWIQGCFDALEKRYLRMAVLTLYTDPMGSEKVTEMYQFKFKYTKEGATMDFDSHSSSTSFESGTNNEDIKKASVLLIRKLYILMQDLEPLPNNVVLTMKLHYYNAVTPHDYQPLGFKEGVNSHFLLFDKEPINVQVGFVSTGFHSMKVKVMTEATKVIDLENNLFRENSTTEIAHQGLDCDEEEECNDHIQRMNFVCSQQSSECSRKKRKVSEPVKVFIPNRK

SEQ ID NO: 6002 - protein, 590 aa, Homo sapiens
MPRRSRRGIWRIPVDEIDRPGSFAWHMNRSIVLLLKVLAQLRDHSTLLKVSSMLQRTPDQGKKYLRDADRQVLAQRAFILTVKVLEDTLSELAEGSERPGPKVCGLPGARMTTDVSHKASPEDGQEGLPQPKKPPLADGSGPGPEPGGKVGLLNHRPVAMDAGDSADQSGERKDKESPRAGPTEPMDTSEATVCHSDLERTPPLLPGRPARDRGPESRPTELSLEELSISARQQPTPLTPAQPAPAPAPATTTGTRAGGHPEEPLSRLSRKRKLLEDTESGKTLLLDAYRVWQQGQKGVAYDLGRVERIMSETYMLIKQVDEEAALEQAVKFCQVHLGAAAQRQASGDTPTTPKHPKDSRENFFPVTVVPTAPDPVPADSVQRPSDAHTKPRPALAAATTIITCPPSASASTLDQSKDPGPPRPHRPEATPSMASLGPEGKLRPEPRRDGEAQEAASETQPLSSPPTAASSKAPSSGSAQPPEGHPGKPEPSRAKSRPLPNMPKLVIPSAATKFPPEITVTPPTPTLLSPKGSISEETKQKLKSAILSAQSAANVRKESLCQPALEVLETSSQESSLESETDEDDDYMDI

SEQ ID NO: 6003 - protein, 669 aa, Homo sapiens
MAAAQEADGARSAVVAAGGGSSGQVTSNGSIGRDPPAETQPQNPPAQPAPNAWQVIKGVLFRIFIIWAISSWFRRGPAPQDQAGPGGAPRVASRNLFPKDTLMNLHVYISEHEHFTDFNATSALFWEQHDLVYGDWTSGENSDGCYEHFAELDIPQSVQQNGSIYIHVYFTKSGFHPDPRQKALYRRLATVHMSRMINKYKRRRFQKTKNLLTGETEADPEMIKRAEDYGPVEVISHWHPNITINIVDDHTPWVKGSVPPPLDQYVKFDAVSGDYYPIIYFNDYWNLQKDYYPINESLASLPLRVSFCPLSLWRWQLYAAQSTKSPWNFLGDELYEQSDEEQDSVKVALLETNPYLLALTIIVSIVHSVFEFLAFKNDIQFWNSRQSLEGLSVRSVFFGVFQSFVVLLYILDNETNFVVQVSVFIGVLIDLWKITKVMDVRLDREHRVAGIFPRLSFKDKSTYIESSTKVYDDMAFRYLSWILFPLLGCYAVYSLLYLEHKGWYSWVLSMLYGFLLTFGFITMTPQLFINYKLKSVAHLPWRMLTYKALNTFIDDLFAFVIKMPVMYRIGCLRDDVVFFIYLYQRWIYRVDPTRVNEFGMSGEDPTAAAPVAEVPTAAGALTPTPAPTTTTATREEASTSLPTKPTQGASSASEPQEAPPKPAEDKKKD

SEQ ID NO: 6004 - protein, 545 aa, Homo sapiens
MNSFLSVFRYPDFSFPYFPQDYFTNANRELKKDAQQDYHLEYAMENSTHTIIEFTRELHTCDINDKSITDSTVRVIWAYHHEDAGEAGPKYHDSNRGTKSLRLLNPEKTSVLSTALPYFDLVNQDVPIPNKDTTYWCQMFKIPVFQEKHHVIKVEPVIQRGHESLVHHILLYQCSNNFNDSVLESGHECYHPNMPDAFLTCETVIFAWAIGGEGFSYPPHVGLSLGTPLDPHYVLLEVHYDNPTYEEGLIDNSGLRLFYTMDIRKYDAGVIEAGLWVSLFHTIPPGMPEFQSEGHCTLECLEEALEAEKPSGIHVFAVLLHAHLAGRGIRLRHFRKGKEMKLLAYDDDFDFNFQEFQYLKEEQTILPGDNLITECRYNTKDRAEMTWGGLSTRSEMCLSYLLYYPRINLTRCASIPDIMEQLQFIGVKEIYRPVTTWPFIIKSPKQYKNLSFMDAMNKFKWTKKEGLSFNKLVLSLPVNVRCSKTDNAEWSIQGMTALPPDIERPYKAEPLVCGTSSSSSLHRDFSINLLVCLLLLSCTLSTKSL

SEQ ID NO: 6005 - protein, 1327 aa, Homo sapiens
MRSFLQQDVNKTKSRLNVLNGLANNMDDLKINTDITGAKEELLDDNNFISDKESGVHKPKDCQTSFQKNNTLTLPEELSKDKSENALSGGQSSLFIHAGAPTVSSENFILPKGAAVNGPVSHSSLTKTSNMNKGSVSLTTGQPVDQPTTESCSTLKVAADLQLSTPQKASQHQVLFLLSDVAHAKNPTHSNKKLPTSASVGCDIQNSVGSNIKSDGTLINQVEVGEDGEDLLVKDDCVNTVTGISSGTDGFRSENDTNWDPQKEFIQFLMTNEETVDKAPPHSKIGLEKKRKRKMDVSKITRYTEDCFSDSNCVPNKSKMQEVDFLEQNEELQAVDSQKYALSKVKPESTDEDLESVDAFQHLIYNPDKCGEESSPVHTSTFLSNTLKKKCEESDSESPATFSTEEPSFYPCTKCNVNFREKKHLHRHMMYHLDGNSHFRHLNVPRPYACRECGRTFRDRNSLLKHMIIHQERRQKLMEEIRELKELQDEGRSARLQCPQCVFGTNCPKTFVQHAKTHEKDKRYYCCEECNFMAVTENELECHRGIAHGAVVKCPMVTSDIAQRKTQKKTFMKDSVVGSSKKSATYICKMCPFTTSAKSVLKKHTEYLHSSSCVDSFGSPLGLDKRKNDILEEPVDSDSTKTLTKQQSTTFPKNSALKQDVKRTFGSTSQSSSFSKIHKRPHRIQKARKSIAQSGVNMCNQNSSPHKNVTIKSSVDQKPKYFHQAAKEKSNAKANSHYLYRHKYENYRMIKKSGESYPVHFKKEEASSLNSLHLFSSSSNSHNNFISDPHKPDAKRPESFKDHRRVAVKRVIKESKKESSVGGEDLDSYPDFLHKMTVVVLQKLNSAEKKDSYETEDESSWDNVELGDYTTQAIEDETYSDINQEHVNLFPLFKSKVEGQEPGENATLSYDQNDGFYFEYYEDTGSNNFLHEIHDPQHLETADASLSKHSSVFHWTDLSLEKKSCPYCPATFETGVGLSNHVRGHLHRAGLSYEARHVVSPEQIATSDKMQHFKRTGTGTPVKRVRKAIEKSETTSEHTCQLCGGWFDTKIGLSNHVRGHLKRLGKTKWDAHKSPICVLNEMMQNEEKYEKILKALNSRRIIPRPFVAQKLASSDDFISQNVIPLEAYRNGLKTEALSVSASEEEGLNFLNEYDETKPELPSGKKNQSLTLIELLKNKRMGEERNSAISPQKIHNQTARKRFVQKCVLPLNEDSPLMYQPQKMDLTMHSALDCKQKKSRSRSGSKKKMLTLPHGADEVYILRCRFCGLVFRGPLSVQEDWIKHLQRHIVNANLPRTGAGMVEVTSLLKKPASITETSFSLLMAEAAS

SEQ ID NO: 6006 - protein, 669 aa, Homo sapiens
MEKCSVGGLELTEQTPALLGNMAMATSLMDIGDSFGHPACPLVSRSRNSPVEDDDDDDDVVFIESIQPPSISAPAIADQRNFIFASSKNEKPQGNYSVIPPSSRDLASQKGNISETIVIDDEEDIETNGGAEKKSSCFIEWGLPGTKNKTNDLDFSTSSLSRSKTKTGVRPFNPGRMNVAGDLFQNGEFATHHSPDSWISQSASFPSNQKQPGVDSLSPVALLRKQNFQPTAQQQLTKPAKITCANCKKPLQKGQTAYQRKGSAHLFCSTTCLSSFSHKRTQNTRSIICKKDASTKKANVILPVESSKSFQEFYSTSCLSPCENNWNLKKGVFNKSRCTICSKLAEIRHEVSVNNVTHKLCSNHCFNKYRLANGLIMNCCEHCGEYMPSKSTGNNILVIGGQQKRFCCQSCINEYKQMMETKSKKLTASENRKRNAFREENEKQLYGSSNTLLKKIEGIPEKKEKTSQLQLSVECGTDTLLIQENVNLPPSSTSTIADTFQEQLEEKNFEDSIVPVVLSADPGTWPRILNIKQRDTLVENVPPQVRNFNFPKDNTGRKFSETYYTRILPNGEKTTRSWLLYSTSKDSVFCLYCKLFGEGKNQLKNENGCKDWQHLSHILSKHEESEMHVNNSVKYSKLKSDLKKNKAIDAAEHRLYENEKNDGVLLLYT

SEQ ID NO: 6007 - protein, 361 aa, Homo sapiens
MEQPQEEAPEVREEEEKEEVAEAEGAPELNGGPQHALPSSSYTDLSRSSSPPSLLDQLQMGCDGASCGSLNMECRVCGDKASGFHYGVHACEGCKGFFRRTIRMKLEYEKCERSCKIQKKNRNKCQYCRFQKCLALGMSHNAIRFGRMPEAEKRKLVAGLTANEGSQYNPQVADLKAFSKHIYNAYLKNFNMTKKKARSILTGKASHTAPFVIHDIETLWQAEKGLVWKQLVNGLPPYKEISVHVFYRCQCTTVETVRELTEFAKSIPSFSSLFLNDQVTLLKYGVHEAIFAMLASIVNKDGLLVANGSGFVTREFLRSLRKPFSDIIEPKFEFAVKFNALELDDSDLALFIAAIILCGGE

SEQ ID NO: 6008 - protein, 913 aa, Homo sapiens
MTKFQEMVTFKDVAVVFTEEELGLLDSVQRKLYRDVMLENFRNLLLVAHQPFKPDLISQLEREEKLLMVETETPRDGCSGRKNQQKMESIQEVTVSYFSPKELSSRQTWQQSAGGLIRCQDFLKVFQGKNSQLQEQGNSLGQVWAGIPVQISEDKNYIFTHIGNGSNYIKSQGYPSWRAHHSWRKMYLKESHNYQCRCQQISMKNHFCKCDSVSWLSHHNDKLEVHRKENYSCHDCGEDIMKVSLLNQESIQTEEKPYPCTGYRKAFSNDSSSEVHQQFHLEGKPYTYSSCGKGCNYSSLLHIHQNIEREDDIENSHLKSYQRVHTEEKPCKCGEYGENFNHCSPLNTYELIHTGEMSYRHNIYEKAFSHSLDLNSIFRVHTRDEPHEYEENENVFNQSSCLQVHQKIHTEEKLYTDIEYGKSFICSSNLDIQHRVHMEENSYNSEECGNGFSLASHFQDLQIVHTKEQPYKRYVCSNSFSHNLYLQGHPKIHIGEKPRKEHGNGFNWSSKLKDHQRVHTGQKPYKCNICGKGFNHRSVLNVHQRVHTGEKPYKCEECDKGFSRSSYLQAHQRVHTGEKPYKCEECGKGFSRNSYLQGHQRVHTGEKPYKCEECGKGFSRSSHLQGHQRVHTGEKPFKCEECGKGFSWSFNLQIHQRVHTGEKPYKCEECGKGFSKASTLLAHQRVHTGEKPYQCDECGKSFSQRSYLQSHQSVHSGERPYICEVCGKGFSQRAYLQGHQRVHTRVKPYKCEMCGKGFSQSSRLEAHRRVHTGGKPYKCEVCTKGFSESSRLQAHQRVHVEGRPYKCEQCGKGFSGYSSLQAHHRVHTGEKPYKCEVCGKGFSQRSNLQAHQRVHTGEKPYKCDACGKGFRWSSGLLIHQRVHSSDKFYKSEDYGKDYPSSENLHRNEDSVLF

SEQ ID NO: 6009 - protein, 615 aa, Homo sapiens
MGLKAAQKTLFPLRSIDDVVRLFAAELGREEPDLVLLSLVLGFVEHFLAVNRVIPTNVPELTFQPSPAPDPPGGLTYFPVADLSIIAALYARFTAQIRGAVDLSLYPREGGVSSRELVKKVSDVIWNSLSRSYFKDRAHIQSLFSFITGWSPVGTKLDSSGVAFAVVGACQALGLRDVHLALSEDHAWVVFGPNGEQTAEVTWHGKGNEDRRGQTVNAGVAERSWLYLKGSYMRCDRKMEVAFMVCAINPSIDLHTDSLELLQLQQKLLWLLYDLGHLERYPMALGNLADLEELEPTPGRPDPLTLYHKGIASAKTYYRDEHIYPYMYLAGYHCRNRNVREALQAWADTATVIQDYNYCREDEEIYKEFFEVANDVIPNLLKEAASLLEAGEERPGEQSQGTQSQGSALQDPECFAHLLRFYDGICKWEEGSPTPVLHVGWATFLVQSLGRFEGQVRQKVRIVSREAEAAEAEEPWGEEAREGRRRGPRRESKPEEPPPPKKPALDKGLGTGQGAVSGPPRKPPGTVAGTARGPEGGSTAQVPAPTASPPPEGPVLTFQSEKMKGMKELLVATKINSSAIKLQLTAQSQVQMKKQKVSTPSDYTLSFLKRQRKGL

SEQ ID NO: 6010 - protein, 748 aa, Homo sapiens
MGLRTAKKRGLGGGGKWKREEGGGTRGRREVRPACFLQSGGRGDPGDVGGPAGNPGCSPHPRAATRPPPLPAHTPAHTPEWCGAASAEAAEPRRAGPHLCIPAPGLTKTPILEKVPRKMAAKTPSSEESGLPKLPVPPLQQTLATYLQCMRHLVSEEQFRKSQAIVQQFGAPGGLGETLQQKLLERQEKTANWVSEYWLNDMYLNNRLALPVNSSPAVIFARQHFPGTDDQLRFAASLISGVLSYKALLDSHSIPTDCAKGQLSGQPLCMKQYYGLFSSYRLPGHTQDTLVAQNSSIMPEPEHVIVACCNQFFVLDVVINFRRLSEGDLFTQLRKIVKMASNEDERLPPIGLLTSDGRSEWAEARTVLVKDSTNRDSLDMIERCICLVCLDAPGGVELSDTHRALQLLHGGGYSKNGANRWYDKSLQFVVGRDGTCGVVCEHSPFDGIVLVQCTEHLLKHVTQSSRKLIRADSVSELPAPRRLRWKCSPEIQGHLASSAEKLQRIVKNLDFIVYKFDNYGKTFIKKQKCSPDAFIQVALQLAFYRLHRRLVPTYESASIRRFQEGRVDNIRSATPEALAFVRAVTDHKAAVPASEKLLLLKDAIRAQTAYTVMAITGMAIDNHLLALRELARAMCKELPEMFMDETYLMSNRFVLSTSQVPTTTEMFCCYGPVVPNGYGACYNPQPETILFCISSFHSCKETSSSKFAKAVEESLIDMRDLCSLLPPTESKPLATKEKATRPSQGHQP

SEQ ID NO: 6011 - protein, 605 aa, Homo sapiens
MAAGQREARPQVSLTFEDVAVLFTRDEWRKLAPSQRNLYRDVMLENYRNLVSLGLPFTKPKVISLLQQGEDPWEVEKDGSGVSSLGSKSSHKTTKSTQTQDSSFQGLILKRSNRNVPWDLKLEKPYIYEGRLEKKQDKKGSFQIVSATHKKIPTIERSHKNTELSQNFSPKSVLIRQQILPREKTPPKCEIQGNSLKQNSQLLNQPKITADKRYKCSLCEKTFINTSSLRKHEKNHSGEKLFKCKECSKAFSQSSALIQHQITHTGEKPYICKECGKAFTLSTSLYKHLRTHTVEKSYRCKECGKSFSRRSGLFIHQKIHAEENPCKYNPGRKASSCSTSLSGCQRIHSRKKSYLCNECGNTFKSSSSLRYHQRIHTGEKPFKCSECGRAFSQSASLIQHERIHTGEKPYRCNECGKGFTSISRLNRHRIIHTGEKFYNCNECGKALSSHSTLIIHERIHTGEKPCKCKVCGKAFRQSSALIQHQRMHTGERPYKCNECGKTFRCNSSLSNHQRIHTGEKPYRCEECGISFGQSSALIQHRRIHTGEKPFKCNTCGKTFRQSSSRIAHQRIHTGEKPYECNTCGKLFNHRSSLTNHYKIHIEEDP

SEQ ID NO: 6012 - protein, 238 aa, Homo sapiens
MEPGLWLLFGLTVTSAAGFVPCSQSGDAGRRGVSQAPTAARSEGDCEETVAGPGEETVAGPGEGTVAPTALQGPSPGSPGQEQAAEGAPEHHRSRRCTCFTYKDKECVYYCHLDIIWINTPEQTVPYGLSNYRGSFRGKRSAGPLPGNLQLSHRPHLRCACVGRYDKACLHFCTQTLDVSSNSRTAEKTDKEEEGKVEVKDQQSKQALDLHHPKLMPGSGLALAPSTCPRCLFQEGAP

SEQ ID NO: 6013 - protein, 550 aa, Homo sapiens
MVTAAMLLQCCPVLARGPTSLLGKVVKTHQFLFGIGRCPILATQGPNCSQIHLKATKAGGDSPSWAKGHCPFMLSELQDGKSKIVQKAAPEVQEDVKAFKTGNYVFSYDQFFRDKIMEKKQDHTYRVFKTVNRWADAYPFAQHFSEASVASKDVSVWCSNDYLGMSRHPQVLQATQETLQRHGAGAGGTRNISGTSKFHVELEQELAELHQKDSALLFSSCFVANDSTLFTLAKILPGCEIYSDAGNHASMIQGIRNSGAAKFVFRHNDPDHLKKLLEKSNPKIPKIVAFETVHSMDGAICPLEELCDVSHQYGALTFVDEVHAVGLYGSRGAGIGERDGIMHKIDIISGTLGKAFGCVGGYIASTRDLVDMVRSYAAGFIFTTSLPPMVLSGALESVRLLKGEEGQALRRAHQRNVKHMRQLLMDRGLPVIPCPSHIIPIRVGNAALNSKLCDLLLSKHGIYVQAINYPTVPRGEELLRLAPSPHHSPQMMEDFVEKLLLAWTAVGLPLQDVSVAACNFCRRPVHFELMSEWERSYFGNMGPQYVTTYA

SEQ ID NO: 6014 - protein, 378 aa, Homo sapiens
MNNSGADEIGKLFVGGLDWSTTQETLRSYFSQYGEVVDCVIMKDKTTNQSRGFGFVKFKDPNCVGTVLASRPHTLDGRNIDPKPCTPRGMQPERTRPKEGWQKGPRSDNSKSNKIFVGGIPHNCGETELREYFKKFGVVTEVVMIYDAEKQRPRGFGFITFEDEQSVDQAVNMHFHDIMGKKVEVKRAEPRDSKSQAPGQPGASQWGSRVVPNAANGWAGQPPPTWQQGYGPQGMWVPAGQAIGGYGPPPAGRGAPPPPPPFTSYIVSTPPGGFPPPQGFPQGYGAPPQFSFGYGPPPPPPDQFAPPGVPPPPATPGAAPLAFPPPPSQAAPDMSKPPTAQPDFPYGQYGLGSYSPAPPGCGPHFVYSLMVRLSSDVA

SEQ ID NO: 6015 - protein, 435 aa, Homo sapiens
MQGQGRRRGTCKDIFCSKMASYLYGVLFAVGLCAPIYCVSPANAPSAYPRPSSTKSTPASQVYSLNTDFAFRLYRRLVLETPSQNIFFSPVSVSTSLAMLSLGAHSVTKTQILQGLGFNLTHTPESAIHQGFQHLVHSLTVPSKDLTLKMGSALFVKKELQLQANFLGNVKRLYEAEVFSTDFSNPSIAQARINSHVKKKTQGKVVDIIQGLDLLTAMVLVNHIFFKAKWEKPFHPEYTRKNFPFLVGEQVTVHVPMMHQKEQFAFGVDTELNCFVLQMDYKGDAVAFFVLPSKGKMRQLEQALSARTLRKWSHSLQKRWIEVFIPRFSISASYNLETILPKMGIQNVFDKNADFSGIAKRDSLQVSKATHKAVLDVSEEGTEATAATTTKFIVRSKDGPSYFTVSFNRTFLMMITNKATDGILFLGKVENPTKS

SEQ ID NO: 6016 - protein, 610 aa, Homo sapiens
MQRDFRWLWVYEIGYAADNSRTLNVDSTAMTLPMSDPTAWATAMNNLGMAPLGIAGQPILPDFDPALGMMTGIPPITPMMPGLGIVPPPIPPDMPVVKEIIHCKSCTLFPPNPNLPPPATRERPPGCKTVFVGGLPENGTEQIIVEVFEQCGEIIAIRKSKKNFCHIRFAEEYMVDKALYLSGYRIRLGSSTDKKDTGRLHVDFAQARDDLYEWECKQRMLAREERHRRRMEEERLRPPSPPPVVHYSDHECSIVAEKLKDDSKFSEAVQTLLTWIERGEVNRRSANNFYSMIQSANSHVRRLVNEKAAHEKDMEEAKEKFKQALSGILIQFEQIVAVYHSASKQKAWDHFTKAQRKNISVWCKQAEEIRNIHNDELMGIRREEEMEMSDDEIEEMTETKETEESALVSQAEALKEENDSLRWQLDAYRNEVELLKQEQGKVHREDDPNKEQQLKLLQQALQGMQQHLLKVQEEYKKKEAELEKLKDDKLQVEKMLENLKEKESCASRLCASNQDSEYPLEKTMNSSPIKSEREALLVGIISTFLHVHPFGASIEYICSYLHRLDNKICTSDVECLMGRLQHTFKQEMTGVGASLEKRWKFCGFEGLKLT

SEQ ID NO: 6017 - protein, 1539 aa, Homo sapiens
MDSYFKAAVSDLDKLLDDFEQNPDEQDYLQDVQNAYDSNHCSVSSELASSQRTSLLPKDQECVNSCASSETSYGTNESSLNEKTLKGLTSIQNEKNVTGLDLLSSVDGGTSDEIQPLYMGRCSKPICDLISDMGNLVHATNSEEDIKKLLPDDFKSNADSLIGLDLSSVSDTPCVSSTDHDSDTVREQQNDISSELQNREIGGIKELGIKVDTTLSDSYNYSGTENLKDKKIFNQLESIVDFNMSSALTRQSSKMFHAKDKLQHKSQPCGLLKDVGLVKEEVDVAVITAAECLKEEGKTSALTCSLPKNEDLCLNDSNSRDENFKLPDFSFQEDKTVIKQSAQEDSKSLDLKDNDVIQDSSSALHVSSKDVPSSLSCLPASGSMCGSLIESKARGDFLPQHEHKDNIQDAVTIHEEIQNSVVLGGEPFKENDLLKQEKCKSILLQSLIEGMEDRKIDPDQTVIRAESLDGGDTSSTVVESQEGLSGTHVPESSDCCEGFINTFSSNDMDGQDLDYFNIDEGAKSGPLISDAELDAFLTEQYLQTTNIKSFEENVNDSKSQMNQIDMKGLDDGNINNIYFNAEAGAIGESHGINIICEIVDKQNTIENGLSLGEKSTIPVQQGLPTSKSEITNQLSVSDINSQSVGGARPKQLFSLPSRTRSSKDLNKPDVPDTIESEPSTADTVVPITCAIDSTADPQVSFNSNYIDIESNSEGGSSFVTANEDSVPENTCKEGLVLGQKQPTWVPDSEAPNCMNCQVKFTFTKRRHHCRACGKVFCGVCCNRKCKLQYLEKEARVCVVCYETISKAQAFERMMSPTGSNLKSNHSDECTTVQPPQENQTSSIPSPATLPVSALKQPGVEGLCSKEQKRVWFADGILPNGEVADTTKLSSGSKRCSEDFSPLSPDVPMTVNTVDHSHSTTVEKPNNETGDITRNEIIQSPISQVPSVEKLSMNTGNEGLPTSGSFTLDDDVFAETEEPSSPTGVLVNSNLPIASISDYRLLCDINKYVCNKISLLPNDEDSLPPLLVASGEKGSVPVVEEHPSHEQIILLLEGESFHPVTFVLNANLLVNVKFIFYSSDKYWYFSTNGLHGLGQAEIIILLLCLPNEDTIPKDIFRLFITIYKDALKGKYIENLDNITFTESFLSSKDHGGFLFITPTFQKLDDLSLPSNPFLCGILIQKLEIPWAKVFPMRLMLRLGAEYKAYPAPLTSIRGRKPLFGEIGHTIMNLLVDLRNYQYTLHNIDQLLIHMEMGKSCIKIPRKKYSDVMKVLNSSNEHVISIGASFSTEADSHLVCIQNDGIYETQANSATGHPRKVTGASFVVFNGALKTSSGFLAKSSIVEDGLMVQITPETMNGLRLALREQKDFKITCGKVDAVDLREYVDICWVDAEEKGNKGVISSVDGISLQGFPSEKIKLEADFETDEKIVKCTEVFYFLKDQDLSILSTSYQFAKEIAMACSAALCPHLKTLKSNGMNKIGLRVSIDTDMVEFQAGSEGQLLPQHYLNDLDSALIPVIHGGTSNSSLPLEIELVFFIIEHLF

SEQ ID NO: 6018 - protein, 671 aa, Homo sapiens
MNGAPSPEDGASPSSPPLPPPPPPSWREFCESHARAAALDFARRFRLYLASHPQYAGPGAEAAFSRRFAELFLQHFEAEVARASGSLSPPILAPLSPGAEISPHDLSLESCRVGGPLAVLGPSRSSEDLAGPLPSSVSSSSTTSSKPKLKKRFSLRSVGRSVRGSVRGILQWRGTVDPPSSAGPLETSSGPPVLGGNSNSNSSGGAGTVGRGLVSDGTSPGERWTHRFERLRLSRGGGALKDGAGMVQREELLSFMGAEEAAPDPAGVGRGGGVAGPPSGGGGQPQWQKCRLLLRSEGEGGGGSRLEFFVPPKASRPRLSIPCSSITDVRTTTALEMPDRENTFVVKVEGPSEYIMETVDAQHVKAWVSDIQECLSPGPCPATSPRPMTLPLAPGTSFLTRENTDSLELSCLNHSESLPSQDLLLGPSESNDRLSQGAYGGLSDRPSASISPSSASIAASHFDSMELLPPELPPRIPIEEGPPTGTVHPLSAPYPPLDTPETATGSFLFQGEPEGGEGDQPLSGYPWFHGMLSRLKAAQLVLTGGTGSHGVFLVRQSETRRGEYVLTFNFQGKAKHLRLSLNEEGQCRVQHLWFQSIFDMLEHFRVHPIPLESGGSSDVVLVSYVPSSQRQQGREQAGSHAGVCEGDGCHPDASCTLMPFGASDCVTDHLP

SEQ ID NO: 6019 - protein, 881 aa, Homo sapiens
MTTETGPDSEVKKAQEEAPQQPEAAAAVTTPVTPAGHGHPEANSNEKHPSQQDTRPAEQSLDMEEKDYSEADGLSERTTPSKAQKSPQKIAKKYKSAICRVTLLDASEYECEVEKHGRGQVLFDLVCEHLNLLEKDYFGLTFCDADSQKNWLDPSKEIKKQIRSSPWNFAFTVKFYPPDPAQLTEDITRYYLCLQLRADIITGRLPCSFVTHALLGSYAVQAELGDYDAEEHVGNYVSELRFAPNQTRELEERIMELHKTYRGMTPGEAEIHFLENAKKLSMYGVDLHHAKDSEGIDIMLGVCANGLLIYRDRLRINRFAWPKILKISYKRSNFYIKIRPGEYEQFESTIGFKLPNHRSAKRLWKVCIEHHTFFRLVSPEPPPKGFLVMGSKFRYSGRTQAQTRQASALIDRPAPFFERSSSKRYTMSRSLDGAEFSRPASVSENHDAGPDGDKRDEDGESGGQRSEAEEGEVRTPTKIKELKPEQETTPRHKQEFLDKPEDVLLKHQASINELKRTLKEPNSKLIHRDRDWERERRLPSSPASPSPKGTPEKANERAGLREGSEEKVKPPRPRAPESDTGDEDQDQERDTVFLKDNHLAIERKCSSITVSSTSSLEAEVDFTVIGDYHGSAFEDFSRSLPELDRDKSDSDTEGLLFSRDLNKGAPSQDDESGGIEDSPDRGACSTPDMPQFEPVKTETMTVSSLAIRKKIEPEAVLQTRVSAMDNTQQVDGSASVGREFIATTPSITTETISTTMENSLKSGKGAAAMIPGPQTVATEIRSLSPIIGKDVLTSTYGATAETLSTSTTTHVTKTVKGGFSETRIEKRIIITGDEDVDQDQALALAIKEAKLQHPDMLVTKAVVYRETDPSPEERDKKPQES

SEQ ID NO: 6020 - protein, 427 aa, Homo sapiens
MTKLITETPDQPIPFLIDHLQSKQGNRGQLQRTLSGSAALWAESEKSESKGTRRDFRSYDKPWQLNAKKPKKSKSDLAVSNISPPSPDSKSLPRSVEHPKWNWRTKPQSRDFDELNHILQESKKLGKALENLSRSIAISDELDKETVTFNSSLLRPRVIGEWIGREENDADPLAAEMLQPPIPRSKNDQWESEDSGSSPAGSLKMEPKNKGLKQQQQQHKKLLAAMLSQDSFESIHSPTPSVTEEDIDNEDDAMELLEDLNDLRMEGVTTLVPSGSKFNQGRPTYPAEPQAKVTLNICSRCARLQGDNLEERTEESLPILHSPDEKIPDSFDSLPGTEEALMEEGDEFEKASKLTGPGEASSGVGHSLKNYMEEDESLKQLQVVHQPWILPSDTESEGVEAEQEKRSADLLLCVPCSSCPTLVYSGL

SEQ ID NO: 6021 - protein, 1007 aa, Homo sapiens
MAAAETQSLREQPEMEDANSEKSINEENGEVSEDQSQNKHSRHKKKKHKHRSKHKKHKHSSEEDKDKKHKHKHKHKKHKRKEIIDASDKEGMSPAKRTKLDDLALLEDLEKQRALIKAELDNELMEGKVQSGMGLILQGYESGSEEEGEIHEKARNGNRSSTRSSSTKGKLELVDNKITTKKRSKSRSKERTRHRSDKKKSKGGIEIVKEKTTRSKSKERKKSKSPSKRSKSQDQARKSKSPTLRRRSQEKIGKARSPTDDKVKIEDKSKSKDRKKSPIINESRSRDRGKKSRSPVDLRGKSKDRRSRSKERKSKRSETDKEKKPIKSPSKDASSGKENRSPSRRPGRSPKRRSLSPKPRDKSRRSRSPLLNDRRSKQSKSPSRTLSPGRRAKSRSLERKRREPERRRLSSPRTRPRDDILSRRERSKDASPINRWSPTRRRSRSPIRRRSRSPLRRSRSPRRRSRSPRRRDRGRRSRSRLRRRSRSRGGRRRRSRSKVKEDKFKGSLSEGMKVEQESSSDDNLEDFDVEEEDEEALIEQRRIQRQAIVQKYKYLAEDSNMSVPSEPSSPQSSTRTRSPSPDDILERVAADVKEYERENVDTFEASVKAKHNLMTVEQNNGSSQKKLLAPDMFTESDDMFAAYFDSARLRAAGIGKDFKENPNLRDNWTDAEGYYRVNIGEVLDKRYNVYGYTGQGVFSNVVRARDNARANQEVAVKIIRNNELMQKTGLKELEFLKKLNDADPDDKFHCLRLFRHFYHKQHLCLVFEPLSMNLREVLKKYGKDVGLHIKAVRSYSQQLFLALKLLKRCNILHADIKPDNILVNESKTILKLCDFGSASHVADNDITPYLVSRFYRAPEIIIGKSYDYGIDMWSVGCTLYELYTGKILFPGKTNNHMLKLAMDLKGKMPNKMIRKGVFKDQHFDQNLNFMYIEVDKVTEREKVTVMSTINPTKDLLADLIGCQRLPEDQRKKVHQLKDLLDQILMLDPAKRISINQALQHAFIQEKI

SEQ ID NO: 6022 - protein, 335 aa, Homo sapiens
MTTVTVTTEIPPRDKMEDNSALYESTSAHIIEETEYVKKIRTTLQKIRTQMFKDEIRHDSTNHKLDAKHCGNLQQGSDSEMDPSCCSLDLLMKKIKGKDLQLLEMNKENEVLKIKLQASREAGAAALRNVAQRLFENYQTQSEEVRKKQEDSKQLLQVNKLEKEQKLKQHVENLNQVAEKLEEKHSQITELENLVQRMEKEKRTLLERKLSLENKLLQLKSSATYGKSCQDLQREISILQEQISHLQFVIHSQHQNLRSVIQEMEGLKNNLKEQDKRIENLREKVNILEAQNKELKTQVALSSETPRTKVSKAVSTSELKTEGVSPYLMLIRLRK

SEQ ID NO: 6023 - protein, 380 aa, Homo sapiens
MASLAAANAEFCFNLFREMDDNQGNGNVFFSSLSLFAALALVRLGAQDDSLSQIDKLLHVNTASGYGNSSNSQSGLQSQLKRVFSDINASHKDYDLSIVNGLFAEKVYGFHKDYIECAEKLYDAKVERVDFTNHLEDTRRNINKWVENETHGKIKNVIGEGGISSSAVMVLVNAVYFKGKWQSAFTKSETINCHFKSPKCSGKAVAMMHQERKFNLSVIEDPSMKILELRYNGGINMYVLLPENDLSEIENKLTFQNLMEWTNPRRMTSKYVEVFFPQFKIEKNYEMKQYLRALGLKDIFDESKADLSGIASGGRLYISRMMHKSYIEVTEEGTEATAATGSNIVEKQLPQSTLFRADHPFLFVIRKDDIILFSGKVSCP

SEQ ID NO: 6024 - protein, 812 aa, Homo sapiens
MAAVTRDFGEMLLHSGRVLPAEAQPWGAPVEVESFLVHPGDLLQLRCRLRDDVQSINWLRDGVQLAESNRTRITGEEVEVQDSVPADSGLYACVTSSPSGSDTTYFSVNVSDALPSSEDDDDDDDSSSEEKETDNTKPNRMPVAPYWTSPEKMEKKLHAVPAAKTVKFKCPSSGTPNPTLRWLKNGKEFKPDHRIGGYKVRYATWSIIMDSVVPSDKGNYTCIVENEYGSINHTYQLDVVERSPHRPILQAGLPANKTVALGSNVEFMCKVYSDPQPHIQWLKHIEVNGSKIGPDNLPYVQILKTAGVNTTDKEMEVLHLRNVSFEDAGEYTCLAGNSIGLSHHSAWLTVLEALEERPAVMTSPLYLEIIIYCTGAFLISCMVGSVIVYKMKSGTKKSDFHSQMAVHKLAKSIPLRRQVSADSSASMNSGVLLVRPSRLSSSGTPMLAGVSEYELPEDPRWELPRDRLVLGKPLGEGCFGQVVLAEAIGLDKDKPNRVTKVAVKMLKSDATEKDLSDLISEMEMMKMIGKHKNIINLLGACTQDGPLYVIVEYASKGNLREYLQARRPPGLEYCYNPSHNPEEQLSSKDLVSCAYQVARGMEYLASKKCIHRDLAARNVLVTEDNVMKIADFGLARDIHHIDYYKKTTNGRLPVKWMAPEALFDRIYTHQSDVWSFGVLLWEIFTLGGSPYPGVPVEELFKLLKEGHRMDKPSNCTNELYMMMRDCWHAVPSQRPTFKQLVEDLDRIVALTSNQEYLDLSMPLDQYSPSFPDTRSSTCSSGEDSVFSHEPLPEEPCLPRHPAQLANGGLKRR

SEQ ID NO: 6025 - protein, 1407 aa, Homo sapiens [sequence omitted]

SEQ ID NO: 6026 - protein, 129 aa, Homo sapiens
MILSNTTAVTPFLTKLWQETVQQGGNMSGLARRSPRSSDGKLEALYVLMVLGFFGFFTLGIMLSYIRSKKLEHSNDPFNVYIESDAWQEKDKAYVQARVLESYRSCYVVENHLAIEQPNTHLPETKPSP

SEQ ID NO: 6027 - protein, 927 aa, Homo sapiens
MASLSTWSSPAEPREMEDFARGAASPGPSRPGLVPVSIIGAEDEDFENELETNSEEQNSQFQSLEQVKRRPAHLMALLQHVALQFEPGPLLCCLHADMLGSLGPKEAKKAFLDFYHSFLEKTAVLRVPVPPNVAFELDRTRADLISEDVQRRFVQEVVQSQQVAVGRQLEDFRSKRLMGMTPWEQELAQLEAWVGRDRASYEARERHVAERLLMHLEEMQHTISTDEEKSAAVVNAIGLYMRHLGVRTKSGDKKSGRNFFRKKVMGNRRSDEPAKTKKGLSSILDAARWNRGEPQVPDFRHLKAEVDAEKPGATDRKGGVGMPSRDRNIGAPGQDTPGVSLHPLSLDSPDREPGADAPLELGDSSPQGPMSLESLAPPESTDEGAETESPEPGDEGEPGRSGLELEPEEPPGWRELVPPDTLHSLPKSQVKRQEVISELLVTEAAHVRMLRVLHDLFFQPMAECLFFPLEELQNIFPSLDELIEVHSLFLDRLMKRRQESGYLIEEIGDVLLARFDGAEGSWFQKISSRFCSRQSFALEQLKAKQRKDPRFCAFVQEAESRPRCRRLQLKDMIPTEMQRLTKYPLLLQSIGQNTEEPTEREKVELAAECCREILHHVNQAVRDMEDLLRLKDYQRRLDLSHLRQSSDPMLSEFKNLDITKKKLVHEGPLTWRVTKDKAVEVHVLLLDDLLLLLQRQDERLLLKSHSRTLTPTPDGKTMLRPVLRLTSAMTREVATDHKAFYVLFTWDQEAQIYELVAQTVSERKNWCALITETAGSLKVPAPASRPKPRPSPSSTREPLLSSSENGNGGRETSPADARTERILSDLLPFCRPGPEGQLAATALRKVLSLKQLLFPAEEDNGAGPPRDGDGVPGGGPLSPARTQEIQENLLSLEETMKQLEELEEEFCRLRPLLSQLGGNSVPQPGCT

SEQ ID NO: 6028 - protein, 268 aa, Homo sapiens
MSGKANASKKNAQQLKRNPKRKKDNEEVVLSENKVRNTVKKNKNHLKDLSSEGQTKHTNLKHGKTAASKRKTWQPLSKSTRDHLQTMMESVIMTILSNSIKEKEEIQYHLNFLKKRLLQQCETLKVPPKKMEDLTNVSSLLNMERARDKANEEGLALLQEEIDKMVETTELMTGNIQSLKNKIQILASEVEEEEERVKQMHQINSSGVLSLPELSQKTLKAPTLQKEILALIPNQNALLKDLDILHNSSQMKSMSTFIEEAYKKLDAS

SEQ ID NO: 6029 - protein, 1037 aa, Homo sapiens
MNSPNESDGMSGREPSLEILPRTSLHSIPVTVEVKPVLPRAMPSSMGGGGGGSPSPVELRGALVGSVDPTLREQQLQQELLALKQQQQLQKQLLFAEFQKQHDHLTRQHEVQLQKHLKQQQEMLAAKQQQEMLAAKRQQELEQQRQREQQRQEELEKQRLEQQLLILRNKEKSKESAIASTEVKLRLQEFLLSKSKEPTPGGLNHSLPQHPKCWGAHHASLDQSSPPQSGPPGTPPSYKLPLPGPYDSRDDFPLRKTASEPNLKVRSRLKQKVAERRSSPLLRRKDGTVISTFKKRAVEITGAGPGASSVCNSAPGSGPSSPNSSHSTIAENGFTGSVPNIPTEMLPQHRALPLDSSPNQFSLYTSPSLPNISLGLQATVTVTNSHLTASPKLSTQQEAERQALQSLRQGGTLTGKFMSTSSIPGCLLGVALEGDGSPHGHASLLQHVLLLEQARQQSTLIAVPLHGQSPLVTGERVATSMRTVGKLPRHRPLSRTQSSPLPQSPQALQQLVMQQQHQQFLEKQKQQQLQLGKILTKTGELPRQPTTHPEETEEELTEQQEVLLGEGALTMPREGSTESESTQEDLEEEDEEDDGEEEEDCIQVKDEEGESGAEEGPDLEEPGAGYKKLFSDAQPLQPLQVYQAPLSLATVPHQALGRTQSSPAAPGGMKSPPDQPVKHLFTTGPISQKMYAVLPCGGIGVDSDTVWNEMHSSSAVRMAVGCLLELAFKVAAGELKNGFAIIRPPGHHAEESTAMGFCFFNSVAITAKLLQQKLNVGKVLIVDWDIHHGNGTQQAFYNDPSVLYISLHRYDNGNFFPGSGAPEEVGGGPGVGYNVNVAWTGGVDPPIGDVEYLTAFRTVVMPIAHEFSPDVVLVSAGFDAVEGHLSPLGGYSVTARCFGHLTRQLMTLAGGRVVLALEGGHDLTAICDASEACVSALLSVELQPLDEAVLQQKPNINAVATLEKVIEIQSKHWSCVQKFAAGLGRSLREAQAGETEEAETVSAMALLSVGAEQAQAAAAREHSPRPAEEPMEQEPAL

SEQ ID NO: 6030 - protein, 542 aa, Homo sapiens
MTFSEILDRVGSMGHFQFLHVAILGLPILNMANHNLLQIFTAATPVHHCRPPHNASTGPWVLPMGPNGKPERCLRFVHPPNASLPNDTQRAMEPCLDGWVYNSTKDSIVTEWDLVCNSNKLKEMAQSIFMAGILIGGLVLGDLSDRFGRRPILTCSYLLLAASGSGAAFSPTFPIYMVFRFLCGFGISGITLSTVILNVEWVPTRMRAIMSTALGYCYTFGQFILPGLAYAIPQWRWLQLTVSIPFFVFFLSSWWTPESIRWLVLSGKSSKALKILRRVAVFNGKKEEGERLSLEELKLNLQKEISLAKAKYTASDLFRIPMLRRMTFCLSLAWFATGFAYYSLAMGVEEFGVNLYILQIIFGGVDVPAKFITILSLSYLGRHTTQAAALLLAGGAILALTFVPLDLQTVRTVLAVFGKGCLSSSFSCLFLYTSELYPTVIRQTGMGVSNLWTRVGSMVSPLVKITGEVQPFIPNIIYGITALLGGSAALFLPETLNQPLPETIEDLENWSLRAKKPKQEPEVEKASQRIPLQPHGPGLGSS

SEQ ID NO: 6031 - protein, 608 aa, Homo sapiens
MSQEGDYGRWTISSSDESEEEKPKPDKPSTSSLLCARQGAANEPRYTCSEAQKAAHKRKISPVKFSNTDSVLPPKRQKSGSQEDLGWCLSSSDDELQPEMPQKQAEKVVIKKEKDISAPNDGTAQRTENHGAPACHRLKEEEDEYETSGEGQDIWDMLDKGNPFQFYLTRVSGVKPKYNSGALHIKDILSPLFGTLVSSAQFNYCFDVDWLVKQYPPEFRKKPILLVHGDKREAKAHLHAQAKPYENISLCQAKLDIAFGTHHTKMMLLLYEEGLRVVIHTSNLIHADWHQKTQGIWLSPLYPRIADGTHKSGESPTHFKADLISYLMAYNAPSLKEWIDVIHKHDLSETNVYLIGSTPGRFQGSQKDNWGHFRLKKLLKDHASSMPNAESWPVVGQFSSVGSLGADESKWLCSEFKESMLTLGKESKTPGKSSVPLYLIYPSVENVRTSLEGYPAGGSLPYSIQTAEKQNWLHSYFHKWSAETSGRSNAMPHIKTYMRPSPDFSKIAWFLVTSANLSKAAWGALEKNGTQLMIRSYELGVLFLPSAFGLDSFKVKQKFFAGSQEPMATFPVPYDLPPELYGSKDRPWIWNIPYVKAPDTHGNMWVPS

SEQ ID NO: 6032 - protein, 1241 aa, Homo sapiens
MEPIYPFARPQMNTRFPSSRMVPFHFPPSKCALWNPTPTGDFIYLHLSYYRNPKLVVTEKTIRLAYRHAKQNKKNSSCFLLGSLTADEDEEGVTLTVDRFDPGREVPECLEITPTASLPGDFLIPCKVHTQELCSREMIVHSVDDFSSALKALQCHICSKDSLDCALARNLSSNLNISQVQGTYKYGYLTMDETRKLLLLLESDPKVYSLPLVGIWLSGITHIYSPQVWACCLRYIFNSSVQERVFSESGNFIIVLYSMTHKEPEFYECFPCDGKIPDFRFQLLTSKETLHLFKNVEPPDKNPIRCELSAESQNAETEFFSKASKNFSIKRSSQKLSSGKMPIHDHDSGVEDEDFSPRPIPSPHPVSQKISKIQPSVPELSLVLDGNFIESNPLPTPLEMVNNENPPLINHLEHLKPLQPQLYDEKHSPEVEAGEPSLRGIPNQLNQDKPALLRHCKVRQPPAYKKGNPHTRNSIKPSSHNGPSHDIFEKLQTVSAGNVQNEEYPIRPSTLNSRQSSLAPQSQPHDFVFSPHNSGRPMELQIPTPPLPSYCSTNVCRCCQHHSHIQYSPLNSWQGANTVGSIQDVQSEALQKHSLFHPSGCPALYCNAFCSSSSPIALRPQGDMGSCSPHSNIEPSPVARPPSHMDLCNPQPCTVCMHTPKTESDNGMMGLSPDAYRFLTEQDRQLRLLQAQIQRLLEAQSLMPCSPKTTAVEDTVQAGRQMELVSVEAQSSPGLHMRKGVSIAVSTGASLFWNAAGEDQEPDSQMKQDDTKISSEDMNFSVDINNEVTSLPGSASSLKAVDIPSFEESNIAVEEEFNQPLSVSNSSSLVVRKEPDVPVFFPSGQLAESVSMCLQTGPTGGASNNSETSEEPKIEHVMQPLLHQPSDNQKIYQDLLGQVNHLLNSSSKETEQPSTKAVIISHECTRTQNVYHTKKKTHHSRLVDKDCVLNATLKQLRSLGVKIDSPTKVKKNAHNVDHASVLACISPEAVISGLNCMSFANVGMSGLSPNGVDLSMEANAIALKYLNENQLSQLSVTRSNQNNCDPFSLLHINTDRSTVGLSLISPNNMSFATKKYMKRYGLLQSSDNSEDEEEPPDNADSKSEYLLNQNLRSIPEQLGGQKEPSKNDHEIINCSNCESVGTNADTPVLRNITNEVLQTKAKQQLTEKPAFLVKNLKPSPAVNLRTGKAEFTQHPEKENEGDITIFPESLQPSETLKQMNSMNSVGTFLDVKRLRQLPKLF

SEQ ID NO: 6033 - protein, 1036 aa, Homo sapiens
MKMASTRCKLARYLEDLEDVDLKKFKMHLEDYPPQKGCIPLPRGQTEKADHVDLATLMIDFNGEEKAWAMAVWIFAAINRRDLYEKAKRDEPKWGSDNARVSNPTVICQEDSIEEEWMGLLEYLSRISICKMKKDYRKKYRKYVRSRFQCIEDRNARLGESVSLNKRYTRLRLIKEHRSQQEREQELLAIGKTKTCESPVSPIKMELLFDPDDEHSEPVHTVVFQGAAGIGKTILARKMMLDWASGTLYQDRFDYLFYIHCREVSLVTQRSLGDLIMSCCPDPNPPIHKIVRKPSRILFLMDGFDELQGAFDEHIGPLCTDWQKAERGDILLSSLIRKKLLPEASLLITTRPVALEKLQHLLDHPRHVEILGFSEAKRKEYFFKYFSDEAQARAAFSLIQENEVLFTMCFIPLVCWIVCTGLKQQMESGKSLAQTSKTTTAVYVFFLSSLLQPRGGSQEHGLCAHLWGLCSLAADGIWNQKILFEESDLRNHGLQKADVSAFLRMNLFQKEVDCEKFYSFIHMTFQEFFAAMYYLLEEEKEGRTNVPGSRLKLPSRDVTVLLENYGKFEKGYLIFVVRFLFGLVNQERTSYLEKKLSCKISQQIRLELLKWIEVKAKAKKLQIQPSQLELFYCLYEMQEEDFVQRAMDYFPKIEINLSTRMDHMVSSFCIENCHRVESLSLGFLHNMPKEEEEEEKEGRHLDMVQCVLPSSSHAACSHGLVNSHLTSSFCRGLFSVLSTSQSLTELDLSDNSLGDPGMRVLCETLQHPGCNIRRLWLGRCGLSHECCFDISLVLSSNQKLVELDLSDNALGDFGIRLLCVGLKHLLCNLKKLWLVSCCLTSACCQDLASVLSTSHSLTRLYVGENALGDSGVAILCEKAKNPQCNLQKLGLVNSGLTSVCCSALSSVLSTNQNLTHLYLRGNTLGDKGIKLLCEGLLHPDCKLQVLELDNCNLTSHCCWDLSTLLTSSQSLRKLSLGNNDLGDLGVMMFCEVLKQQSCLLQNLGLSEMYFNYETKSALETLQEEKPELTVVFEPSW

SEQ ID NO: 6034 - protein, 338 aa, Homo sapiens
MTTTLVSATIFDLSEVLCKGNKMLNYSAPSAGGCLLDRKAVGTPAGGGFPRRHSVTLPSSKFHQNQLLSSLKGEPAPALSSRDSRFRDRSFSEGGERLLPTQKQPGGGQVNSSRYKTELCRPFEENGACKYGDKCQFAHGIHELRSLTRHPKYKTELCRTFHTIGFCPYGPRCHFIHNAEERRALAGARDLSADRPRLQHSFSFAGFPSAAATAAATGLLDSPTSITPPPILSADDLLGSPTLPDGTNNPFAFSSQELASLFAPSMGLPGGGSPTTFLFRPMSESPHMFDSPPSPQDSLSDQEGYLSSSSSSHSGSDSPTLDNSRRLPIFSRLSISDD

SEQ ID NO: 6035 - protein, 991 aa, Homo sapiens
MSAVGLVLLVLALRLRATTVKPEEGSFCSNSQVAFRDACYEFVPLGRTFRDAQSWCEGQGGHLVFIQDEGTQWFLQKHISQDREWWIGLTWNLARNGTTEGPGTWLDTSNVTYSNWHGGQAAAAPDTCGHIGRGPSSEWVTSDCAQTFAFMCEFRVGQSLACEGLNATVHCGLGQVIQVQDAVYGRQNPHFCTQDAGRPSDLEQGCSWANVKEEVAGQCQELQSCQVAADETYFGNLCPTQGSYLWVQYQCREALQLMVSSESFIFDNVTISLTWLLSPYIGNLSCIISTGDSHTFDPYNPPSVSSNVTHQFTSPGEFTVFAECTTSEWHVTAQRQVTVRDKMETLSVTACSGLSQSGAGPLCQAVFGDPLWIQVELDGGTGVTYTVLLGDITLAESTTQKGSLPYNLILDRETQKLMGPGRHRLEIQATGNTTTSTISRNITVHLVELLSGLQASWASDHLELGQDLLITISLAQGTPEELTFEVAGLNATFSHEQVSFGEPFGICRLAVPVEGTFLVTMLVRNAFSNLSLEIGNITITAPSGLQEPSGMNAEGKSKDKGDMEVYIQPGPYVDPFTTVTLGWPDNDKELRFQWSCGSCWALWSSCVERQLLRTDQRELVVPASCLPPPDSAVTLRLAVLRGQELENRAEQCLYVSAPWELRPRVSCERNCRPVNASKDILLRVTMGEDSPVAMFSWYLDNTPTEQAEPLLDACRLRGFWPRSLTLLQSNTSTLLLNSSFLQSRGEVIRIRATALTRHAYGEDTYVISTVPPREVPACTIAPEEGTVLTSFAIFCNASTALGPLEFCFCLESGSCLHCGPEPALPSVYLPLGEENNDFVLTVVISATNRAGDTQQTQAMAKVALGDTCVEDVAFQAAVSEKIPTALQGEGGPEQLLQLAKAVSSMLNQEHESQGSGQSLSIDVRQKVREHVLGSLSAVTTGLEDVQRVQELAEVLREVTCRSKELTPSAQGSCMGDSWEGAPPAAHVSHAR

SEQ ID NO: 6036 - protein, 994 aa, Homo sapiens
MRPVALLLLPSLLALLAHGLSLEAPTVGKGQAPGIEETDGELTAAPTPEQPERGVHFVTTAPTLKLLNHHPLLEEFLQEGLEKGDEELRPALPFQPDPPAPFTPSPLPRLANQDSRPVFTSPTPAMAAVPTQPQSKEGPWSPESESPMLRITAPLPPGPSMAVPTLGPGEIASTTPPSRAWTPTQEGPGDMGRPWVAEVVSQGAGIGIQGTITSSTASGDDEETTTTTTIITTTITTVQTPGPCSWNFSGPEGSLDSPTDLSSPTDVGLDCFFYISVYPGYGVEIKVQNISLREGETVTVEGLGGPDPLPLANQSFLLRGQVIRSPTHQAALRFQSLPPPAGPGTFHFHYQAYLLSCHFPRRPAYGDVTVTSLHPGGSARFHCATGYQLKGARHLTCLNATQPFWDSKEPVCIGECPGVIRNATTGRIVSPGFPGNYSNNLTCHWLLEAPEGQRLHLHFEKVSLAEDDDRLIIRNGDNVEAPPVYDSYEVEYLPIEGLLSSGKHFFVELSTDSSGAAAGMALRYEAFQQGHCYEPFVKYGNFSSSTPTYPVGTTVEFSCDPGYTLEQGSIIIECVDPHDPQWNETEPACRAVCSGEITDSAGVVLSPNWPEPYGRGQDCIWGVHVEEDKRIMLDIRVLRIGPGDVLTFYDGDDLTARVLGQYSGPRSHFKLFTSMADVTIQFQSDPGTSVLGYQQGFVIHFFEVPRNDTCPELPEIPNGWKSPSQPELVHGTVVTYQCYPGYQVVGSSVLMCQWDLTWSEDLPSCQRVTSCHDPGDVEHSRRLISSPKFPVGATVQYICDQGFVLMGSSILTCHDRQAGSPKWSDRAPKCLLEQLKPCHGLSAPENGARSPEKQLHPAGATIHFSCAPGYVLKGQASIKCVPGHPSHWSDPPPICRAASLDGSTTVAAWMVAKAPAASSTLDAAHIAAAIFLPLVAMVLLVGGVYFYFSRLQGKSSLQLPRPRPRPYNRITIESAFDNPTYETGSLSFAGDERI

SEQ ID NO: 6037 - protein, 891 aa, Homo sapiens
MHAINGFVFGNLPELNMCAQKRVAWHLFGMGNEIDVHTAFFHGQMLTTRGHHTDVANIFPATFVTAEMVPWEPGTWLISCQVNSHFRDGMQALYKVKSCSMAPPVDLLTGKVRQYFIEAHEIQWDYGPMGHDGSTGKNLREPGSISDKFFQKSSSRIGGTYWKVRYEAFQDETFQEKMHLEEDRHLGILGPVIRAEVGDTIQVVFYNRASQPFSMQPHGVFYEKDYEGTVYNDGSSYPGLVAKPFEKVTYRWTVPPHAGPTAQDPACLTWMYFSAADPIRDTNSGLVGPLLVCRAGALGADGKQKGVDKEFFLLFTVLDENKSWYSNANQAAAMLDFRLLSEDIEGFQDSNRMHAINGFLFSNLPRLDMCKGDTVAWHLLGLGTETDVHGVMFQGNTVQLQGMRKGAAMLFPHTFVMAIMQPDNLGTFEIYCQAGSHREAGMRAIYNVSQCPGHQATPRQRYQAARIYYIMAEEVEWDYCPDRSWEREWHNQSEKDSYGYIFLSNKDGLLGSRYKKAVFREYTDGTFRIPRPRTGPEEHLGILGPLIKGEVGDILTVVFKNNASRPYSVHAHGVLESTTVWPLAAEPGEVVTYQWNIPERSGPGPNDSACVSWIYYSAVDPIKDMYSGLVGPLAICQKGILEPHGGRSDMDREFALLFLIFDENKSWYLEENVATHGSQDPGSINLQDETFLESNKMHAINGKLYANLRGLTMYQGERVAWYMLAMGQDVDLHTIHFHAESFLYRNGENYRADVVDLFPGTFEVVEMVASNPGTWLMHCHVTDHVHAGMETLFTVFSRTEHLSPLTVITKETEKAVPPRDIEEGNVKMLGMQIPIKNVEMLASVLVAISVTLLLVVLALGGVVWYQHRQRKLRRNRRSILDDSFKLLSFKQ

SEQ ID NO: 6038 - protein, 163 aa, Homo sapiens
MTVKTLHGPAMVKYLLLSILGLAFLSEAAARKIPKVGHTFFQKPESCPPVPGGSMKLDIGIINENQRVSMSRNIESRSTSPWNYTVTWDPNRYPSEVVQAQCRNLGCINAQGKEDISMNSVPIQQETLVVRRKHQGCSVSFQLEKVLVTVGCTCVTPVIHHVQ

SEQ ID NO: 6039 - protein, 836 aa, Homo sapiens
MKPSPAGTAKELEPPAPARGEQRTAEPEGRWREKGEADTERQRTRERQEATLAGLAELEYLRQRQELLVRGALRGAGGAGAAAPRAGELLGEAAQRSRLEEKFLEENILLLRKQLNCLRRRDAGLLNQLQELDKQISDLRLDVEKTSEEHLETDSRPSSGFYELSDGASGSLSNSSNSVFSECLSSCHSSTCFCSPLEATLSLSDGCPKSADLIGLLEYKEGHCEDQASGAVCRSLSTPQFNSLDVIADVNPKYQCDLVSKNGNDVYRYPSPLHAVAVQSPMFLLCLTGNPLREEDRLGNHASDICGGSELDAVKTDSSLPSPSSLWSASHPSSSKKMDGYILSLVQKKTHPVRTNKPRTSVNADPTKGLLRNGSVCVRAPGGVSQGNSVNLKNSKQACLPSGGIPSLNNGTFSPPKQWSKESKAEQAESKRVPLPEGCPSGAASDLQSKHLPKTAKPASQEHARCSAIGTGESPKESAQLSGASPKESPSRGPAPPQENKVVQPLKKMSQKNSLQGVPPATPPLLSTAFPVEERPALDFKSEGSSQSLEEAHLVKAQFIPGQQPSVRLHRGHRNMGVVKNSSLKHRGPALQGLENGLPTVREKTRAGSKKCRFPDDLDTNKKLKKASSKGRKSGGGPEAGVPGRPAGGGHRAGSRAHGHGREAVVAKPKHKRTDYRRWKSSAEISYEEALRRARRGRRENVGLYPAPVPLPYASPYAYVASDSEYSAECESLFHSTVVDTSEDEQSNYTTNCFGDSESSVSEGEFVGESTTTSDSEESGGLIWSQFVQTLPIQTVTAPDLHNHPAKTFVKIKASHNLKKKILRFRSGSLKLMTTV

SEQ ID NO: 6040 - protein, 435 aa, Homo sapiens
MSGFLEELLGEKLVTGGGEEVDVHSLGARGISLLGLYFGCSLSAPCAQLSASLAAFYGRLRGDAAAGPGPGAGAGAAAEPEPRRRLEIVFVSSDQDQRQWQDFVRDMPWLALPYKEKHRKLKLWNKYRISNIPSLIFLDATTGKVVCRNGLLVIRDDPEGLEFPWGPKPFREVIAGPLLRNNGQSLESSSLEGSHVGVYFSAHWCPPCRSLTRVLVESYRKIKEAGQNFEIIFVSADRSEESFKQYFSEMPWLAVPYTDEARRSRLNRLYGIQGIPTLIMLDPQGEVITRQGRVEVLNDEDCREFPWHPKPVLELSDSNAAQLNEGPCLVLFVDSEDDGESEAAKQLIQPIAEKIIAKYKAKEEEAPLLFFVAGEDDMTDSLRDYTNLPEAAPLLTILDMSARAKYVMDVEEITPAIVEAFVNDFLAEKLKPEPI

SEQ ID NO: 6041 - protein, 826 aa, Homo sapiens
MWALCSLLRSAAGRTMSQGRTISQAPARRERPRKDPLRHLRTREKRGPSGCSGGPNTVYLQVVAAGSRDSGAALYVFSEFNRYLFNCGEGVQRLMQEHKLKVARLDNIFLTRMHWSNVGGLSGMILTLKETGLPKCVLSGPPQLEKYLEAIKIFSGPLKGIELAVRPHSAPEYEDETMTVYQIPIHSEQRRGKHQPWQSPERPLSRLSPERSSDSESNENEPHLPHGVSQRRGVRDSSLVVAFICKLHLKRGNFLVLKAKEMGLPVGTAAIAPIIAAVKDGKSITHEGREILAEELCTPPDPGAAFVVVECPDESFIQPICENATFQRYQGKADAPVALVVHMAPASVLVDSRYQQWMERFGPDTQHLVLNENCASVHNLRSHKIQTQLNLIHPDIFPLLTSFRCKKEGPTLSVPMVQGECLLKYQLRPRREWQRDAIITCNPEEFIVEALQLPNFQQSVQEYRRSAQDGPAPAEKRSQYPEIIFLGTGSAIPMKIRNVSATLVNISPDTSLLLDCGEGTFGQLCRHYGDQVDRVLGTLAAVFVSHLHADHHTGLPSILLQRERALASLGKPLHPLLVVAPNQLKAWLQQYHNQCQEVLHHISMIPAKCLQEGAEISSPAVERLISSLLRTCDLEEFQTCLVRHCKHAFGCALVHTSGWKVVYSGDTMPCEALVRMGKDATLLIHEATLEDGLEEEAVEKTHSTTSQAISVGMRMNAEFIMLNHFSQRYAKVPLFSPNFSEKVGVAFDHMKVCFGDFPTMPKLIPPLKALFAGDIEEMEERREKRELRQVRAALLSRELAGGLEDGEPQQKRAHTEEPQAKKVRAQ

SEQ ID NO: 6042 - protein, 503 aa, Homo sapiens
MDLIPNLAVETWLLLAVSLILLYLYGTRTHGLFKKLGIPGPTPLPFLGNALSFRKGYWTFDMECYKKYRKVWGIYDCQQPMLAITDPDMIKTVLVKECYSVFTNRRPFGPVGFMKNAISIAEDEEWKRIRSLLSPTFTSGKLKEMVPIIAQYGDVLVRNLRREAETGKPVTLKHVFGAYSMDVITSTSFGVSIDSLNNPQDPFVENTKKLLRFNPLDPFVLSIKVFPFLTPILEALNITVFPRKVISFLTKSVKQIKEGRLKETQKHRVDFLQLMIDSQNSKDSETHKALSDLELMAQSIIFIFAGYETTSSVLSFIIYELATHPDVQQKVQKEIDTVLPNKAPPTYDTVLQLEYLDMVVNETLRLFPVAMRLERVCKKDVEINGMFIPKGVVVMIPSYVLHHDPKYWTEPEKFLPERFSKKNKDNIDPYIYTPFGSGPRNCIGMRFALVNMKLALVRVLQNFSFKPCKETQIPLKLRFGGLLLTEKPIVLKAESRDETVSGA

SEQ ID NO: 6043 - protein, 983 aa, Homo sapiens
MDCQLSILLLLSCSVLDSFGELIPQPSNEVNLLDSKTIQGELGWISYPSHGWEEISGVDEHYTPIRTYQVCNVMDHSQNNWLRTNWVPRNSAQKIYVELKFTLRDCNSIPLVLGTCKETFNLYYMESDDDHGVKFREHQFTKIDTIAADESFTQMDLGDRILKLNTEIREVGPVNKKGFYLAFQDVGACVALVSVRVYFKKCPFTVKNLAMFPDTVPMDSQSLVEVRGSCVNNSKEEDPPRMYCSTEGEWLVPIGKCSCNAGYEERGFMCQACRPGFYKALDGNMKCAKCPPHSSTQEDGSMNCRCENNYFRADKDPPSMACTRPPSSPRNVISNINETSVILDWSWPLDTGGRKDVTFNIICKKCGWNIKQCEPCSPNVRFLPRQFGLTNTTVTVTDLLAHTNYTFEIDAVNGVSELSSPPRQFAAVSITTNQAAPSPVLTIKKDRTSRNSISLSWQEPEHPNGIILDYEVKYYEKQEQETSYTILRARGTNVTISSLKPDTIYVFQIRARTAAGYGTNSRKFEFETSPDSFSISGESSQVVMIAISAAVAIILLTVVIYVLIGRFCGYKSKHGADEKRLHFGNGHLKLPGLRTYVDPHTYEDPTQAVHEFAKELDATNISIDKVVGAGEFGEVCSGRLKLPSKKEISVAIKTLKVGYTEKQRRDFLGEASIMGQFDHPNIIRLEGVVTKSKPVMIVTEYMENGSLDSFLRKHDAQFTVIQLVGMLRGIASGMKYLSDMGYVHRDLAARNILINSNLVCKVSDFGLSRVLEDDPEAAYTTRGGKIPIRWTSPEAIAYRKFTSASDVWSYGIVLWEVMSYGERPYWEMSNQDVIKAVDEGYRLPPPMDCPAALYQLMLDCWQKDRNNRPKFEQIVSILDKLIRNPGSLKIITSAAARPSNLLLDQSNVDITTFRTTGDWLNGVWTAHCKEIFTGVEYSSCDTIAKISTDDMKKVGVTVVGPQKKIISSIKALETQSKNGPVPV

SEQ ID NO: 6044 - protein, 329 aa, Homo sapiens
MGTAAAAAAAAAAAAAGEGARSPSPAAVSLGLGVAVVSSLVNGSTFVLQKKGIVRAKRRGTSYLTDIVWWAGTIAMAVGQIGNFLAYTAVPTVLVTPLGALGVPFGSILASYLLKEKLNILGKLGCLLSCAGSVVLIIHSPKSESVTTQAELEEKLTNPVFVGYLCIVLLMLLLLIFWIAPAHGPTNIMVYISICSLLGSFTVPSTKGIGLAAQDILHNNPSSQRALCLCLVLLAVLGCSIIVQFRYINKALECFDSSVFGAIYYVVFTTLVLLASAILFREWSNVGLVDFLGMACGFTTVSVGIVLIQVFKEFNFNLGEMNKSNMKTD

SEQ ID NO: 6045 - protein, 1468 aa, Homo sapiens
MEDHMFGVQQIQPNVISVRLFKRKVGGLGFLVKERVSKPPVIISDLIRGGAAEQSGLIQAGDIILAVNGRPLVDLSYDSALEVLRGIASETHVVLILRGPEGFTTHLETTFTGDGTPKTIRVTQPLGPPTKAVDLSHQPPAGKEQPLAVDGASGPGNGPQHAYDDGQEAGSLPHANGLAPRPPGQDPAKKATRVSLQGRGENNELLKEIEPVLSLLTSGSRGVKGGAPAKAEMKDMGIQVDRDLDGKSHKPLPLGVENDRVFNDLWGKGNVPVVLNNPYSEKEQPPTSGKQSPTKNGSPSKCPRFLKVKNWETEVVLTDTLHLKSTLETGCTEYICMGSIMHPSQHARRPEDVRTKGQLFPLAKEFIDQYYSSIKRFGSKAHMERLEEVNKEIDTTSTYQLKDTELIYGAKHAWRNASRCVGRIQWSKLQVFDARDCTTAHGMFNYICNHVKYATNKGNLRSAITIFPQRTDGKHDFRVWNSQLIRYAGYKQPDGSTLGDPANVQFTEICIQQGWKPPRGRFDVLPLLLQANGNDPELFQIPPELVLEVPIRHPKFEWFKDLGLKWYGLPAVSNMLLEIGGLEFSACPFSGWYMGTEIGVRDYCDNSRYNILEEVAKKMNLDMRKTSSLWKDQALVEINIAVLYSFQSDKVTIVDHHSATESFIKHMENEYRCRGGCPADWVWIVPPMSGSITPVFHQEMLNYRLTPSFEYQPDPWNTHVWKGTNGTPTKRRAIGFKKLAEAVKFSAKLMGQAMAKRVKATILYATETGKSQAYAKTLCEIFKHAFDAKVMSMEEYDIVHLEHETLVLVVTSTFGNGDPPENGEKFGCALMEMRHPNSVQEERKYPEPLRFFPRKGPPLPNGDTEVHGLAAARDSQHRSYKVRFNSVSSYSDSQKSSGDGPDLRDNFESAGPLANVRFSVFGLGSRAYPHFCAFGHAVDTLLEELGGERILKMREGDELCGQEEAFRTWAKKVFKAACDVFCVGDDVNIEKANNSLISNDRSWKRNKFRLTFVAEAPELTQGLSNVHKKRVSAARLLSRQNLQSPKSSRSTIFVRLHTNGSQELQYQPGDHLGVFPGNHEDLVNALIERLEDAPPVNQMVKVELLEERNTALGVISNWTDELRLPPCTIFQAFKYYLDITTPPTPLQLQQFASLATSEKEKQRLLVLSKGLQEYEEWKWGKNPTIVEVLEEFPSIQMPATLLLTQLSLLQPRYYSISSSPDMYPDEVHLTVAIVSYRTRDGEGPIHHGVCSSWLNRIQADELVPCFVRGAPSFHLPRNPQVPCILVGPGTGIAPFRSFWQQRQFDIQHKGMNPCPMVLVFGCRQSKIDHIYREETLQAKNKGVFRELYTAYSREPDKPKKYVQDILQEQLAESVYRALKEQGGHIYVCGDVTMAADVLKAIQRIMTQQGKLSAEDAGVFISRMRDDNRYHEDIFGVTLRTYEVTNRLRSESIAFIEESKKDTDEVFSS

SEQ ID NO: 6046 - protein, 334 aa, Homo sapiens
MDNSAQKNERTGKHPRRASEVQKGFTAAYPTQSSIPFKSQASVIPESEKKGFNSQAKRFPHKKNDIPGPGFYNVIHQSPVSNSVSLSKKGTCMFPSMCARLDTIISKYPAANAYTIPSDFISKRDFSNSCSSMFQLPSFMKALKFETPAPNYYNASVSCCKQRNNVCTRAGFMSKTQRGSFAFADKGPPPGHYDINESLVKQSPNTLMSCFKSKTNRGLKLTSTGPGPGYYNPSDCTKVPKKTLFPKNPILNFSAQPSPLPPKPPFPGPGQYEIVDYLGPRKHFISSASFVSNTSRWTAAPPQPGLPGPATYKPELPGKQSFLYNEDKKWIPVL

SEQ ID NO: 6047 - protein, 386 aa, Homo sapiens
MRAAPLLLARAASLSLGFLFLLFFWLDRSVLAKELKFVTLVFRHGDRSPIDTFPTDPIKESSWPQGFGQLTQLGMEQHYELGEYIRKRYRKFLNESYKHEQVYIRSTDVDRTLMSAMTNLAALFPPEGVSIWNPILLWQPIPVHTVPLSEDQLLYLPFRNCPRFQELESETLKSEEFQKRLHPYKDFIATLGKLSGLHGQDLFGIWSKVYDPLYCESVHNFTLPSWATEDTMTKLRELSELSLLSLYGIHKQKEKSRLQGGVLVNEILNHMKRATQIPSYKKLIMYSAHDTTVSGLQMALDVYNGLLPPYASCHLTELYFEKGEYFVEMYYRNETQHEPYPLMLPGCSPSCPLERFAELVGPVIPQDWSTECMTTNSHQGTEDSTD

SEQ ID NO: 6048 - protein, 221 aa, Homo sapiens
MFGFHKPKMYRSIEGCCICRAKSSSSRFTDSKRYEKDFQSCFGLHETRSGDICNACVLLVKRWKKLPAGSKKNWNHVVDARAGPSLKTTLKPKKVKTLSGNRIKSNQISKLQKEFKRHNSDAHSTTSSASPAQSPCYSNQSDDGSDTEMASGSNRTPVFSFLDLTYWKRQKICCGIIYKGRFGEVLIDTHLFKPCCSNKKAAAEKPEEQGPEPLPISTQEW

SEQ ID NO: 6049 - protein, 325 aa, Homo sapiens
MSAQAQMRALLDQLMGTARDGDETRQRVKFTDDRVCKSHLLDCCPHDILAGTRMDLGECTKIHDLALRADYEIASKERDLFFELDAMDHLESFIAECDRRTELAKKRLAETQEEISAEVSAKAEKVHELNEEIGKLLAKAEQLGAEGNVDESQKILMEVEKVRAKKKEAEEEYRNSMPASSFQQQKLRVCEVCSAYLGLHDNDRRLADHFGGKLHLGFIQIREKLDQLRKTVAEKQEKRNQDRLRRREEREREERLSRRSGSRTRDRRRSRSRDRRRRRSRSTSRERRKLSRSRSRDRHRRHRSRSRSHSRGHRRASRDRSAKYK

SEQ ID NO: 6050 - protein, 709 aa, Homo sapiens
MGKARRSPPGHHRHCEGCFNRHCHIPVEPNTSCLVISCHLLCGATFHMCKEAEHQLLCPLEQVPCLNSEYGCPLSMSRHKLAKHLQVCPASVVCCSMEWNRWPNVDSETTLHENIMKETPSEECLDTALALQDQKVLFRSLKMVELFPETREATEEEPTMNGETSVEEMGGAVGGVDIGLVPHGLSATNGEMAELSQEEREVLAKTKEGMDLVKFGQWENIFSKEHAASALTNSSASCESKNKNDSEKEQISSGHNMVEGEGAPKKKEPQENQKQQDVRTAMETTGLAPWQDGVLERLKTAVDAKDYNMYLVHNGRMLIHFGQMPACTPKERDFVYGKLEAQEVKTVYTFKVPVSYCGKRARLGDAMLSCKPSEHKAVDTSDLGITVEDLPKSDLIKTTLQCALERELKGHVISESRSIDGLFMDFATQTYNFEPEQFSSGTVLADLTAATPGGLHVELHSECVTRRHNKSSSAFTFTCNKFFRRDEFPLHFKNVHTDIQSCLNGWFQHRCPLAYLGCTFVQNHFRPPGQKAKVIYSQELKTFAIKPEVAPELSEGRKNNHLLGHGGKSQNSLTSLPLEILKYIAGFLDSVSLAQLSQVSVLMRNICATLLQERGMVLLQWKKKRYSHGGTSWRVHREIWQFSSLFSKIKSWEFNEVTSMSEHLKSCPFNIVEHKTDPILLTSMCQPREQARESLVSTFRIRPRGRYVS

SEQ ID NO: 6051 - protein, 545 aa, Homo sapiens
MNLTEGPLAMAEMDPTQGRVVFEDVAIYFSQEEWGHLDEAQRLLYRDVMLENLALLSSLGSWHGAEDEEAPSQQGFSVGVSEVTASKPCLSSQKVHPSETCGPPLKDILCLVEHNGIHPEQHIYICEAELFQHPKQQIGENLSRGDDWIPSFGKNHRVHMAEEIFTCMEGWKDLPATSCLLQHQGPQSEWKPYRDTEDREAFQTGQNDYKCSECGKTFTCSYSFVEHQKIHTGERSYECNKCGKFFKYSANFMKHQTVHTSERTYECRECGKSFMYNYRLMRHKRVHTGERPYECNTCGKFFRYSSTFVRHQRVHTGERPYECRECGKFFMDSSTLIKHQRVHTGERPYKCNDCGKFFRYISTLIRHQRIHTGERPYECSVCGELFRYNSSLVKHWRNHTGERPYKCSECGKSFRYHCRLIRHQRVHTGERPYECSECGKFFRYNSNLIKHWRNHTGERPYECRECGKAFSHKHILVEHQKIHSGERPYECSECQKAFIRKSHLVHHQKIHSEERLVCSMNVGNSLAKTPTSLNIRDFTMEKVYH

SEQ ID NO: 6052 - protein, 491 aa, Homo sapiens
MAGQGLPLHVATLLTGLLECLGFAGVLFGWPSLVFVFKNEDYFKDLCGPDAGPIGNATGQADCKAQDERFSLIFTLGSFMNNFMTFPTGYIFDRFKTTVARLIAIFFYTTATLIIAFTSAGSAVLLFLAMPMLTIGGILFLITNLQIGNLFGQHRSTIITLYNGAFDSSSAVFLIIKLLYEKGISLRASFIFISVCSTWHVARTFLLMPRGHIPYPLPPNYSYGLCPGNGTTKEEKETAEHENRELQSKEFLSAKEETPGAGQKQELRSFWSYAFSRRFAWHLVWLSVIQLWHYLFIGTLNSLLTNMAGGDMARVSTYTNAFAFTQFGVLCAPWNGLLMDRLKQKYQKEARKTGSSTLAVALCSTVPSLALTSLLCLGFALCASVPILPLQYLTFILQVISRSFLYGSNAAFLTLAFPSEHFGKLFGLVMALSAVVSLLQFPIFTLIKGSLQNDPFYVNVMFMLAILLTFFHPFLVYRECRTWKESPSAIA

SEQ ID NO: 6053 - protein, 1220 aa, Homo sapiens
MAGAGGQHHPPGAAGGAAAGAGAAVTSAAASAGPGEDSSDSEAEQEGPQKLIRKVSTSGQIRTKTSIKEGQLLKQTSSFQRWKKRYFKLRGRTLYYAKDSKSLIFDEVDLSDASVAEASTKNANNSFTIITPFRRLMLCAENRKEMEDWISSLKSVQTREPYEVAQFNVEHFSGMHNWYACSHARPTFCNVCRESLSGVTSHGLSCEVCKFKAHKRCAVRATNNCKWTTLASIGKDIIEDEDGVAMPHQWLEGNLPVSAKCAVCDKTCGSVLRLQDWKCLWCKTMVHTACKDLYHPICPLGQCKVSIIPPIALNSTDSDGFCRATFSFCVSPLLVFVNSKSGDNQGVKFLRRFKQLLNPAQVFDLMNGGPHLGLRLFQKFDNFRILVCGGDGSVGWVLSEIDKLNLNKQCQLGVLPLGTGNDLARVLGWGGSYDDDTQLPQILEKLERASTKMLDRWSIMTYELKLPPKASLLPGPPEASEEFYMTIYEDSVATHLTKILNSDEHAVVISSAKTLCETVKDFVAKVEKTYDKTLENAVVADAVASKCSVLNEKLEQLLQALHTDSQAAPVLPGLSPLIVEEDAVESSSEESLGESKEQLGDDVTKPSSQKAVKPREIMLRANSLKKAVRQVIEEAGKVMDDPTVHPCEPANQSSDYDSTETDESKEEAKDDGAKESITVKTAPRSPDARASYGHSQTDSVPGPAVAASKENLPVLNTRIICPGLRAGLAASIAGSSIINKMLLANIDPFGATPFIDPDLDSVDGYSEKCVMNNYFGIGLDAKISLEFNNKREEHPEKCRSRTKNLMWYGVLGTRELLQRSYKNLEQRVQLECDGQYIPLPSLQGIAVLNIPSYAGGTNFWGGTKEDDIFAAPSFDDKILEVVAIFDSMQMAVSRVIKLQHHRIAQCRTVKITIFGDEGVPVQVDGEAWVQPPGIIKIVHKNRAQMLTRDRAFESTLKSWEDKQKCDSGKPVLRTHLYIHHAIDLATEEVSQMQLCSQAAEELITRICDAATIHCLLEQELAHAVNACSHALNKANPRCPESLTRDTATEIAINVKALYNETESLLVGRVPLQLESPHEERVSNALHSVEVELQKLTEIPWLYYILHPNEDEEPPMDCTKRNNRSTVFRIVPKFKKEKVQKQKTSSQPVQKWGTEEVAAWLDLLNLGEYKDIFIRHDIRGAELLHLERRDLKDLGIPKVGHVKRILQGIKELGRSTPQSEV

SEQ ID NO: 6054 - protein, 562 aa, Homo sapiens
MNPLFGPNLFLLQQEQQGLAGPLGDSLGGDHFAGGGDLPPAPLSPAGPAAYSPPGPGPAPPAAMALRNDLGSNINVLKTLNLRFRCFLAKVHELERRNRLLEKQLQQALEEGKQGRRGLGRRDQAVQTGFVSPIRPLGLQLGARPAAVCSPSARVLGSPARSPAGPLAPSAASLSSSSTSTSTTYSSSARFMPGTIWSFSHARRLGPGLEPTLVQGPGLSWVHPDGVGVQIDTITPEIRALYNVLAKVKRERDEYKRRWEEEYTVRIQLQDRVNELQEEAQEADACQEELALKVEQLKAELVVFKGLMSNNLSELDTKIQEKAMKVDMDICRRIDITAKLCDVAQQRNCEDMIQMFQKKLVPSMGGRKRERKAAVEEDTSLSESEGPRQPDGDEEESTALSINEEMQRMLNQLREYDFEDDCDSLTWEETEETLLLWEDFSGYAMAAAEAQGEQEDSLEKVIKDTESLFKTREKEYQETIDQIELELATAKNDMNRHLHEYMEMCSMKRGLDVQMETCRRLITQSGDRKSPAFTAVPLSDPPPPPSEAEDSDRDVSSDSSMR

SEQ ID NO: 6055 - protein, 1181 aa, Homo sapiens
MKLKEVDRTAMQAWSPAQNHPIYLATGTSAQQLDATFSTNASLEIFELDLSDPSLDMKSCATFSSSHRYHKLIWGPYKMDSKGDVSGVLIAGGENGNIILYDPSKIIAGDKEVVIAQNDKHTGPVRALDVNIFQTNLVASGANESEIYIWDLNNFATPMTPGAKTQPPEDISCIAWNRQVQHILASASPSGRATVWDLRKNEPIIKVSDHSNRMHCSGLAWHPDVATQMVLASEDDRLPVIQMWDLRFASSPLRVLENHARGILAIAWSMADPELLLSCGKDAKILCSNPNTGEVLYELPTNTQWCFDIQWCPRNPAVLSAASFDGRISVYSIMGGSTDGLRQKQVDKLSSSFGNLDPFGTGQPLPPLQIPQQTAQHSIVLPLKKPPKWIRRPVGASFSFGGKLVTFENVRMPSHQGAEQQQQQHHVFISQVVTEKEFLSRSDQLQQAVQSQGFINYCQKKIDASQTEFEKNVWSFLKVNFEDDSRGKYLELLGYRKEDLGKKHIKEEKEESEFLPSSGGTFNISVSGDIDGLITQALLTGNFESAVDLCLHDNRMADAIILAIAGGQELLARTQKKYFAKSQSKITRLITAVVMKNWKEIVESCDLKNWREALAAVLTYAKPDEFSALCDLLGTRLENEGDSLLQTQACLCYICAGNVEKLVACWTKAQDGSHPLSLQDLIEKVVILRKAVQLTQAMDTSTVGVLLAAKMSQYANLLAAQGSIAAALAFLPDNTNQPNIMQLRDRLCRAQGEPVAGHESPKIPYEKQQLPKGRPGPVAGHHQMPRVQTQQYYPHGENPPPPGFIMHGNVNPNAAGQLPTSPGHMHTQVPPYPQPQPYQPAQPYPFGTGGSAMYRPQQPVAPPTSNAYPNTPYISSASSYTGQSQLYAAQHQASSPTSSPATSFPPPPSSGASFQHGGPGAPPSSSAYALPPGTTGTLPAASELPASQRTGPQNGWNDPPALNRVPKKKKMPENFMPPVPITSPIMNPLGDPQSQMLQQQPSAPVPLSSQSSFPQPHLPGGQPFHGVQQPLGQTGMPPSFSKPNIEGAPGAPIGNTFQHVQSLPTKKITKKPIPDEHLILKTTFEDLIQRCLSSATDPQTKRKLDDASKRLEFLYDKLREQTLSPTITSGLHNIARSIETRNYSEGLTMHTHIVSTSNFSETSAFMPVLKVVLTQANKLGV

SEQ ID NO: 6056 - protein, 775 aa, Homo sapiens
MHPGPEEAGSGRYGPRYITDMGAGEDDEGFEDDLDLDISFEEVKPLPATKGGNKKFLVESKKMSISNPKTISRLIPPTSASLPVTTVAPQPIPIQRKGKNGVAIMSRLFDMPCDETLCSADSFCVNDYTWGGSRCQCTLGKGGESCSEDIVIQYPQFFGHSYVTFEPLKNSYQAFQITLEFRAEAEDGLLLYCGENEHGRGDFMSLAIIRRSLQFRFNCGTGVAIIVSETKIKLGGWHTVMLYRDGLNGLLQLNNGTPVTGQSQGQYSKITFRTPLYLGGAPSAYWLVRATGTNRGFQGCVQSLAVNGRRIDMRPWPLGKALSGADVGECSSGICDEASCIHGGTCTAIKADSYICLCPLGFKGRHCEDAFTLTIPQFRESLRSYAATPWPLEPQHYLSFMEFEITFRPDSGDGVLLYSYDTGSKDFLSINLAGGHVEFRFDCGSGTGVLRSEDPLTLGNWHELRVSRTAKNGILQVDKQKIVEGMAEGGFTQIKCNTDIFIGGVPNYDDVKKNSGVLKPFSGSIQKIILNDRTIHVKHDFTSGVNVENAAHPCVRAPCAHGGSCRPRKEGYDCDCPLGFEGLHCQKAIIEAIEIPQFIGRSYLTYDNPDILKRVSGSRSNVFMRFKTTAKDGLLLWRGDSPMRPNSDFISLGLRDGALVFSYNLGSGVASIMVNGSFNDGRWHRVKAVRDGQSGKITVDDYGARTGKSPGMMRQLNINGALYVGGMKEIALHTNRQYMRGLVGCISHFTLSTDYHISLVEDAVDGKNINTCGAK

SEQ ID NO: 6057 - protein, 360 aa, Homo sapiens
MSQGRGKYDFYIGLGLAMSSSIFIGGSFILKKKGLLRLARKGSMRAGQGGHAYLKEWLWWAGLLSMGAGEVANFAAYAFAPATLVTPLGALSVLVSAILSSYFLNERLNLHGKIGCLLSILGSTVMVIHAPKEEEIETLNEMSHKLGDPGFVVFATLVVIVALILIFVVGPRHGQTNILVYITICSVIGAFSVSCVKGLGIAIKELFAGKPVLRHPLAWILLLSLIVCVSTQINYLNRALDIFNTSIVTPIYYVFFTTSVLTCSAILFKEWQDMPVDDVIGTLSGFFTIIVGIFLLHAFKDVSFSLASLPVSFRKDEKAMNGNLSNMYEVLNNNEESLTCGIEQHTGENVSRRNGNLTAF

SEQ ID NO: 6058 - protein, 210 aa, Homo sapiens
MATETVELHKLKLAELKQECLARGLETKGIKQDLIHRLQAYLEEHAEEEANEEDVLGDETEEEETKPIELPVKEEEPPEKTVDVAAEKKVVKITSEIPQTERMQKRAERFNVPVSLESKKAARAARFGISSVPTKGLSSDNKPMVNLDKLKERAQRFGLNVSSISRKSEDDEKLKKRKERFGIVTSSAGTGTTEDTEAKKRKRAERFGIA

SEQ ID NO: 6059 - protein, 651 aa, Homo sapiens
MGLADASGPRDTQALLSATQAMDLRRRDYHMERPLLNQEHLEELGRWGSAPRTHQWRTWLQCSRARAYALLLQHLPVLVWLPRYPVRDWLLGDLLSGLSVAIMQLPQGLAYALLAGLPPVFGLYSSFYPVFIYFLFGTSRHISVVLEVCWKLPQSKVGTVVTAAVAGVVLVVVKLLNDKLQQQLPMPIPGELLTLIGATGISYGMGLKHRFEVDVVGNIPAGLVPPVAPNTQLFSKLVGSAFTIAVVGFAIAISLGKIFALRHGYRVDSNQELVALGLSNLIGGIFQCFPVSCSMSRSLVQESTGGNSQVAGAISSLFILLIIVKLGELFHDLPKAVLAAIIIVNLKGMLRQLSDMRSLWKANRADLLIWLVTFTATILLNLDLGLVVAVIFSLLLVVVRTQMPHYSVLGQVPDTDIYRDVAEYSEAKEVRGVKVFRSSATVYFANAEFYSDALKQRCGVDVDFLISQKKKLLKKQEQLKLKQLQKEEKLRKQAASPKGASVSINVNTSLEDMRSNNVEDCKMMVSSGDKMEDATANGQEDSKAPDGSTLKALGLPQPDFHSLILDLGALSFVDTVCLKSLKNIFHDFREIEVEVYMAACHSPVVSQLEAGHFFDASITKKHLFASVHDAVTFALQHPRPVPDSPVSVTRL

SEQ ID NO: 6060 - protein, 669 aa, Homo sapiens
MVSWGRFICLVVVTMATLSLARPSFSLVEDTTLEPEDAISSGDDEDDTDGAEDFVSENSNNKRAPYWTNTEKMEKRLHAVPAANTVKFRCPAGGNPMPTMRWLKNGKEFKQEHRIGGYKVRNQHWSLIMESVVPSDKGNYTCVVENEYGSINHTYHLDVVERSPHRPILQAGLPANASTVVGGDVEFVCKVYSDAQPHIQWIKHVEKNGSKYGPDGLPYLKVLKAAGVNTTDKEIEVLYIRNVTFEDAGEYTCLAGNSIGISFHSAWLTVLPAPGREKEITASPDYLEIAIYCIGVFLIACMVVTVILCRMKNTTKKPDFSSQPAVHKLTKRIPLRRQVSAESSSSMNSNTPLVRITTRLSSTADTPMLAGVSEYELPEDPKWEFPRDKLTLGKPLGEGCFGQVVMAEAVGIDKDKPKEAVTVAVKMLKDDATEKDLSDLVSEMEMMKMIGKHKNIINLLGACTQDGPLYVIVEYASKGNLREYLRARRPPGMEYSYDINRVPEEQMTFKDLVSCTYQLARGMEYLASQKCIHRDLAARNVLVTENNVMKIADFGLARDINNIDYYKKTTNGRLPVKWMAPEALFDRVYTHQSDVWSFGVLMWEIFTLGGSPYPGIPVEELFKLLKEGHRMDKPANCTNELYMMMRDCWHAVPSQRPTFKQLVEDLDRI

SEQ ID NO: 6061 - protein, 468 aa, Homo sapiens
MEGIKVFLHERELWLKFHEVGTEMIITKAGRRMFPSYKVKVTGLNPKTKYILLMDIVPADDHRYKFADNKWSVTGKAEPAMPGRLYVHPDSPATGAHWMRQLVSFQKLKLTNNHLDPFGHIILNSMHKYQPRLHIVKADENNGFGSKNTAFCTHVFPETAFIAVTSYQNHKITQLKIENNPFAKGFRGSDDMELHRMSRMQSKEYPVVPRSTVRQKVASNHSPFSSESRALSTSSNLGSQYQCENGVSGPSQDLLPPPNPYPLPQEHSQIYHCTKRKEEECSTTDHPYKKPYMETSPSEEDSFYRSSYPQQQGLGASYRTESAQRQACMYASSAPPSEPVPSLEDISCNTWPSMPSYSSCTVTTVQPMDRLPYQHFSAHFTSGPLVPRLAGMANHGSPQLGEGMFQHQTSVAHQPVVRQCGPQTGLQSPGTLQPPEFLYSHGVPRTLSPHQYHSVHGVGMVPEWSDNS

SEQ ID NO: 6062 - protein, 473 aa, Homo sapiens
MASRSLGGLSGIRGGGGGGGKKSLSARNAAVERRNLITVCRFSVKTLIDRSCFETIDDSSPEFNNFAAILEQILSHRLKEISQSCRWLAHLQIPLQGQVTWFGYESPRSFWDYIRVACRKVSQNCICSIENMENVSSSRAKGRAWIRVALMEKHLSEYISTALRDFKTTRRFYEDGAIVLGEEANMLAGMLLGLNAIDFSFCLKGEGLDGSFPAVIDYTPYLKYIQSSDSISSDEEELRTLGSSGSESSTPENVGPPFLMDENSWFNKCKRVKQKYQLTLEQKGYLEELLRLRENQLSESVSQNKILLQRIEDSDLAHKLEKEQLEYIIVELQDQLTVLKNNDLRSRQELTAHLTNQWPSPGALDVNAVALDTLLYRKHNKQWYEKSYQSLDQLSAEVSLSQTSLDPGQSQEGDGKQDTLNVMSEGKEDTPSLLGLCGSLTSVASYKSLTSLKSNDYLASPTTEMTSPGLTPS

SEQ ID NO: 6063 - protein, 214 aa, Homo sapiens
MESENMDSENMKTENMESQNVDFESVSSVTALEALSKLLNPEEEDDSDYGQTNGLSTIGAMGPGNIGPPQIEELKVIPETSEENNEDIWNSEEIPEGAEYDDMWDVREIPEYEIIFRQQVGTEDIFLGLSKKDSSTGCCSELVAKIKLPNTNPSDIQIDIQETILDLRTPQKKLLITLPELVECTSAKAFYIPETETLEITMTMKRELDIANFF

SEQ ID NO: 6064 - protein, 221 aa, Homo sapiens
MSDGDYDYLIKFLALGDSGVGKTSVLYQYTDGKFNSKFITTVGIDFREKRVVYRASGPDGATGRGQRIHLQLWDTAGQERFRSLTTAFFRDAMGFLLLFDLTNEQSFLNVRNWISQLQMHAYCENPDIVLCGNKSDLEDQRVVKEEEAIALAEKYGIPYFETSAANGTNISQAIEMLLDLIMKRMERCVDKSWIPEGVVRSNGHASTDQLSEEKEKGACGC

SEQ ID NO: 6065 - protein, 770 aa, Homo sapiens
MKGDTRHLNGEEDAGGREDSILVNGACSDQSSDSPPILEAIRTPEIRGRRSSSRLSKREVSSLLSYTQDLTGDGDGEDGDGSDTPVMPKLFRETRTRSESPAVRTRNNNSVSSRERHRPSPRSTRGRQGRNHVDESPVEFPATRSLRRRATASAGTPWPSPPSSYLTIDLTDDTEDTHGTPQSSSTPYARLAQDSQQGGMESPQVEADSGDGDSSEYQDGKEFGIGDLVWGKIKGFSWWPAMVVSWKATSKRQAMSGMRWVQWFGDGKFSEVSADKLVALGLFSQHFNLATFNKLVSYRKAMYHALEKARVRAGKTFPSSPGDSLEDQLKPMLEWAHGGFKPTGIEGLKPNNTQPENKTRRRTADDSATSDYCPAPKRLKTNCYNNGKDRGDEDQSREQMASDVANNKSSLEDGCLSCGRKNPVSFHPLFEGGLCQTCRDRFLELFYMYDDDGYQSYCTVCCEGRELLLCSNTSCCRCFCVECLEVLVGTGTAAEAKLQEPWSCYMCLPQRCHGVLRRRKDWNVRLQAFFTSDTGLEYEAPKLYPAIPAARRRPIRVLSLFDGIATGYLVLKELGIKVGKYVASEVCEESIAVGTVKHEGNIKYVNDVRNITKKNIEEWGPFDLVIGGSPCNDLSNVNPARKGLYEGTGRLFFEFYHLLNYSRPKEGDDRPFFWMFENVVAMKVGDKRDISRFLECNPVMIDAIKVSAAHRARYFWGNLPGMNRIFGFPVHYTDVSNMGRGARQKLLGRSWSVPVIRHLFAPLKDYFACE

SEQ ID NO: 6066 - protein, 2223 aa, Homo sapiens
MAPKKEKGGTVNTSSKIWEPSLIAAQFNQNDWQASIAFVVGNQIEDDLLIQALTVAVQVPQRKLFSMVSWQDILQQINEINTLVGSASSKKAKKPVGGNAPLYYEVLTAAKAIMDSGEKLTLPLIGKLLKFQLLQIKFKDQQRRENEKKVIEDKPKLEKDKGKAKSPKEKKAPSAKPAKGKGKDQPEANAPVKKTTQLKRRGEDDHTNRYIDDEPDDGAQHYIIVVGFNNPQLLAIMAELGIPITSVIKISSENYEPLQTHLAAVNQQQEVLLQSEDLEAEKLKKENAIKELKTFWKYLEPVLNNEKPETNLFDVARLEYMVKAADFPSDWSDGEMMLKLGTDIFENIACLMYDILDWKRQHQHYLESMQLINVPQVVNEKPVLEAMPTSEAPQPAVPAPGKKKAQYEEPQAPPPVTSVITTEVDMRYYNYLLNPIREEFISVPLILHCMLEQVVATEEDLVPPSLREPSPRADGLDHRIAAHIVSLLPSLCLSEREKKNLHDIFLSEEENESKAVPKGPLLLNYHDAHAHKKYALQDQKNFDPVQIEQEMQSKLPLWEFLQFPLPPPWNNTKRLATIHELMHFCTSDVLSWNEVERAFKVFTFESLKLSEVDEKGKLKPSGMMCGSDSEMFNIPWDNPARFAKQIRQQYVMKMNTQEAKQKADIKIKDRTLFVDQNLSMSVQDNESNREPSDPSQCDANNMKHSDLNNLKLSVPDNRQLLEQESIMKAQPQHESLEQTTNNEIKDDAVTKADSHEKKPKKMMVEADLEDIKKTQQRSLMDWSFTEHFKPKVLLQVLQEAHKQYRCVDSYYHTQDNSLLLVFHNPMNRQRLHCEYWNIALHSNVGFRNYLELVAKSIQDWITKEEAIYQESKMNEKIIRTRAELELKSSANAKLTSASKIFSIKESKSNKGISKTEISDQEKEKEKEKIPFILEGSLKAWKEEQHRLAEEERLREEKKAEKKGKEAGKKKGKDNAEKEDSRSLKKKSPYKEKSKEEQVKIQEVTEESPHQPEPKITYPFHGYNMGNIPTQISGSNYYLYPSDGGQIEVEKTMFEKGPTFIKVRVVKDNHNFMIHLNDPKEIVKKEEKGDYYLEEEEEGDEEQSLETEVSDAKNKAFSKFGSFSATLENGICLSISYYGSNGMAPEDKDPDLETILNIPSALTPTVVPVIVTVPQSKAKGKIKGKEKPKESLKEEEHPKEEEKKEEEVEPEPVLQETLDVPTFQSLNVSCPSGLLLTFIGQESTGQYVIDEEPTWDIMVRQSYPQRVKHYEFYKTVMPPAEQEASRVITSQGTVVKYMLDGSTQILFADGAVSRSPNSGLICPPSEMPATPHSGDLMDSISQQKSETIPSEITNTKKGKSHKSQSSMAHKGEIHDPPPEAVQTVTPVEVHIGTWFTTTPEGNRIGTKGLERIADLTPLLSFQATDPVNGTVMTTREDKVVIVERKDGTRIVDHADGTRITTFYQVYEDQIILPDDQETTEGPRTVTRQVKCMRVESSRYATVIANCEDSSCCATFGDGTTIIAKPQGTYQVLPPNTGSLYIDKDCSAVYCHESSSNIYYPFQKREQLRAGRYIMRHTSEVICEVLDPEGNTFQVMADGSISTILPEKKLEDDLNEKTEGYDSLSSMHLEKNHQQIYGEHVPRFFVMYADGSGMELLRDSDIEEYLSLAYKESNTVVLQEPVQEQPGTLTITVLRPFHEASPWQVKKEDTIVPPNLRSRSWETFPSVEKKTPGPPFGTQIWKGLCIESKQLVSAPGAILKSPSVLQMRQFIQHEVIKNEVKLRLQVSLKDYINYILKKEDELQEMMVKDSRTEEERGNAADLLKLVMSFPKMEETTKSHVTEVAAHLTDLFKQSLATPPKCPPDTFGKDFFEKTWRHTASSKRWKEKIDKTRKEIETTQNYLMDIKNRIIPPFFKSELNQLYQSQYNHLDSLSKKLPSFTKKNEDANETAVQDTSDLNLDFKPHKVSEQKSSSVPSLPKPEISADKKDFTAQNQTENLTKSPEEAESYEPVKIPTQSLLQDVAGQTRKEKVKLPHYLLSSKPKSQPLAKVQDSVGGKVNTSSVASAAINNAKSSLFGFHLLPSSVKFGVLKEGHTYATVVKLKNVGVDFCRFKVKQPPPSTGLKVTYKPGPVAAGMQTELNIELFATAVGEDGAKGSAHISHNIEIMTEHEVLFLPVEATVLTSSNYDKRPKDFPQGKENPMVQRTSTIYSSTLGVFMSRKVSPH

SEQ ID NO: 6067 - protein, 242 aa, Homo sapiens
MGPRARPALLLLMLLQTAVLQGRLLRSHSLHYLFMGASEQDLGLSLFEALGYVDDQLFVFYDHESRRVEPRTPWVSSRISSQMWLQLSQSLKGWDHMFTVDFWTIMENHNHSKVTTLRCRALNYYPQNITMKWLKDKQPMDAKEFEPKDVLPNGDGTYQGWITLAVPPGEEQRYTCQVEHPGLDQPLIVIWEPSPSGTLVIGVISGIAVFVVILFIGILFIILRKRQGSRGAMGHYVLAERE

SEQ ID NO: 6068 - protein, 1192 aa, Homo sapiens
MEDLDQSPLVSSSDSPPRPQPAFKYQFVREPEDEEEEEEEEEEDEDEDLEELEVLERKPAAGLSAAPVPTAPAAGAPLMDFGNDFVPPAPRGPLPAAPPVAPERQPSWDPSPVSSTVPAPSPLSAAAVSPSKLPEDDEPPARPPPPPPASVSPQAEPVWTPPAPAPAAPPSTPAAPKRRGSSGSVDETLFALPAASEPVIRSSAENMDLKEQPGNTISAGQEDFPSVLLETAASLPSLSPLSAASFKEHEYLGNLSTVLPTEGTLQENVSEASKEVSEKAKTLLIDRDLTEFSELEYSEMGSSFSVSPKAESAVIVANPREEIIVKNKDEEEKLVSNNILHNQQELPTALTKLVKEDEVVSSEKAKDSFNEKRVAVEAPMREEYADFKPFERVWEVKDSKEDSDMLAAGGKIESNLESKVDKKCFADSLEQTNHEKDSESSNDDTSFPSTPEGIKDRSGAYITCAPFNPAATESIATNIFPLLGDPTSENKTDEKKIEEKKAQIVTEKNTSTKTSNPFLVAAQDSETDYVTTDNLTKVTEEVVANMPEGLTPDLVQEACESELNEVTGTKIAYETKMDLVQTSEVMQESLYPAAQLCPSFEESEATPSPVLPDIVMEAPLNSAVPSAGASVIQPSSSPLEASSVNYESIKHEPENPPPYEEAMSVSLKKVSGIKEEIKEPENINAALQETEAPYISIACDLIKETKLSAEPAPDFSDYSEMAKVEQPVPDHSELVEDSSPDSEPVDLFSDDSIPDVPQKQDETVMLVKESLTETSFESMIEYENKEKLSALPPEGGKPYLESFKLSLDNTKDTLLPDEVSTLSKKEKIPLQMEELSTAVYSNDDLFISKEAQIRETETFSDSSPIEIIDEFPTLISSKTDSFSKLAREYTDLEVSHKSEIANAPDGAGSLPCTELPHDLSLKNIQPKVEEKISFSDDFSKNGSATSKVLLLPPDVSALATQAEIESIVKPKVLVKEAEKKLPSDTEKEDRSPSAIFSAELSKTSVVDLLYWRDIKKTGVVFGASLFLLLSLTVFSIVSVTAYIALALLSVTISFRIYKGVIQAIQKSDEGHPFRAYLESEVAISEELVQKYSNSALGHVNCTIKELRRLFLVDDLVDSLKFAVLMWVFTYVGALFNGLTLLILALISLFSVPVIYERHQAQIDHYLGLANKNVKDAMAKIQAKIPGLKRKAE

SEQ ID NO: 6069 - protein, 543 aa, Homo sapiens
MMFGGYETIEAYEDDLYRDESSSELSVDSEVEFQLYSQIHYAQDLDDVIREEEHEEKNSGNSESSSSKPNQKKLIVLSDSEVIQLSDGSEVITLSDEDSIYRCKGKNVRVQAQENAHGLSSSLQSNELVDKKCKSDIEKPKSEERSGVIREVMIIEVSSSEEEESTISEGDNVESWMLLGCEVDDKDDDILLNLVGCENSVTEGEDGINWSISDKDIEAQIANNRTPGRWTQRYYSANKNIICRNCDKRGHLSKNCPLPRKVRRCFLCSRRGHLLYSCPAPLCEYCPVPKMLDHSCLFRHSWDKQCDRCHMLGHYTDACTEIWRQYHLTTKPGPPKKPKTPSRPSALAYCYHCAQKGHYGHECPEREVYDPSPVSPFICYYDDKYEIQEREKRLKQKIKVLKKNGVIPEPSKLPYIKAANENPHHDIRKGRASWKSNRWPQENKETQKEMKNKNRNWEKHRKADRHREVDEDFPRGPKTYSSPGSFKTQKPSKPFHRSSHYHTSREDKSPKEGKRGKQKKKERCWEDDDNDNLFLIKQRKKKS

SEQ ID NO: 6070 - protein, 436 aa, Homo sapiens
MMGEAAVAAGPCPLREDSFTRFSSQSNVYGLAGGAGGRGELLAATLKGKVLGFRYQDLRQKIRPVAKELQFNYIPVDAEIVSIDTFNKSPPKRGLVVGITFIKDSGDKGSPFLNIYCDYEPGSEYNLDSIAQSCLNLELQFTPFQLCHAEVQVGDQLETVFLLSGNDPAIHLYKENEGLHQFEEQPVENLFPELTNLTSSVLWLDVHNFPGTSRRLSALGCQSGYVRVAHVDQRSREVLQMWSVLQDGPISRVIVFSLSAAKETKDRPLQDEYSVLVASMLEPAVVYRDLLNRGLEDQLLLPGSDQFDSVLCSLVTDVDLDGRPEVLVATYGQELLCYKYRGPESGLPEAQHGFHLLWQRSFSSPLLAMAHVDLTGDGLQELAVVSLKGVHILQHSLIQASELVLTRLRHQVEQRRRRLQGLEDGAGAGPAENAAS

SEQ ID NO: 6071 - protein, 209 aa, Homo sapiens
MELNSLLILLEAAEYLERRDREAEHGYASVLPFDGDFAREKTKAAGLVRKAPNNRSSHNELEKHRRAKLRLYLEQLKQLVPLGPDSTRHTTLSLLKRAKVHIKKLEEQDRRALSIKEQLQQEHRFLKRRLEQLSVQSVERVRTDSTGSAVSTDDSEQEVDIEGMEFGPGELDSVGSSSDADDHYSLQSGTGGDSGFGPHCRRLGRPALS

SEQ ID NO: 6072 - protein, 576 aa, Homo sapiens
MPALSTGSGSDTGLYELLAALPAQLQPHVDSQEDLTFLWDMFGEKSLHSLVKIHEKLHYYEKQSPVPILHGAAALADDLAEELQNKPLNSEIRELLKLLSKPNVKALLSVHDTVAQKNYDPVLPPMPEDIDDEEDSVKIIRLVKNREPLGATIKKDEQTGAIIVARIMRGGAADRSGLIHVGDELREVNGIPVEDKRPEEIIQILAQSQGAITFKIIPGSKEETPSKEGKMFIKALFDYNPNEDKAIPCKEAGLSFKKGDILQIMSQDDATWWQAKHEADANPRAGLIPSKHFQERRLALRRPEILVQPLKVSNRKSSGFRKSFRLSRKDKKTNKSMYECKKSDQYDTADVPTYEEVTPYRRQTNEKYRLVVLVGPVGVGLNELKRKLLISDTQHYGVTVPHTTRARRSQESDGVEYIFISKHLFETDVQNNKFIEYGEYKNNYYGTSIDSVRSVLAKNKVCLLDVQPHTVKHLRTLEFKPYVIFIKPPSIERLRETRKNAKIISSRDDQGAAKPFTEEDFQEMIKSAQIMESQYGHLFDKIIINDDLTVAFNELKTTFDKLETETHWVPVSWLHS

SEQ ID NO: 6073 - protein, 534 aa, Homo sapiens
MALIPDLAMETWLLLAVSLVLLYLYGTHSHGLFKKLGIPGPTPLPFLGNILSYHKGFCMFDMECHKKYGKVWGFYDGQQPVLAITDPDMIKTVLVKECYSVFTNRRPFGPVGFMKSAISIAEDEEWKRLRSLLSPTFTSGKLKEMVPIIAQYGDVLVRNLRREAETGKPVTLKDVFGAYSMDVITSTSFGVNIDSLNNPQDPFVENTKKLLRFDFLDPFFLSITVFPFLIPILEVLNICVFPREVTNFLRKSVKRMKESRLEDTQKHRVDFLQLMIDSQNSKETESHKALSDLELVAQSIIFIFAGYETTSSVLSFIMYELATHPDVQQKLQEEIDAVLPNKAPPTYDTVLQMEYLDMVVNETLRLFPIAMRLERVCKKDVEINGMFIPKGVVVMIPSYALHRDPKYWTEPEKFLPERLEKRKLQSSTIPTTYDEGHQLCPYGSSVSKIFSKKNKDNIDPYIYTPFGSGPRNCIGMRFALMNMKLALIRVLQNFSFKPCKETQIPLKLSLGGLLQPEKPVVLKVESRDGTVSGA

SEQ ID NO: 6074 - protein, 1082 aa, Homo sapiens
MAARRITQETFDAVLQEKAKRYHMDASGEAVSETLQFKAQDLLRAVPRSRAEMYDDVHSDGRYSLSGSVAHSRDAGREGLRSDVFPGPSFRSSNPSISDDSYFRKECGRDLEFSHSDSRDQVIGHRKLGHFRSQDWKFALRGSWEQDFGHPVSQESSWSQEYSFGPSAVLGDFGSSRLIEKECLEKESRDYDVDHPGEADSVLRGGSQVQARGRALNIVDQEGSLLGKGETQGLLTAKGGVGKLVTLRNVSTKKIPTVNRITPKTQGTNQIQKNTPSPDVTLGTNPGTEDIQFPIQKIPLGLDLKNLRLPRRKMSFDIIDKSDVFSRFGIEIIKWAGFHTIKDDIKFSQLFQTLFELETETCAKMLASFKCSLKPEHRDFCFFTIKFLKHSALKTPRVDNEFLNMLLDKGAVKTKNCFFEIIKPFDKYIMRLQDRLLKSVTPLLMACNAYELSVKMKTLSNPLDLALALETTNSLCRKSLALLGQTFSLASSFRQEKILEAVGLQDIAPSPAAFPNFEDSTLFGREYIDHLKAWLVSSGCPLQVKKAEPEPMREEEKMIPPTKPEIQAKAPSSLSDAVPQRADHRVVGTIDQLVKRVIEGSLSPKERTLLKEDPAYWFLSDENSLEYKYYKLKLAEMQRMSENLRGADQKPTSADCAVRAMLYSRAVRNLKKKLLPWQRRGLLRAQGLRGWKARRATTGTQTLLSSGTRLKHHGRQAPGLSQAKPSLPDRNDAAKDCPPDPVGPSPQDPSLEASGPSPKPAGVDISEAPQTSSPCPSADIDMKTMETAEKLARFVAQVGPEIEQFSIENSTDNPDLWFLHDQNSSAFKFYRKKVFELCPSICFTSSPHNLHTGGGDTTGSQESPVDLMEGEAEFEDEPPPREAELESPEVMPEEEDEDDEDGGEEAPAPGGAGKSEGSTPADGLPGEAAEDDLAGAPALSQASSGTCFPRKRISSKSLKVGMIPAPKRVCLIQEPKVHEPVRIAYDRPRGRPMSKKKKPKDLDFAQQKLTDKNLGFQMLQKMGWKEGHGLGSLGKGIREPVSVGTPSEGEGLGADGQEHKEDTFDVFRQRMMQMYRHKRANK

SEQ ID NO: 6075 - protein, 296 aa, Homo sapiens
MVAEKETLSLNKCPDKMPKRTKLLAQQPLPVHQPHSLVSEGFTVKAMMKNSVVRGPPAAGAFKERPTKPTAFRKFYERGDFPIALEHDSKGNKIAWKVEIEKLDYHHYLPLFFDGLCEMTFPYEFFARQGIHDMLEHGGNKILPVLPQLIIPIKNALNLRNRQVICVTLKVLQHLVVSAEMVGKALVPYYRQILPVLNIFKNMNGSYSLPRLECSGAIMARCNLDHLGSSDPPTSASQVAEIIVNSGDGIDYSQQKRENIGDLIQETLEAFERYGGENAFINIKYVVPTYESCLLN

SEQ ID NO: 6076 - protein, 466 aa, Homo sapiens
MKVRSAGGDGDALCVTEEDLAGDDEDMPTFPCTQKGRPGPRCSRCQKNLSLHTSVRILYLFLALLLVAVAVLASLVFRKVDSLSEDISLTQSIYDKKLVLMQKNLQGLDPKALNNCSFCHEAGQLGPEIRKLQEELEGIQKLLLAQEVQLDQTLQAQEVLSTTSRQISQEMGSCSFSIHQVNQSLGLFLAQVRGWQATTAGLDLSLKDLTQECYDVKAAVHQINFTVGQTSEWIHGIQRKTDEETLTLQKIVTDWQNYTRLFSGLRTTSTKTGEAVKNIQATLGASSQRISQNSESMHDLVLQVMGLQLQLDNISSFLDDHEENMHDLQYHTHYAQNRTVERFESLEGRMASHEIEIGTIFTNINATDNHVHSMLKYLDDVRLSCTLGFHTHAEELYYLNKSVSIMLGTTDLLRERFSLLSARLDLNVRNLSMIVEEMKAVDTQHGEILRNVTILRGHTLFSHNRI

SEQ ID NO: 6077 - protein, 685 aa, Homo sapiens
MDFREILMIASKGQGVNNVPKRYSLAVGPPKKDPKVKGVQSAAVQAFLKRKEEELRRKALEEKRRKEELVKKRIELKHDKKARAMAKRTKDNFHGYNGIPIEEKSKKRQATESHTSQGTDREYEMEEENEFLEYNHAESEQEYEEEQEPPKVESKPKVPLKSAPPPMNFTDLLRLAEKKQFEPVEIKVVKKSEERPMTAEELREREFLERKHRRKKLETDGKLPPTVSKKAPSQKESVGTKLSKGSGDRHPSSKGMPLPHAEKKSRPSMANEKHLALSSSKSMPGERIKAGSGNSSQPSLREGHDKPVFNGAGKPHSSTSSPSVPKTSASRTQKSAVEHKAKKSLSHPSHSRPGPMVTPHNKAKSPGVRQPGSSSSSAPGQPSTGVARPTVSSGPVPRRQNGSSSSGPERSISGSKKPTNDSNPSRRTVSGTCGPGQPASSSGGPGRPISGSVSSARPLGSSRGPGRPVSSPHELRRPVSGLGPPGRSVSGPGRSISGSIPAGRTVSNSVPGRPVSSLGPGQTVSSSGPTIKPKCTVVSETISSKNIISRSSNGQMNGMKPPLSGYRAAQGPQRLPFPTGYKRQREYEEEDDDDDEYDSEMEDFIEDEGEPQEEISKHIREIFGYDRKKYKDESDYALRYMESSWKEQQKEEAKSLRLGMQEDLEEMRREEEEMQRRRAKKLKRR

SEQ ID NO: 6078 - protein, 1334 aa, Homo sapiens
MSEAMDQPAGGPGNPRPGEGDDGSMEPGTCQELLHRLRELEAENSALAQANENQRETYERCLDEVANHVVQALLNQKDLREECIKLKKRVFDLERQNQMLSALFQQKLQLTTGSLPQIPLTPLQPPSEPPASPSLSSTEGPAAPLPLGHCAGQREVCWEQQLRPGGPGPPAAPPPALDALSPFLRKKAQILEVLRALEETDPLLLCSPATPWRPPGQGPGSPEPINGELCGPPQPEPSPWAPCLLLGPGNLGGLLHWERLLGGLGGEEDTGRPWGPSRGPPQAQGTSSGPNCAPGSSSSSSSDEAGDPNEAPSPDTLLGALARRQLNLGQLLEDTESYLQAFLAGAAGPLNGDHPGPGQSSSPDQAPPQLSKSKGLPKSAWGGGTPEAHRPGFGATSEGQGPLPFLSMFMGAGDAPLGSRPGHPHSSSQVKSKLQIGPPSPGEAQGPLLPSPARGLKFLKLPPTSEKSPSPGGPQLSPQLPRNSRIPCRNSGSDGSPSPLLARRGLGGGELSPEGAQGLPTSPSPCYTTPDSTQLRPPQSALSTTLSPGPVVSPCYENILDLSRSTFRGPSPEPPPSPLQVPTYPQLTLEVPQAPEVLRSPGVPPSPCLPESYPYGSPQEKSLDKAGSESPHPGRRTPGNSSKKPSQGSGRRPGDPGSTPLRDRLAALGKLKTGPEGALGSEKNGVPARPGTEKTRGPGKSGESAGDMVPSIHRPLEQLEAKGGIRGAVALGTNSLKQQEPGLMGDPGARVYSSHSMGARVDLEPVSPRSCLTKVELAKSRLAGALCPQVPRTPAKVPTSAPSLGKPNKSPHSSPTKLPSKSPTKVVPRPGAPLVTKESPKPDKGKGPPWADCGSTTAQSTPLVPGPTDPSQGPEGLAPHSAIEEKVMKGIEENVLRLQGQERAPGAEVKHRNTSSIASWFGLKKSKLPALNRRTEATKNKEGAGGGSPLRREVKMEARKLEAESLNISKLMAKAEDLRRALEEEKAYLSSRARPRPGGPAPGPNTGLGQVQGQLAGMYQGADTFMQQLLNRVDGKELPSKSWREPKPEYGDFQPVSSDPKSPWPACGPRNGLVGPLQGCGKPPGKPSSEPGRREEMPSEDSLAEPVPTSHFTACGSLTRTLDSGIGTFPPPDHGSSGTPSKNLPKTKPPRLDPPPGVPPARPPPLTKVPRRAHTLEREVPGIEELLVSGRHPSMPAFPALLPAAPGHRGHETCPDDPCEDPGPTPPVQLAKNWTFPNTRAAGSSSDPLMCPPRQLEGLPRTPMALPVDRKRSQEPSRPSPTPQGPPFGGSRTPSTSDMAEEGRVASGGPPGLETSESLSDSLYDSLSSCGSQG

SEQ ID NO: 6079 - protein, 143 aa, Homo sapiens
MPRAGMGASLRPGTGPHPDTGDRKQIYNILSTLGLRPSTTDCDIVRRACESVSTRAAHMCSAGLAGVINRMRESRSEDVMRITVGVDGSVYKLHPSFKERFHASVRRLTPSCEITFIESEEGSGRGAALVSAVACKKACMLGQ

SEQ ID NO: 6080 - protein, 538 aa, Homo sapiens
MPRGWAAPLLLLLLQGGWGCPDLVCYTDYLQTVICILEMWNLHPSTLTLTWQDQYEELKDEATSCSLHRSAHNATHATYTCHMDVFHFMADDIFSVNITDQSGNYSQECGSFLLAESIKPAPPFNVTVTFSGQYNISWRSDYEDPAFYMLKGKLQYELQYRNRGDPWAVSPRRKLISVDSRSVSLLPLEFRKDSSYELQVRAGPMPGSSYQGTWSEWSDPVIFQTQSEELKEGWNPHLLLLLLLVIVFIPAFWSLKTHPLWRLWKKIWAVPSPERFFMPLYKGCSGDFKKWVGAPFTGSSLELGPWSPEVPSTLEVYSCHPPRSPAKRLQLTELQEPAELVESDGVPKPSFWPTAQNSGGSAYSEERDRPYGLVSIDTVTVLDAEGPCTWPCSCEDDGYPALDLDAGLEPSPGLEDPLLDAGTTVLSCGCVSAGSPGLGGPLGSLLDRLKPPLADGEDWAGGLPWGGRSPGGVSESEAGSPLAGLDMDTFDSGFVGSDCSSPVECDFTSPGDEGPPRSYLRQWVVIPPPLSSPGPQAS

SEQ ID NO: 6081 - protein, 826 aa, Homo sapiens
MEGAGGANDKKKISSERRKEKSRDAARSRRSKESEVFYELAHQLPLPHNVSSHLDKASVMRLTISYLRVRKLLDAGDLDIEDDMKAQMNCFYLKALDGFVMVLTDDGDMIYISDNVNKYMGLTQFELTGHSVFDFTHPCDHEEMREMLTHRNGLVKKGKEQNTQRSFFLRMKCTLTSRGRTMNIKSATWKVLHCTGHIHVYDTNSNQPQCGYKKPPMTCLVLICEPIPHPSNIEIPLDSKTFLSRHSLDMKFSYCDERITELMGYEPEELLGRSIYEYYHALDSDHLTKTHHDMFTKGQVTTGQYRMLAKRGGYVWVETQATVIYNTKNSQPQCIVCVNYVVSGIIQHDLIFSLQQTECVLKPVESSDMKMTQLFTKVESEDTSSLFDKLKKEPDALTLLAPAAGDTIISLDFGSNDTETDDQQLEEVPLYNDVMLPSPNEKLQNINLAMSPLPTAETPKPLRSSADPALNQEVALKLEPNPESLELSFTMPQIQDQTPSPSDGSTRQSSPEPNSPSEYCFYVDSDMVNEFKLELVEKLFAEDTEAKNPFSTQDTDLDLEMLAPYIPMDDDFQLRSFDQLSPLESSSASPESASPQSTVTVFQQTQIQEPTANATTTTATTDELKTVTKDRMEDIKILIASPSPTHIHKETTSATSSPYRDTQSRTASPNRAGKGVIEQTEKSHPRSPNVLSVALSQRTTVPEEELNPKILALQNAQRKRKMEHDGSLFQAVGIGTLLQQPDDHAATTSLSWKRVKGCKSSEQNGMEQKTIILIPSDLACRLLGQSMDESGLPQLTSYDCEVNAPIQGSRNLLQGEELLRALDQVN

SEQ ID NO: 6082 - protein, 324 aa, Homo sapiens
MASYYEILDVPRSASADDIKKAYRRKALQWHPDKNPDNKEFAEKKFKEVAEAYEVLSDKHKREIYDRYGREGLTGTGTGPSRAEAGSGGPGFTFTFRSPEEVFREFFGSGDPFAELFDDLGPFSELQNRGSRHSGPFFTFSSSFPGHSDFSSSSFSFSPGAGAFRSVSTSTTFVQGRRITTRRIMENGQERVEVEEDGQLKSVTINGVPDDLALGLELSRREQQPSVTSRSGGTQVQQTPASCPLDSDLSEDEDLQLAMAYSLSEMEAAGKKPAGGREAQHRRQGRPKAQHQDPGLGGTQEGARGEATKRSPSPEEKASRCLIL

SEQ ID NO: 6083 - protein, 1606 aa, Homo sapiens
MNKAPQSTGPPPAPSPGLPQPAFPPGQTAPVVFSTPQATQMNTPSQPRQGGFRSLQHFYPSRAQPPSSAASRVQSAAPARPGPAAHVYPAGSQVMMIPSQISYPASQGAYYIPGQGRSTYVVPTQQYPVQPGAPGFYPGASPTEFGTYAGAYYPAQGVQQFPTGVAPTPVLMNQPPQIAPKRERKTIRIRDPNQGGKDITEEIMSGARTASTPTPPQTGGGLEPQANGETPQVAVIVRPDDRSQGAIIADRPGLPGPEHSPSESQPSSPSPTPSPSPVLEPGSEPNLAVLSIPGDTMTTIQMSVEESTPISRETGEPYRLSPEPTPLAEPILEVEVTLSKPVPESEFSSSPLQAPTPLASHTVEIHEPNGMVPSEDLEPEVESSPELAPPPACPSESPVPIAPTAQPEELLNGAPSPPAVDLSPVSEPEEQAKEVTASMAPPTIPSATPATAPSATSPAQEEEMEEEEEEEEGEAGEAGEAESEKGGEELLPPESTPIPANLSQNLEAAAATQVAVSVPKRRRKIKELNKKEAVGDLLDAFKEANPAVPEVENQPPAGSNPGPESEGSGVPPRPEEADETWDSKEDKIHNAENIQPGEQKYEYKSDQWKPLNLEEKKRYDREFLLGFQFIFASMQKPEGLPHISDVVLDKANKTPLRPLDPTRLQGINCGPDFTPSFANLGRTTLSTRGPPRGGPGGELPRGPAGLGPRRSQQGPRKEPRKIIATVLMTEDIKLNKAEKAWKPSSKRTAADKDRGEEDADGSKTQDLFRRVRSILNKLTPQMFQQLMKQVTQLAIDTEERLKGVIDLIFEKAISEPNFSVAYANMCRCLMALKVPTTEKPTVTVNFRKLLLNRCQKEFEKDKDDDEVFEKKQKEMDEAATAEERGRLKEELEEARDIARRRSLGNIKFIGELFKLKMLTEAIMHDCVVKLLKNHDEESLECLCRLLTTIGKDLDFEKAKPRMDQYFNQMEKIIKEKKTSSRIRFMLQDVLDLRGSNWVPRRGDQGPKTIDQIHKEAEMEEHREHIKVQQLMAKGSDKRRGGPPGPPISRGLPLVDDGGWNTVPISKGSRPIDTSRLTKITKPGSIDSNNQLFAPGGRLSWGKGSSGGSGAKPSDAASEAARPATSTLNRFSALQQAVPTESTDNRRVVQRSSLSRERGEKAGDRGDRLERSERGGDRGDRLDRARTPATKRSFSKEVEERSRERPSQPEGLRKAASLTEDRDRGRDAVKREAALPPVSPLKAALSEEELEKKSKAIIEEYLHLNDMKEAVQCVQELASPSLLFIFVRHGVESTLERSAIAREHMGQLLHQLLCAGHLSTAQYYQGLYEILELAEDMEIDIPHVWLYLAELVTPILQEGGVPMGELFREITKPLRPLGKAASLLLEILGLLCKSMGPKKVGTLWREAGLSWKEFLPEGQDIGAFVAEQKVEYTLGEESEAPGQRALPSEELNRQLEKLLKEGSSNQRVFDWIEANLSEQQIVSNTLVRALMTAVCYSAIIFETPLRVDVAVLKARAKLLQKYLCDEQKELQALYALQALVVTLEQPPNLLRMFFDALYDEDVVKEDAFYSWESSKDPAEQQGKGVALKSVTAFFKWLREAEEESDHN

SEQ ID NO: 6084 - protein, 580 aa, Homo sapiens
MDSLQDTVALDHGGCCPALSRLVPRGFGTEMWTLFALSGPLFLFQVLTFMIYIVSTVFCGHLGKVELASVTLAVAFVNVCGVSVGVGLSSACDTLMSQSFGSPNKKHVGVILQRGALVLLLCCLPCWALFLNTQHILLLFRQDPDVSRLTQDYVMIFIPGLPVIFLYNLLAKYLQNQKITWPQVLSGVVGNCVNGVANYALVSVLNLGVRGSAYANIISQFAQTVFLLLYIVLKKLHLETWAGWSSQCLQDWGPFFSLAVPSMLMICVEWWAYEIGSFLMGLLSVVDLSAQAVIYEVATVTYMRHSHRLAYAAHVTRIPLGLSIGVCVRVGMALGAADTVQAKRSAVSGVLSIVGISLVLGTLISILKNQLGHIFTNDEDVIALVSQVLPVYSVFHVFEAICCVYGGVLRGTGKQAFGAAVNAITYYIIGLPLGILLTFVVRMRIMGLWLGMLACVFLATAAFVAYTARLDWKLAAEEAKKHSGRQQQQRAESTATRPGPEKAVLSSVATGSSPGITLTTYSRSECHVDFFRTPEEAHALSAPTSRLSVKQLVIRRGAALGAASATLMVGLTVRILATRH

SEQ ID NO: 6085 - protein, 533 aa, Homo sapiens
MEALGFLKLEVNGPMVTVALSVALLALLKWYSTSAFSRLEKLGLRHPKPSPFIGNLTFFRQGFWESQMELRKLYGPLCGYYLGRRMFIVISEPDMIKQVLVENFSNFTNRMASGLEFKSVADSVLFLRDKRWEEVRGALMSAFSPEKLNEMVPLISQACDLLLAHLKRYAESGDAFDIQRCYCNYTTDVVASVAFGTPVDSWQAPEDPFVKHCKRFFEFCIPRPILVLLLSFPSIMVPLARILPNKNRDELNGFFNKLIRNVIALRDQQAAEERRRDFLQMVLDARHSASPMGVQDFDIVRDVFSSTGCKPNPSRQHQPSPMARPLTVDEIVGQAFIFLIAGYEIITNTLSFATYLLATNPDCQEKLLREVDVFKEKHMAPEFCSLEEGLPYLDMVIAETLRMYPPAFRFTREAAQDCEVLGQRIPAGAVLEMAVGALHHDPEHWPSPETFNPERFTAEARQQHRPFTYLPFGAGPRSCLGVRLGLLEVKLTLLHVLHKFRFQACPETQVPLQLESKSALGPKNGVYIKIVSR

SEQ ID NO: 6086 - protein, 802 aa, Homo sapiens
MAAEALAAEAVASRLERQEEDIRWLWSEVERLRDEQLNAPYSCQAEGPCLTREVAQLRAENCDLRHRLCSLRLCLAEERSRQATLESAELEAAQEAGAQPPPSQSQDKDMKKKKMKESEADSEVKHQPIFIKERLKLFEILKKDHQLLLAIYGKKGDTSNIITVRVADGQTVQGEVWKTTPYQVAAEISQELAESTVIAKVNGELWDLDRPLEGDSSLELLTFDNEEAQAVYWHSSAHILGEAMELYYGGHLCYGPPIENGFYYDMFIEDRAVSSTELSALENICKAIIKEKQPFERLEVSKEILLEMFKYNKFKCRILNEKVNTATTTVYRCGPLIDLCKGPHVRHTGKIKTIKIFKNSSTYWEGNPEMETLQRIYGISFPDNKMMRDWEKFQEEAKNRDHRKIGKEQELFFFHDLSPGSCFFLPRGAFIYNTLTDFIREEYHKRDFTEVLSPNMYNSKLWEASGHWQHYSENMFTFEIEKDTFALKPMNCPGHCLMFAHRPRSWREMPIRFADFGVLHRNELSGTLSGLTRVRRFQQDDAHIFCTVEQIEEEIKGCLQFLQSVYSTFGFSFQLNLSTRPENFLGEIEMWNEAEKQLQNSLMDFGEPWKMNPGDGAFYGPKIDIKIKDAIGRYHQCATIQLDFQLPIRFNLTYVSKDGDDKKRPVIIHRAILGSVERMIAILSENYGGKWPFWLSPRQVMVIPVGPTCEKYALQVSSEFFEEGFMADVDLDHSCTLNKKIRNAQLAQYNFILVVGEKEKIDNAVNVRTRDNKIHGEILVTSAIDKLKNLRKTRTLNAEEAF

SEQ ID NO: 6087 - protein, 824 aa, Homo sapiens
MNKDYQKFWSSPSDPVHFEVDTSHEKVESMSESDTMNVSNLSQGVMLSHSPICMETTGTTCDLPQNEIKNFERENEYESTLCEDAYGTLDNLLNDNNIENYSTNALIQPVDTISISSLRQFETVCKFHWVEAFDDEMTEKPEFQSQVYNYAKDNNIKQDSFKEENPMETSVSANTDQLGNEYFRQPPPRSPPLIHCSGEMLKFTEKSLAKSIAKESALNPSQPPSFLCKTAVPSKEIQNYGEIPEMSVSYEKEVTAEGVERPEIVSTWSSAGISWRSEACRENCEMPDWEQSAESLQPVQEDMALNEVLQKLKHTNRKQEVRIQELQCSNLYLEKRVKELQMKITKQQVFIDVINKLKENVEELIEDKYKIILEKNDTKKTLQNLEEVLANTQKHLQESRNDKEMLQLQFKKIKANYVCLQERYMTEMQQKNKSVSQYLEMDKTLSKKEEEVERLQQLKKELEKATASALDLLKREKEAQEQEFLSLQEEFQKLEKENLEERQKLKSRLEKLLTQVRNLQFMSENERTKNIKLQQQINEVKNENAKLKQQVARSEEQNYVPKFETAQLKDQLEEVLKSDITKDTKTTHSNLLPDCSPCEERLNPADIKRASQLASKMHSLLALMVGLLTCQDIINSDAEHFKESEKVSDIMLQKLKSLHLKKKTLDKELLKHKDRITTFRELIAKEKAFQDHAIKVIDCDSDEAKSIRDVPTLLGAKLDKYHSLNEELDFLVTSYEEIIECADQRLAISHSQIAHLEERNKHLEDLIRKPREKARKPRSKSLENHPKSMTMLAYNLYIFIGYRLGAVADACNPSTLGGRGGWIT

SEQ ID NO: 6088 - protein, 626 aa, Homo sapiens
MAGERPPLRGPGPGPGEVPGEGPPGPGGTGGGPGRGRPSSYRALRSAVSSLARVDDFHCAEKIGAGFFSEVYKVRHRQSGQVMVLKMNKLPSNRGNTLREVQLMNRLRHPNILRFMGVCVHQGQLHALTEYMNGGTLEQLLSSPEPLSWPVRLHLALDIARGLRYLHSKGVFHRDLTSKNCLVRREDRGFTAVVGDFGLAEKIPVYREGARKEPLAVVGSPYWMAPEVLRGELYDEKADVFAFGIVLCELIARVPADPDYLPRTEDFGLDVPAFRTLVGDDCPLPFLLLAIHCCNLEPSTRAPFTEITQHLEWILEQLPEPAPLTRTALTHNQGSVARGGPSATLPRPDPRLSRSRSDLFLPPSPESPPNWGDNLTRVNPFSLREDLRGGKIKLLDTPSKPVLPLVPPSPFPSTQLPLVTTPETLVQPGTPARRCRSLPSSPELPRRMETALPGPGPPAVGPSAEEKMECEGSSPEPEPPGPAPQLPLAVATDNFISTCSSASQPWSPRSGPVLNNNPPAVVVNSPQGWAGEPWNRAQHSLPRAAALERTEPSPPPSAPREPDEGLPCPGCCLGPFSFGFLSMCPRPTPAVARYRNLNCEAGSLLCHRGHHAKPPTPSLQLPGARS

SEQ ID NO: 6089 - protein, 179 aa, Homo sapiens
MAVFKTTLWRLISGTLGIICLSLMSTLGILLKNSFTKLSIEPAFTPGPNIELQKDSDCCSCQEKWVGYRCNCYFISSEQKTWNESRHLCASQKSSLLQLQNTDELDFMSSSQQFYWIGLSYSEEHTAWLWENGSALSQYLFPSFETFNTKNCIAYNPNGNALDESCEDKNRYICKQQLI

SEQ ID NO: 6090 - protein, 673 aa, Homo sapiens
MDLTKMGMIQLQNPSHPTGLLCKANQMRLAGTLCDVVIMVDSQEFHAHRTVLACTSKMFEILFHRNSQHYTLDFLSPKTFQQILEYAYTATLQAKAEDLDDLLYAAEILEIEYLEEQCLKMLETIQASDDNDTEATMADGGAEEEEDRKARYLKNIFISKHSSEESGYASVAGQSLPGPMVDQSPSVSTSFGLSAMSPTKAAVDSLMTIGQSLLQGTLQPPAGPEEPTLAGGGRHPGVAEVKTEMMQVDEVPSQDSPGAAESSISGGMGDKVEERGKEGPGTPTRSSVITSARELHYGREESAEQVPPPAEAGQAPTGRPEHPAPPPEKHLGIYSVLPNHKADAVLSMPSSVTSGLHVQPALAVSMDFSTYGGLLPQGFIQRELFSKLGELAVGMKSESRTIGEQCSVCGVELPDNEAVEQHRKLHSGMKTYGCELCGKRFLDSLRLRMHLLAHSAGAKAFVCDQCGAQFSKEDALETHRQTHTGTDMAVFCLLCGKRFQAQSALQQHMEVHAGVRSYICSECNRTFPSHTALKRHLRSHTGDHPYECEFCGSCFRDESTLKSHKRIHTGEKPYECNGCGKKFSLKHQLETHYRVHTGEKPFECKLCHQRSRDYSAMIKHLRTHNGASPYQCTICTEYCPSLSSMQKHMKGHKPEEIPPDWRIEKTYLYLCYV

SEQ ID NO: 6091 - protein, 1557 aa, Homo sapiens
QGEMRVPEEALKHEKFTIQLQLSQKSSESELSKSASAKSIDSKVADAATEVQHKTTEALKSEEKAMDISAMPRGTPLYGQPSWWGDDEVDEKRAFKTNGKPEEKNHEAGTSGCGIDAKQVEEQSAAANEEVLFPFCREPSYFEIPTKEFQQPSQITESTIHEIPTKDTPSSHITGAGHASFTIEFDDSTPGKVTIRDHVTKFTSDQRHKSKKSSPGTQDLLGIQTGMMAPENKVADWLAQNNPPQMLWERTEEDSKSIKSDVPVYLKRLKGNKHDDGTQSDSENAGAHRRCSKRATLEEHLRRHHSEHKKLQKVQATEKHQDQAVVSQTAFMIAFFDEDNPRKRRSYSFTQSAGILCQETTYSTPHTKLEKAKSPTADAKVVSLSLQTSSAHHRGGHGVPHGKLLKQKSEEPSVSIPFLQTALLRSSGSLGHRPSQEMDKMLKNQATSATSEKDNDDDQSDKGTYTIELENPNSEEVEARKMIDKVFGVDDNQDYNRPVINEKHKDLIKDWALSSAAAVMEERKPLTTSGFHHSEEGTSSSGSKRWVSQWASLAANHTRHDQEERIMEFSAPLPLENETEISESGMTVRSTGSATSLASQGERRRRTLPQLPNEEKSLESHRAKVVTQRSEIGEKQDTELQEKETPTQVYQKDKQDADRPLSKMNRAVNGETLKTGGDNKTLLHLGSSAPGKEKSETDKETSLVKQTLAKLQQQEQREEAQWTPTKLSSKNVSGQTDKCREETFKQESQPPEKNSGHSTSKGDRVAQSESKRRKAEEILKSQTPKGGDKKESSKSLVRQGSFTIEKPSPNIPIELIPHINKQTSSTPSSLALTSASRIRERSESLDPDSSMDTTLILKDTEAVMAFLEAKLREDNKTDEGPDTPSYNRDNSISPESDVDTASTISLVTGETERKSTQKRKSFTSLYKDRCSTGSPSKDVTKSSSSGAREKMEKKTKSRSTDVGSRADGRKFVQSSGRIRQPSVDLTDDDQTSSVPHSAISDIMSSDQETYSCKPHGRTPLTSADEHVHSKLEGSKVTKSKTSPVVSGSSSKSTTLPRPRPTRTSLLRRARLGEASDSELADADKASVASEVSTTSSTSKPPTGRRNISRIDLLAQPRRTRLGSLSARSDSEATISRSSASSRTAEAIIRSGARLVPSDKFSPRIRANSISRLSDSKVKSMTSAHGSASVNSRWRRFPTDYASTSEDEFGSNRNSPKHTRLRTSPALKTTRLQSAGSAMPTSSSFKHRIKEQEDYIRDWTAHREEIARISQDLALIAREINDVAGEIDSVTSSGTAPSTTVSTAATTPGSAIDTREEVGDLHGEMHKLVDRVFDESLNFRKIPPLVHSKTPEGNNGRSGDPRPQAAEPPDHLTITRRRTWSRDEVMGDNLLLSSVFQFSKKIRQSIDKTAGKIRILFKDKDRNWDDIESKLRAESEVPIVKTSSMEISSILQELKRVEKQLQAINAMIDPDGTLEALNNMGFPSAMLPSPPKQKSSPVNNHHSPGQTPTLGQPEARALHPAAVSAAAEFENAESEADFSIHFNRFNPDGEEEDVTVQE

SEQ ID NO: 6092 - protein, 359 aa, Homo sapiens
MQAAALPEEIRWLLEDAEEFLAEGLRNENLSAVARDHRDHILRGFQQIKARYYWDFQPQGGDIGQDSSDDNHSGTLGLSLTSDAPFLSDYQDEGMEDIVKGAQELDNVIKQGYLEKKSKDHSFFGSEWQKRWCVVSRGLFYYYANEKSKQPKGTFLIKGYGVRMAPHLRRDSKKESCFELTSQDRRSYEFTATSPAEARDWVDQISFLLKDLSSLTIPYEEDEEEEEKEETYDDIDGFDSPSCGSQCRPTILPGSVGIKEPTEEKEEEDIYEVLPDEEHDLEEDESGTRRKGVDYASYYQGLWDCHGDQPDELSFQRGDLIRILSKEYNMYGWWVGELNSLVGIVPKEYLTTAFEVEER

SEQ ID NO: 6093 - protein, 1064 aa, Homo sapiens
MNHDFQALALESRGMGELLPTKKFWEPDDSTKDGQKGIFLGDDEWRETAWGASHHSMSQPIMVQRRSGQGFHGNSEVNAILSPRSESGGLGVSMVEYVLSSSPADKLDSRFRKGNFGTRDAETDGPEKGDQKGKASPFEEDQNRDLKQGDDDDSKINGRGLPNGMDADCKDFNRTPGSRQASPTEVVERLGPNTNPSEGLGPLPNPTANKPLVEEFSNPETQNLDAMEQVGLESLQFDYPGNQVPMDSSGATVGLFDYNSQQQLFQRTNALTVQQLTAAQQQQYALAAAQQPHIAGVFSAGLAPAAFVPNPYIISAAPPGTDPYTAAGLAAAATLAGPAVVPPQYYGVPWGVYPANLFQQQAAAAANNTASQQAASQAQPGQQQVLRAGAGQRPLTPNQGQQGQQAESLAAAAAANPTLAFGQGLATGMPGYQVLAPTAYYDQTGALVVGPGARTGLGAPVRLMAPTPVLISSAAAQAAAAAAAGGTASSLTGSTNGLFRPIGTQPPQQQQQQPSTNLQSNSFYGSSSLTNSSQSSSLFSHGPGQPGSTSLGFGSGNSLGAAIGSALSGFGSSVGSSASSSATRRESLSTSSDLYKRSSSSLAPIGQPFYNSLGFSSSPSPIGMPLPSQTPGHSLTPPPSLSSHGSSSSLHLGGLTNGSGRYISAAPGAEAKYRSASSTSSLFSSSSQLFPPSRLRYNRSDIMPSGRSRLLEDFRNNRFPNLQLRDLIGHIVEFSQDQHGSRFIQQKLERATPAERQMVFNEILQAAYQLMTDVFGNYVIQKFFEFGSLDQKLALATRIRGHVLPLALQMYGCRVIQKALESISSDQQSEMVKELDGHVLKCVKDQNGNHVVQKCIECVQPQSLQFIIDAFKGQVFVLSTHPYGCRVIQRILEHCTAEQTLPILEELHQHTEQLVQDQYGNYVIQHVLEHGRPEDKSKIVSEIRGKVLALSQHKFASNVVEKCVTHASRAERALLIDEVCCQNDGPHSALYTMMKDQYANYVVQKMIDMAEPAQRKIIMHKIRPHITTLRKYTYGKHILAKLEKYYLKNSPDLGPIGGPPNGML

SEQ ID NO: 6094 - protein, 1216 aa, Homo sapiens
MAGAQPGVHALQLKPVCVSDSLKKGTKFVKWDDDSTIVTPIILRTDPQGFFFYWTDQNKETELLDLSLVKDARCGRHAKAPKDPKLRELLDVGNIGRLEQRMITVVYGPDLVNISHLNLVAFQEEVAKEWTNEVFSLATNLLAQNMSRDAFLEKAYTKLKLQVTPEGRIPLKNIYRLFSADRKRVETALEACSLPSSRNDSIPQEDFTPEVYRVFLNNLCPRPEIDNIFSEFGAKSKPYLTVDQMMDFINLKQRDPRLNEILYPPLKQEQVQVLIEKYEPNNSLARKGQISVDGFMRYLSGEENGVVSPEKLDLNEDMSQPLSHYFINSSHNTYLTAGQLAGNSSVEMYRQVLLSGCRCVELDCWKGRTAEEEPVITHGFTMTTEISFKEVIEAIAECAFKTSPFPILLSFENHVDSPKQQAKMAEYCRLIFGDALLMEPLEKYPLESGVPLPSPMDLMYKILVKNKKKSHKSSEGSGKKKLSEQASNTYSDSSSMFEPSSPGAGEADTESDDDDDDDDCKKSSMDEGTAGSEAMATEEMSNLVNYIQPVKFESFEISKKRNKSFEMSSFVETKGLEQLTKSPVEFVEYNKMQLSRIYPKGTRVDSSNYMPQLFWNAGCQMVALNFQTMDLAMQINMGMYEYNGKSGYRLKPEFMRRPDKHFDPFTEGIVDGIVANTLSVKIISGQFLSDKKVGTYVEVDMFGLPVDTRRKAFKTKTSQGNAVNPVWEEEPIVFKKVVLPTLACLRIAVYEEGGKFIGHRILPVQAIRPGYHYICLRNERNQPLTLPAVFVYIEVKDYVPDTYADVIEALSNPIRYVNLMEQRAKQLAALTLEDEEEVKKEADPGETPSEAPSEARTTPAENGVNHTTTLTPKPPSQALHSQPAPGSVKAPAKTEDLIQSVLTEVEAQTIEELKQQKSFVKLQKKHYKEMKDLVKRHHKKTTDLIKEHTTKYNEIQNDYLRRRAALEKSAKKDSKKKSEPSSPDHGSSTIEQDLAALDAEMTQKLIDLKDKQQQQLLNLRQEQYYSEKYQKREHIKLLIQKLTDVAEECQNNQLKKLKEICEKEKKELKKKMDKKRQEKITEAKSKDKSQMEEEKTEMIRSYIQEVVQYIKRLEEAQSKRQEKLVEKHKEIRQQILDEKPKLQVELEQEYQDKFKRLPLEILEFVQEAMKGKISEDSNHGSAPLSLSSDPGKVNHKTPSSEELGGDIPGKEFDTPL

SEQ ID NO: 6095 - protein, 540 aa, Homo sapiens
MRVAAATAAAGAGPAMAVWTRATKAGLVELLLRERWVRVVAELSGESLSLTGDAAAAELEPALGPAAAAFNGLPNGGGAGDSLPGSPSRGLGPPSPPAPPRGPAGEAGASPPVRRVRVVKQEAGGLGISIKGGRENRMPILISKIFPGLAADQSRALRLGDAILSVNGTDLRQATHDQAVQALKRAGKEVLLEVKFIREVTPYIKKPSLVSDLPWEGAAPQSPSFSGSEDSGSPKHQNSTKDRKIIPLKMCFAARNLSMPDLENRLIELHSPDSRNTLILRCKDTATAHSWFVAIHTNIMALLPQVLAELNAMLGATSTAGGSKEVKHIAWLAEQAKLDGGRQQWRPVLMAVTEKDLLLYDCMPWTRDAWASPCHSYPLVATRLVHSGSGCRSPSLGSDLTFATRTGSRQGIEMHLFRVETHRDLSSWTRILVQGCHAAAELIKEVSLGCMLNGQEVRLTIHYENGFTISRENGGSSSILYRYPFERLKMSADDGIRNLYLDFGGPEGELTMDLHSCPKPIVFVLHTFLSAKVTRMGLLV

SEQ ID NO: 6096 - protein, 2355 aa, Homo sapiens
MLRGPGPGLLLLAVQCLGTAVPSTGASKSKRQAQQMVQPQSPVAVSQSKPGCYDNGKHYQINQQWERTYLGNALVCTCYGGSRGFNCESKPEAEETCFDKYTGNTYRVGDTYERPKDSMIWDCTCIGAGRGRISCTIANRCHEGGQSYKIGDTWRRPHETGGYMLECVCLGNGKGEWTCKPIAEKCFDHAAGTSYVVGETWEKPYQGWMMVDCTCLGEGSGRITCTSRNRCNDQDTRTSYRIGDTWSKKDNRGNLLQCICTGNGRGEWKCERHTSVQTTSSGSGPFTDVRAAVYQPQPHPQPPPYGHCVTDSGVVYSVGMQWLKTQGNKQMLCTCLGNGVSCQETAVTQTYGGNSNGEPCVLPFTYNGRTFYSCTTEGRQDGHLWCSTTSNYEQDQKYSFCTDHTVLVQTRGGNSNGALCHFPFLYNNHNYTDCTSEGRRDNMKWCGTTQNYDADQKFGFCPMAAHEEICTTNEGVMYRIGDQWDKQHDMGHMMRCTCVGNGRGEWTCIAYSQLRDQCIVDDITYNVNDTFHKRHEEGHMLNCTCFGQGRGRWKCDPVDQCQDSETGTFYQIGDSWEKYVHGVRYQCYCYGRGIGEWHCQPLQTYPSSSGPVEVFITETPSQPNSHPIQWNAPQPSHISKYILRWRPKNSVGRWKEATIPGHLNSYTIKGLKPGVVYEGQLISIQQYGHQEVTRFDFTTTSTSTPVTSNTVTGETTPFSPLVATSESVTEITASSFVVSWVSASDTVSGFRVEYELSEEGDEPQYLDLPSTATSVNIPDLLPGRKYIVNVYQISEDGEQSLILSTSQTTAPDAPPDTTVDQVDDTSIVVRWSRPQAPITGYRIVYSPSVEGSSTELNLPETANSVTLSDLQPGVQYNITIYAVEENQESTPVVIQQETTGTPRSDTVPSPRDLQFVEVTDVKVTIMWTPPESAVTGYRVDVIPVNLPGEHGQRLPISRNTFAEVTGLSPGVTYYFKVFAVSHGRESKPLTAQQTTKLDAPTNLQFVNETDSTVLVRWTPPRAQITGYRLTVGLTRRGQPRQYNVGPSVSKYPLRNLQPASEYTVSLVAIKGNQESPKATGVFTTLQPGSSIPPYNTEVTETTIVITWTPAPRIGFKLGVRPSQGGEAPREVTSDSGSIVVSGLTPGVEYVYTIQVLRDGQERDAPIVNKVVTPLSPPTNLHLEANPDTGVLTVSWERSTTPDITGYRITTTPTNGQQGNSLEEVVHADQSSCTFDNLSPGLEYNVSVYTVKDDKESVPISDTIIPAVPPPTDLRFTNIGPDTMRVTWAPPPSIDLTNFLVRYSPVKNEEDVAELSISPSDNAVVLTNLLPGTEYVVSVSSVYEQHESTPLRGRQKTGLDSPTGIDFSDITANSFTVHWIAPRATITGYRIRHHPEHFSGRPREDRVPHSRNSITLTNLTPGTEYVVSIVALNGREESPLLIGQQSTVSDVPRDLEVVAATPTSLLISWDAPAVTVRYYRITYGETGGNSPVQEFTVPGSKSTATISGLKPGVDYTITVYAVTGRGDSPASSKPISINYRTEIDKPSQMQVTDVQDNSISVKWLPSSSPVTGYRVTTTPKNGPGPTKTKTAGPDQTEMTIEGLQPTVEYVVSVYAQNPSGESQPLVQTAVTNIDRPKGLAFTDVDVDSIKIAWESPQGQVSRYRVTYSSPEDGIHELFPAPDGEEDTAELQGLRPGSEYTVSVVALHDDMESQPLIGTQSTAIPAPTDLKFTQVTPTSLSAQWTPPNVQLTGYRVRVTPKEKTGPMKEINLAPDSSSVVVSGLMVATKYEVSVYALKDTLTSRPAQGVVTTLENVSPPRRARVTDATETTITISWRTKTETITGFQVDAVPANGQTPIQRTIKPDVRSYTITGLQPGTDYKIYLYTLNDNARSSPVVIDASTAIDAPSNLRFLATTPNSLLVSWQPPRARITGYIIKYEKPGSPPREVVPRPRPGVTEATITGLEPGTEYTIYVIALKNNQKSEPLIGRKKTDELPQLVTLPHPNLHGPEILDVPSTVQKTPFVTHPGYDTGNGIQLPGTSGQQPSVGQQMIFEEHGFRRTTPPTTATPIRHRPRPYPPNVGQEALSQTTISWAPFQDTSEYIISCHPVGTDEEPLQFRVPGTSTSATLTGLTRGATYNVIVEALKDQQRHKVREEVVTVGNSVNEGLNQPTDDSCFDPYTVSHYAVGDEWERMSESGFKLLCQCLGFGSGHFRCDSSRWCHDNGVNYKIGEKWDRQGENGQMMSCTCLGNGKGEFKCDPHEATCYDDGKTYHVGEQWQKEYLGAICSCTCFGGQRGWRCDNCRRPGGEPSPEGTTGQSYNQYSQRYHQRTNTNVNCPIECFMPLDVQADREDSRE

SEQ ID NO: 6097 - protein, 1418 aa, Homo sapiens
MIRLGAPQTLVLLTLLVAAVLRCQGQDVRQPGPKGQKGEPGDIKDIVGPKGPPGPQGPAGEQGPRGDRGDKGEKGAPGPRGRDGEPGTPGNPGPPGPPGPPGPPGLGGNFAAQMAGGFDEKAGGAQLGVMQGPMGPMGPRGPPGPAGAPGPQGFQGNPGEPGEPGVSGPMGPRGPPGPPGKPGDDGEAGKPGKAGERGPPGPQGARGFPGTPGLPGVKGHRGYPGLDGAKGEAGAPGVKGESGSPGENGSPGPMGPRGLPGERGRTGPAGAAGARGNDGQPGPAGPPGPVGPAGGPGFPGAPGAKGEAGPTGARGPEGAQGPRGEPGTPGSPGPAGASGNPGTDGIPGAKGSAGAPGIAGAPGFPGPRGPPGPQGATGPLGPKGQTGEPGIAGFKGEQGPKGEPGPAGPQGAPGPAGEEGKRGARGEPGGVGPIGPPGERGAPGNRGFPGQDGLAGPKGAPGERGPSGLAGPKGANGDPGRPGEPGLPGARGLTGRPGDAGPQGKVGPSGAPGEDGRPGPPGPQGARGQPGVMGFPGPKGANGEPGKAGEKGLPGAPGLRGLPGKDGETGAAGPPGPAGPAGERGEQGAPGPSGFQGLPGPPGPPGEGGKPGDQGVPGEAGAPGLVGPRGERGFPGERGSPGAQGLQGPRGLPGTPGTDGPKGASGPAGPPGAQGPPGLQGMPGERGAAGIAGPKGDRGDVGEKGPEGAPGKDGGRGLTGPIGPPGPAGANGEKGEVGPPGPAGSAGARGAPGERGETGPPGPAGFAGPPGADGQPGAKGEQGEAGQKGDAGAPGPQGPSGAPGPQGPTGVTGPKGARGAQGPPGATGFPGAAGRVGPPGSNGNPGPPGPPGPSGKDGPKGARGDSGPPGRAGEPGLQGPAGPPGEKGEPGDDGPSGAEGPPGPQGLAGQRGIVGLPGQRGERGFPGLPGPSGEPGKQGAPGASGDRGPPGPVGPPGLTGPAGEPGREGSPGADGPPGRDGAAGVKGDRGETGAVGAPGAPGPPGSPGPAGPTGKQGDRGEAGAQGPMGPSGPAGARGIQGPQGPRGDKGEAGEPGERGLKGHRGFTGLQGLPGPPGPSGDQGASGPAGPSGPRGPPGPVGPSGKDGANGIPGPIGPPGPRGRSGETGPAGPPGNPGPPGPPGPPGPGIDMSAFAGLGPREKGPDPLQYMRADQAAGGLRQHDAEVDATLKSLNNQIESIRSPEGSRKNPARTCRDLKLCHPEWKSGDYWIDPNQGCTLDAMKVFCNMETGETCVYPNPANVPKKNWWSSKSKEKKHIWFGETINGGFHFSYGDDNLAPNTANVQMTFLRLLSTEGSQNITYHCKNSIAYLDEAAGNLKKALLIQGSNDVEIRAEGNSRFTYTALKDGCTKHTGKWGKTVIEYRSQKTSRLPIIDIAPMDIGGPEQEFGVDIGPVCFL

SEQ ID NO: 6098 - protein, 1301 aa, Homo sapiens
MTMGDMKTPDFDDLLAAFDIPDMVDPKAAIESGHDDHESHMKQNAHGEDDSHAPSSSDVGVSVIVKNVRNIDSSEGGEKDGHNPTGNGLHNGFLTASSLDSYSKDGAKSLKGDVPASEVTLKDSTFSQFSPISSAEEFDDDEKIEVDDPPDKEDMRSSFRSNVLTGSAPQQDYDKLKALGGENSSKTGLSTSGNVEKNKAVKRETEASSINLSVYEPFKVRKAEDKLKESSDKVLENRVLDGKLSSEKNDTSLPSVAPSKTKSSSKLSSCIAAIAALSAKKAASDSCKEPVANSRESSPLPKEVNDSPRAADKSPESQNLIDGTKKPSLKQPDSPRSISSENSSKGSPSSPAGSTPAIPKVRIKTIKTSSGEIKRTVTRVLPEVDLDSGKKPSEQTASVMASVTSLLSSPASAAVLSSPPRAPLQSAVVTNAVSPAELTPKQVTIKPVATAFLPVSAVKTAGSQVINLKLANNTTVKATVISAASVQSASSAIIKAANAIQQQTVVVPASSLANAKLVPKTVHLANLNLLPQGAQATSELRQVLTKPQQQIKQAIINAAASQPPKKVSRVQVVSSLQSSVVEAFNKVLSSVNPVPVYIPNLSPPANAGITLPTRGYKCLECGDSFALEKSLTQHYDRRSVRIEVTCNHCTKNLVFYNKCSLLSHARGHKEKGVVMQCSHLILKPVPADQMIVSPSSNTSTSTSTLQSPVGAGTHTVTKIQSGITGTVISAPSSTPITPAMPLDEDPSKLCRHSLKCLECNEVFQDETSLATHFQQAADTSGQKTCTICQMLLPNQCSYASHQRIHQHKSPYTCPECGAICRSVHFQTHVTKNCLHYTRRVGFRCVHCNVVYSDVAALKSHIQGSHCEVFYKCPICPMAFKSAPSTHSHAYTQHPGIKIGEPKIIYKCSMCDTVFTLQTLLYRHFDQHIENQKVSVFKCPDCSLLYAQKQLMMDHIKSMHGTLKSIEGPPNLGINLPLSIKPATQNSANQNKEDTKSMNGKEKLEKKSPSPVKKSMETKKVASPGWTCWECDCLFMQRDVYISHVRKEHGKQMKKHPCRQCDKSFSSSHSLCRHNRIKHKGIRKVYACSHCPDSRRTFTKRLMLEKHVQLMHGIKDPDLKEMTDATNEEETEIKEDTKVPSPKRKLEEPVLEFRPPRGAITQPLKKLKINVFKVHKCAVCGFTTENLLQFHEHIPQHKSDGSSYQCRECGLCYTSHVSLSRHLFIVHKLKEPQPVSKQNGAGEDNQQENKPSHEDESPDGAVSDRKCKVCAKTFETEAALNTHMRTHGMAFIKSKRMSSAEK

SEQ ID NO: 6099 - protein, 582 aa, Homo sapiens
MAARSWQDELAQQAEEGSARLREMLSVGLGFLRTELGLDLGLEPKRYPGWVILVGTGALGLLLLFLLGYGWAAACAGARKKRRSPPRKREEAAAVPAAAPDDLALLKNLRSEEQKKKNRKKLSEKPKPNGRTVEVAEGEAVRTPQSVTAKQPPEIDKKNEKSKKNKKKSKSDAKAVQNSSRHDGKEVDEGAWETKISHREKRQQRKRDKVLTDSGSLDSTIPGIENTITVTTEQLTTASFPVGSKKNKGDSHLNVQVSNFKSGKGDSTLQVSSGLNENLTVNGGGWNEKSVKLSSQISAGEEKWNSVSPASAGKRKTEPSAWSQDTGDANTNGKDWGRSWSDRSIFSGIGSTAEPVSQSTTSDYQWDVSRNQPYIDDEWSGLNGLSSADPNSDWNAPAEEWGNWVDEERASLLKSQEPIPDDQKVSDDDKEKGEGALPTGKSKKKKKKKKKQGEDNSTAQDTEELEKEIREDLPVNTSKTRPKQEKAFSLKTISTSDPAEVLVKNSQPIKTLPPATSTEPSVILSKSDSDKSSSQVPPILQETDKSKSNTKQNSVPPSQTKSETSWESPKQIKKKKKARRET

SEQ ID NO: 6100 - protein, 351 aa, Homo sapiens
MEGAALLKIFVVCIWVQQNHPGWTVAGQFQEKKRFTEEVIEYFQKKVSPVHLKILLTSDEAWKRFVRVAELPREEADALYEALKNLTPYVAIEDKDMQQKEQQFREWFLKEFPQIRWKIQESIERLRVIANEIEKVHRGCVIANVVSGSTGILSVIGVMLAPFTAGLSLSITAAGVGLGIASATAGIASSIVENTYTRSAELTASRLTATSTDQLEALRDILRDITPNVLSFALDFDEATKMIANDVHTLRRSKATVGRPLIAWRYVPINVVETLRTRGAPTRIVRKVARNLGKATSGVLVVLDVVNLVQDSLDLHKGAKSESAESLRQWAQELEENLNELTHIHQSLKAG

SEQ ID NO: 6101 - protein, 249 aa, Homo sapiens
MEIKHLLFLVAAACLLPMLSMKKKSARDQFNKLVTDLPNVQEEIVNIHNALRRRVVPPASNMLKMSWSEEAAQNARIFSKYCDMTESNPLERRLPNTFCGENMHMTSYPVSWSSVIGVWYSESTSFKHGEWTTTDDDITTDHYTQIVWATSYLIGCAIASCRQQGSPRYLYVCHYCHEGNDPETKNEPYKTGVPCEACPSNCEDKLCTNPCIYYDEYFDCDIQVHYLGCNHSTTILFCKATCLCDTEIK

SEQ ID NO: 6102 - protein, 824 aa, Homo sapiens
MDEDEKDRAKRASRNKSEKKRRDQFNVLIKELSSMLPGNTRKMDKTTVLEKVIGFLQKHNEVSAQTEICDIQQDWKPSFLSNEEFTQLMLEALDGFIIAVTTDGSIIYVSDSITPLLGHLPSDVMDQNLLNFLPEQEHSEVYKILSSHMLVTDSPSPEYLKSDSDLEFYCHLLRGSLNPKEFPTYEYIKFVGNFRSYNNVPSPSCNGFDNTLSRPCRVPLGKEVCFIATVRLATPQFLKEMCIVDEPLEEFTSRHSLEWKFLFLDHRAPPIIGYLPFEVLGTSGYDYYHIDDLELLARCHQHLMQFGKGKSCCYRFLTKGQQWIWLQTHYYITYHQWNSKPEFIVCTHSVVSYADVRVERRQELALEDPPSEALHSSALKDKGSSLEPRQHFNTLDVGASGLNTSHSPSASSRSSHKSSHTAMSEPTSTPTKLMAEASTPALPRSATLPQELPVPGLSQAATMPAPLPSPSSCDLTQQLLPQTVLQSTPAPMAQFSAQFSMFQTIKDQLEQRTRILQANIRWQQEELHKIQEQLCLVQDSNVQMFLQQPAVSLSFSSTQRPEAQQQLQQRSAAVTQPQLGAGPQLPGQISSAQVTSQHLLRESSVISTQGPKPMRSSQLMQSSGRSGSSLVSPFSSATAALPPSLNLTTPASTSQDASQCQPSPDFSHDRQLRLLLSQPIQPMMPGSCDARQPSEVSRTGRQVKYAQSQTVFQNPDAHPANSSSAPMPVLLMGQAVLHPSFPASQPSPLQPAQARQQPPQHYLQVQAPTSLHSEQQDSLLLSTYSQQPGTLGYPQPPPAQPQPLRPPRRVSSLSESSGLQQPPR

SEQ ID NO: 6103 - protein, 711 aa, Homo sapiens
MESGAVLLESKSSPFNLLHEMHELRLLGHLCDVTVSVEYQGVRKDFMAHKAVLAATSKFFKEVFLNEKSVDGTRTNVYLNEVQVADFASFLEFVYTAKVQVEEDRVQRMLEVAEKLKCLDLSETCFQLKKQMLESVLLELQNFSESQEVEVSSGSQVSAAPAPRASVATDGPHPSGLTDSLDYPGERASNGMSSDLPPKKSKDKLDKKKEVVKPPYPKIRRASGRLAGRKVFVEIPKKKYTRRLREQQKTAEGDVGDYRCPQDQSPDRVGTEMEQVSKNEGCQAGAELEELSKKAGPEEEEEEEEEDEEGEKKKSNFKCSICEKAFLYEKSFLKHSKHRHGVATEVVYRCDTCGQTFANRCNLKSHQRHVHSSERHFPCELCGKKFKRKKDVKRHVLQVHEGGGERHRCGQCGKGLSSKTALRLHERTHTGDRPYGCTECGARFSQPSALKTHMRIHTGEKPFVCDECGARFTQNHMLIYHKRCHTGERPFMCETCGKSFASKEYLKHHNRIHTGSKPFKCEVCFRTFAQRNSLYQHIKVHTGERPYCCDQCGKQFTQLNALQRHRRIHTGERPFMCNACGRTFTDKSTLRRHTSIHDKNTPWKSFLVIVDGSPKNDDGHKTEQPDEEYVSSKLSDKLLSFAENGHFHNLAAVQDTVPTMQENSSADTACKADDSVVSQDTLLATTISELSELTPQTDSMPTQLHSLSNME

SEQ ID NO: 6104 - protein, 1582 aa, Homo sapiens
MGSKRRRATSPSSSVSGDFDDGHHSVSTPGPSRKRRRLSNLPTVDPIAVCHELYNTIRDYKDEQGRLLCELFIRAPKRRNQPDYYEVVSQPIDLMKIQQKLKMEEYDDVNLLTADFQLLFNNAKSYYKPDSPEYKAACKLWDLYLRTRNEFVQKGEADDEDDDEDGQDNQGTVTEGSSPAYLKEILEQLLEAIVVATNPSGRLISELFQKLPSKVQYPDYYAIIKEPIDLKTIAQRIQNGSYKSIHAMAKDIDLLAKNAKTYNEPGSQVFKDANSIKKIFYMKKAEIEHHEMAKSSLRMRTPSNLAAARLTGPSHSKGSLGEERNPTSKYYRNKRAVQGGRLSAITMALQYGSESEEDAALAAARYEEGESEAESITSFMDVSNPFYQLYDTVRSCRNNQGQLIAEPFYHLPSKKKYPDYYQQIKMPISLQQIRTKLKNQEYETLDHLECDLNLMFENAKRYNVPNSAIYKRVLKLQQVMQAKKKELARRDDIEDGDSMISSATSDTGSAKRKSKKNIRKQRMKILFNVVLEAREPGSGRRLCDLFMVKPSKKDYPDYYKIILEPMDLKIIEHNIRNDKYAGEEGMIEDMKLMFRNARHYNEEGSQVYNDAHILEKLLKEKRKELGPLPDDDDMASPKLKLSRKSGISPKKSKYMTPMQQKLNEVYEAVKNYTDKRGRRLSAIFLRLPSRSELPDYYLTIKKPMDMEKIRSHMMANKYQDIDSMVEDFVMMFNNACTYNEPESLIYKDALVLHKVLLETRRDLEGDEDSHVPNVTLLIQELIHNLFVSVMSHQDDEGRCYSDSLAEIPAVDPNFPNKPPLTFDIIRKNVENNRYRRLDLFQEHMFEVLERARRMNRTDSEIYEDAVELQQFFIKIRDELCKNGEILLSPALSYTTKHLHNDVEKERKEKLPKEIEEDKLKREEEKREAEKSEDSSGAAGLSGLHRTYSQDCSFKNSMYHVGDYVYVEPAEANLQPHIVCIERLWEDSAGEKWLYGCWFYRPNETFHLATRKFLEKEVFKSDYYNKVPVSKILGKCVVMFVKEYFKLCPENFRDEDVFVCESRYSAKTKSFKKIKLWTMPISSVRFVPRDVPLPVVRVASVFANADKGDDEKNTDNSEDSRAEDNFNLEKEKEDVPVEMSNGEPGCHYFEQLHYNDMWLKVGDCVFIKSHGLVRPRVGRIEKVWVRDGAAYFYGPIFIHPEETEHEPTKMFYKKEVFLSNLEETCPMTCILGKCAVLSFKDFLSCRPTEIPENDILLCESRYNESDKQMKKFKGLKRFSLSAKVVDDEIYYFRKPIVPQKEPSPLLEKKIQLLEAKFAELEGGDDDIEEMGEEDSEVIEPPSLPQLQTPLASELDLMPYTPPQSTPKSAKGSAKKEGSKRKINMSGYILFSSEMRAVIKAQHPDYSFGELSRLVGTEWRNLETAKKAEYEGVMNQGVAPMVGTPAPGGSPYGQQVGVLGPPGQQAPPPYPGPHPAGPPVIQQPTTPMFVAPPPKTQRLLHSEAYLKYIEGLSAESNSISKWDQTLAARRRDVHLSKEQESRLPSHWLKSKGAHTTMADALWRLRDLMLRDTLNIRQAYNLENV

SEQ ID NO: 6105 - protein, 879 aa, Homo sapiens
MHPSTHFHRDLDEAREENVATFRGSEYLCYDLSQNPIQSSSDEITLSFKTWQRNGLILHTGKSADYVNLALKDGAVSLVINLGSGAFEAIVEPVNGKFNDNAWHDVKVTRNLRQVTISVDGILTTTGYTQEDYTMLGSDDFFYVGGSPSTADLPGSPVSNNFMGCLKEVVYKNNDIRLELSRLARIADTKMKIYGEVVFKCENVATLDPINFETPEAYISLPKWNTKRMGSISFDFRTTEPNGLILFTHGKPQERKDARSQKNTKVDFFAVELLDGNLYLLLDMGSGTIKVKATQKKANDGEWYHVDIQRDGRSGTISVNSRRTPFTASGESEILDLEGDMYLGGLPENRAGLILPTELWTAMLNYGYVGCIRDLFIDGRSKNIRQLAEMQNAAGVKSSCSRMSAKQCDSYPCKNNAVCKDGWNRFICDCTGTGYWGRTCEREASILSYDGSMYMKIIMPMVMHTEAEDVSFRFMSQRAYGLLVATTSRDSADTLRLELDGGRVKLMVNLDCIRINCNSSKGPETLYAGQKLNDNEWHTVRVVRRGKSLKLTVDDDVAEGTMVGDHTRLEFHNIETGIMTEKRYISVVPSSFIGHLQSLMFNGLLYIDLCKNGDIDYCELKARFGLRNIIADPVTFKTKSSYLSLATLQAYTSMHLFFQFKTTSPDGFILFNSGDGNDFIAVELVKGYIHYVFDLGNGPNVIKGNSDRPLNDNQWHNVVITRDNSNTHSLKVDTKVVTQVINGAKNLDLKGDLYMAGLAQGMYSNLPKLVASRDGFQGCLASVDLNGRLPDLINDALHRSGQIERGCEGPSTTCQEDSCANQGVCMQQWEGFTCDCSMTSYSGNQCNDRKYNNLSYWNFVKMFGDLENLKGQYVKGWLF

SEQ ID NO: 6106 - protein, 1723 aa, Homo sapiens
MREKEQEREEQLMEDKKRKKEDKKKKEATQKVTEQKTKVPEVTKPSLSQPTAASPIGSSPSPPVNGGNNAKRVAVPNGQPPSAARYMPREVPPRFRCQQDHKVLLKRGQPPPPSCMLLGGGAGPPPCTAPGANPNNAQVTGALLQSESGTAPDSTLGGAAASNYANSTWGSGASSNNGTSPNPIHIWDKVIVDGSDMEEWPCIASKDTESSSENTTDNNSASNPGSEKSTLPGSTTSNKGKGSQCQSASSGNECNLGVWKSDPKAKSVQSSNSTTENNNGLGNWRNVSGQDRIGPGSGFSNFNPNSNPSAWPALVQEGTSRKGALETDNSNSSAQVSTVGQTSREQQSKMENAGVNFVVSGREQAQIHNTDGPKNGNTNSLNLSSPNPMENKGMPFGMGLGNTSRSTDAPSQSTGDRKTGSVGSWGAARGPSGTDTVSGQSNSGNNGNNGKEREDSWKGASVQKSTGSKNDSWDNNNRSTGGSWNFGPQDSNDNKWGEGNKMTSGVSQGEWKQPTGSDELKIGEWSGPNQPNSSTGAWDNQKGHPLPENQGNAQAPCWGRSSSSTGSEVGGQSTGSNHKAGSSDSHNSGRRSYRPTHPDCQAVLQTLLSRTDLDPRVLSNTGWGQTQIKQDTVWDIEEVPRPEGKSDKGTEGWESAATQTKNSGGWGDAPSQSNQMKSGWGELSASTEWKDPKNTGGWNDYKNNNSSNWGGGRPDEKTPSSWNENPSKDQGWGGGRQPNQGWSSGKNGWGEEVDQTKNSNWESSASKPVSGWGEGGQNEIGTWGNGGNASLASKGGWEDCKRSPAWNETGRQPNSWNKQHQQQQPPQQPPPPQPEASGSWGGPPPPPPGNVRPSNSSWSSGPQPATPKDEEPSGWEEPSPQSISRKMDIDDGTSAWGDPNSYNYKNVNLWDKNSQGGPAPREPNLPTPMTSKSASDSKSMQDGWGESDGPVTGARHPSWEEEEDGGVWNTTGSQGSASSHNSASWGQGGKKQMKCSLKGGNNDSWMNPLAKQFSNMGLLSQTEDNPSSKMDLSVGSLSDKKFDVDKRAMNLGDFNDIMRKDRSGFRPPNSKDMGTTDSGPYFEKGGSHGLFGNSTAQSRGLHTPVQPLNSSPSLRAQVPPQFISPQVSASMLKQFPNSGLSPGLFNVGPQLSPQQIAMLSQLPQIPQFQLACQLLLQQQQQQQLLQNQRKISQAVRQQQEQQLARMVSALQQQQQQQQRQPGMKHSPSHPVGPKPHLDNMVPNALNVGLPDLQTKGPIPGYGSGFSSGGMDYGMVGGKEAGTESRFKQWTSMMEGLPSVATQEANMHKNGAIVAPGKTRGGSPYNQFDIIPGDTLGGHTGPAGDSWLPAKSPPTNKIGSKSSNASWPPEFQPGVPWKGIQNIDPESDPYVTPGSVLGGTATSPIVDTDHQLLRDNTTGSNSSLNTSLPSPGAWPYSASDNSFTNVHSTSAKFPDYKSTWSPDPIGHNPTHLSNKMWKNHISSRNTTPLPRPPPGLTNPKPSSPWSSTAPRSVRGWGTQDSRLASASTWSDGGSVRPSYWLVLHNLTPQIDGSTLRTICMQHGPLLTFHLNLTQGTALIRYSTKQEAAKAQTALHMCVLGNTTILAEFATDDEVSRFLAQAQPPTPAATPSAPAAGWQSLETGQNQSDPVGPALNLFGGSTGLGQWSSSAGGSSGADLAGASLWGPPNYSSSLWGVPTVEDPHRMGSPAPLLPGDLLGGGSDSI

SEQ ID NO: 6107 - protein, 804 aa, Homo sapiens
MNYQQQLANSAAIRAEIQRFESVHPNIYSIYELLERVEEPVLQNQIREHVIAIEDAFVNSQEWTLSRSVPELKVGIVGNLASGKSALVHRYLTGTYVQEESPEGGRFKKEIVVDGQSYLLLIRDEGGPPEAQFAMWVDAVIFVFSLEDEISFQTVYHYYSRMANYRNTSEIPLVLVGTQDAISSANPRVIDDARARKLSNDLKRCTYYETCATYGLNVERVFQDVAQKIVATRKKQQLSIGPCKSLPNSPSHSSVCSAQVSAVHISQTSNGGGSLSDYSSSVPSTPSTSQKELRIDVPPTANTPTPVRKQSKRRSNLFTSRKGSDPDKEKKGLESRADSIGSGRAIPIKQGMLLKRSGKSLNKEWKKKYVTLCDNGVLTYHPSLHDYMQNVHGKEIDLLRTTVKVPGKRPPRATSACAPISSPKTNGLSKDMSSLHISPNSDTGLGDSVCSSPSISSTTSPKLDPPPSPHANRKKHRRKKSTSNFKADGLSGTAEEQEENFEFIIVSLTGQTWHFEATTYEERDAWVQAIESQILASLQSCESSKNKSRLTSQSEAMALQSIRNMRGNSHCVDCETQNPNWASLNLGALMCIECSGIHRNLGTHLSRVRSLDLDDWPVELIKVMSSIGNELANSVWEESSQGRTKPSVDSTREEKERWIRAKYEQKLFLAPLPCTELSLGQHLLRATADEDLRTAILLLAHGSRDEVNETCGEGDGRTALHLACRKGNVVLAQLLIWYGVDVTARDAHGNTALAYARQASSQECIDVLLQYGCPDERFVLMATPNLSRRNNNRNNSSGRVPTII

SEQ ID NO: 6108 - protein, 418 aa, Homo sapiens
MDSSAAPTNASNCTDALAYSSCSPAPSPGSWVNLSHLDGNLSDPCGPNRTDLGGRDSLCPPTGSPSMITAITIMALYSIVCVVGLFGNFLVMYVIVRYTKMKTATNIYIFNLALADALATSTLPFQSVNYLMGTWPFGTILCKIVISIDYYNMFTSIFTLCTMSVDRYIAVCHPVKALDFRTPRNAKIINVCNWILSSAIGLPVMFMATTKYRQGSIDCTLTFSHPTWYWENLLKICVFIFAFIMPVLIITVCYGLMILRLKSVRMLSGSKEKDRNLRRITRMVLVVVAVFIVCWTPIHIYVIIKALVTIPETTFQTVSWHFCIALGYTNSCLNPVLYAFLDENFKRCFREFCIPTSSNIEQQNSTRIRQNTRDHPSTANTVDRTNHQPPLAVSMAQIFTRYPPPTHREKTCNDYMKR

SEQ ID NO: 6109 - protein, 188 aa, Homo sapiens [sequence omitted]

SEQ ID NO: 6110 - protein, 1058 aa, Homo sapiens
MSSSPLSKKRRVSGPDPKPGSNCSPAQSVLSEVPSVPTNGMAKNGSEADIDEGLYSRQLYVLGHEAMKRLQTSSVLVSGLRGLGVEIAKNIILGGVKAVTLHDQGTAQWADLSSQFYLREEDIGKNRAEVSQPRLAELNSYVPVTAYTGPLVEDFLSGFQVVVLTNTPLEDQLRVGEFCHNRGIKLVVADTRGLFGQLFCDFGEEMILTDSNGEQPLSAMVSMVTKDNPGVVTCLDEARHGFESGDFVSFSEVQGMVELNGNQPMEIKVLGPYTFSICDTSNFSDYIRGGIVSQVKVPKKISFKSLVASLAEPDFVVTDFAKFSRPAQLHIGFQALHQFCAQHGRPPRPRNEEDAAELVALAQAVNARALPAVQQNNLDEDLIRKLAYVAAGDLAPINAFIGGLAAQEVMKACSGKFMPIMQWLYFDALECLPEDKEVLTEDKCLQRQNRYDGQVAVFGSDLQEKLGKQKYFLVGAGAIGCELLKNFAMIGLGCGEGGEIIVTDMDTIEKSNLNRQFLFRPWDVTKLKSDTAAAAVRQMNPHIRVTSHQNRVGPDTERIYDDDFFQNLDGVANALDNVDARMYMDRRCVYYRKPLLESGTLGTKGNVQVVIPFLTESYSSSQDPPEKSIPICTLKNFPNAIEHTLQWARDEFEGLFKQPAENVNQYLTDPKFVERTLRLAGTQPLEVLEAVQRSLVLQRPQTWADCVTWACHHWHTQYSNNIRQLLHNFPPDQLTSSGAPFWSGPKRCPHPLTFDVNNPLHLDYVMAAANLFAQTYGLTGSQDRAAVATFLQSVQVPEFTPKSGVKIHVSDQELQSANASVDDSRLEELKATLPSPDKLPGFKMYPIDFEKDDDSNFHMDFIVAASNLRAENYDIPSADRHKSKLIAGKIIPAIATTTAAVVGLVCLELYKVVQGHRQLDSYKNGFLNLALPFFGFSEPLAAPRHQYYNQEWTLWDRFEVQGLQPNGEEMTLKQFLDYFKTEHKLEITMLSQGVSMLYSFFMPAAKLKERLDQPMTEIVSRVSKRKLGRHVRALVLELCCNDESGEDVEVPYVRYTIR

SEQ ID NO: 6111 - protein, 431 aa, Homo sapiens
MPQTPPFSAMFDSSGYNRNLYQSAEDSCGGLYYHDNNLLSGSLEALIQHLVPNVDYYPDNQMRKIAPKILQLLTEWTETFPYDFRDERMMRNLKDLAHRIASGEETYRKNVQQMMQCLIRKLAALSQYEEVLAKISSTSTDRLTVLKTKPQSIQRDIITVCNDPYTLAQQLTHIELERLNYIGPEEFVQAFVQKDPLDNDKSCYSERKKTRNLEAYVEWFNRLSYLVATEICMPVKKKHRARMIEYFIDVARECFNIGNFNSLMAIISGMNMSPVSRLKKTWAKVKTAKFDILEHQMDPSSNFYNYRTALRGAAQRSLTAHSSREKIVIPFFSLLIKDIYFLNEGCANRLPNGHVNFEKFWELAKQVSEFMTWKQVECPFERDRKILQYLLTVPVFSEDALYLASYESEGPENHIEKDRWKSLRSSLLGRV

SEQ ID NO: 6112 - protein, 445 aa, Homo sapiens
MPSETHAMLATLARVAALRRTCLFSGRGGGRGLWTGRPQSDMNNIKPLEGVKILDLTRVLAGPFATMNLGDLGAEVIKVERPGAGDDTRTWGPPFVGTESTYYLSVNRNKKSIAVNIKDPKGVKIIKELAAVCDVFVENYVPGKLSAMGLGYEDIDEIAPHIIYCSITGYGQTGPISQRAGYDAVASAVSGLMHITGPENGDPVRPGVAMTDLATGLYAYGAIMAGLIQKYKTGKGLFIDCNLLSSQVACLSHIAANYLIGQKEAKRWGTAHGSIVPYQAFKTKDGYIVVGAGNNQQFATVCKILDLPELIDNSKYKTNHLRVHNRKELIKILSERFEEELTSKWLYLFEGSGVPYGPINNMKNVFAEPQVLHNGLVMEMEHPTVGKISVPGPAVRYSKFKMSEARPPPLLGQHTTHILKEVLRYDDRAIGELLSAGVVDQHETH

SEQ ID NO: 6113 - protein, 1005 aa, Homo sapiens
MTTEVGSVSEVKKDSSQLGTDATKEKPKEVAENQQNQSSDPEEEKGSQPPPAAESQSSLRRQKREKETSESRGISRFIPPWLKKQKSYTLVVAKDGGDKKEPTQAVVEEQVLDKEEPLPEEQRQAKGDAEEMAQKKQEIKVEVKEEKPSVSKEEKPSVSKVEMQPTELVSKEREEKVKETQEDKLEGGAAKRETKEVQTNELKAEKASQKVTKKTKTVQCKVTLLDGTEYSCDLEKHAKGQVLFDKVCEHLNLLEKDYFGLLFQESPEQKNWLDPAKEIKRQLRNLPWLFTFNVKFYPPDPSQLTEDITRYFLCLQLRQDIASGRLPCSFVTHALLGSYTLQAELGDYDPEEHGSIDLSEFQFAPTQTKELEEKVAELHKTHRGLSPAQADSQFLENAKRLSMYGVDLHHAKDSEGVDIKLGVCANGLLIYKDRLRINRFAWPKILKISYKRSNFYIKVRPAELEQFESTIGFKLPNHRAAKRLWKVCVEHHTFYRLVSPEQPPKAKFLTLGSKFRYSGRTQAQTRQASTLIDRPAPHFERTSSKRVSRSLDGAPIGVMDQSLMKDFPGAAGEISAYGPGLVSIAVVQDGDGRREVRSPTKAPHLQLIEGKKNSLRVEGDNIYVRHSNLMLEELDKAQEDILKHQASISELKRNFMESTPEPRPNEWEKRRITPLSLQTQGSSHETLNIVEEKKRAEVGKDERVITEEMNGKEISPGSGPGEIRKVEPVTQKDSTSLSSESSSSSSESEEEDVGEYRPHHRVTEGTIREEQEYEEEVEEEPRPAAKVVEREEAVPEASPVTQAGASVITVETVIQENVGAQKIPGEKSVHEGALKQDMGEEAEEEPQKVNGEVSHVDIDVLPQIICCSEPPVVKTEMVTISDASQRTEISTKEVPIVQTETKTITYESPQIDGGAGGDSGTLLTAQTITSESVSTTTTTHITKTVKGGISETRIEKRIVITGDGDIDHDQALAQAIREAREQHPDMSVTRVVVHKETELAEEGED

SEQ ID NO: 6114 - protein, 1447 aa, Homo sapiens
MFRAGEASKRPLPGPSPPRVRSVEVARGRAGYGFTLSGQAPCVLSCVMRGSPADFVGLRAGDQILAVNEINVKKASHEDVVKLIGKCSGVLHMVIAEGVGRFESCSSDEEGGLYEGKGWLKPKLDSKALGINRAERVVEEMQSGGIFNMIFENPSLCASNSEPLKLKQRSLSESAATRFDVGHESINNPNPNMLSKEEISKVIHDDSVFSIGLESHDDFALDASILNVAMIVGYLGSIELPSTSSNLESDSLQAIRGCMRRLRAEQKIHSLVTMKIMHDCVQLSTDKAGVVAEYPAEKLAFSAVCPDDRRFFGLVTMQTNDDGSLAQEEEGALRTSCHVFMVDPDLFNHKIHQGIARRFGFECTADPDTNGCLEFPASSLPVLQFISVLYRDMGELIEGMRARAFLDGDADAHQNNSTSSNSDSGIGNFHQEEKSNRVLVVDLGGSSSRHGPGGSAWDGVGGRGAQPWGAPWTGPFCPDPEGSPPFEAAHQTDRFWDLNKHLGPASPVEVPPASLRSSVPPSKRGTVGAGCGFNQRWLPVHVLREWQCGHTSDQDSYTDSTDGWSSINCGTLPPPMSKIPADRYRVEGSFAQPPLNAPKREWSRKAFGMQSIFGPHRNVRKTKEDKKGSKFGRGTGLTQPSQRTSARRSFGRSKRFSITRSLDDLESATVSDGELTGADLKDCVSNNSLSSNASLPSVQSCRRLRERRVASWAVSFERLLQDPVGVRYFSDFLRKEFSEENILFWQACEYFNHVPAHDKKELSYRAREIFSKFLCSKATTPVNIDSQAQLADDVLRAPHPDMFKEQQLQIFNLMKFDSYTRFLKSPLYQECILAEVEGRALPDSQQVPSSPASKHSLGSDHSSVSTPKKLSGKSKSGRSLNEELGDEDSEKKRKGAFFSWSRTRSTGRSQKKREHGDHADDALHANGGLCRRESQGSVSSAGSLDLSEACRTLAPEKDKATKHCCIHLPDGTSCVVAVKAGFSIKDILSGLCERHGINGAAADLFLVGGDKPLVLHQDSSILESRDLRLEKRTLFRLDLVPINRSVGLKAKPTKPVTEVLRPVVARYGLDLSGLLVRLSGEKEPLDLGAPISSLDGQRVVLEEKDPSRGKASADKQKGVPVKQNTAVNSSSRNHSATGEERTLGKSNSIKIKGENGKNARDPRLSKREESIAKIGKKKYQKINLDEAEEFFELISKAQSNRADDQRGLLRKEDLVLPEFLRLPPGSTELTLPTPAAVAKGFSKRSATGNGRESASQPGEQWEPVQESSDSPSTSPGSASSPPGPPGTTPPGQKSPSGPFCTPQSPVSLAQEGTAQIWKRQSQEVEAGGIQTVEDEHVAELTLMGEGDISSPNSTLLPPPSTPQEVPGPSRPGSGTHGSRDLPVNRIIDVDLVTGSAPGRDGGIAGAQAGPGRSQASGGPPTSDLPGLGPVPGEPAKPKTSAHHATFV

SEQ ID NO: 6115 - protein, 1278 aa, Homo sapiens
MRTGSAASSAAAAAAAAAASASPATGVCMKTPGGGRRGIRRDPGAEPGAAALRGPRQRPILSRLTNNSRIVGLLAQLEKINAEPSESDTARYVTSKILHLAQSQEKTRREMTAKGSTGMEILLSTLENTKDLQTTLNILSILVELVSAGGGRRVSFLVTKGGSQILLQLLMNASKESPPHEDLMVQIHSILAKIGPKDKKFGVKARINGALNITLNLVKQNLQNHRLVLPCLQLLRVYSANSVNSVSLGKNGVVELMFKIIGPFSKKNSSLIKVALDTLAALLKSKTNARRAVDRGYVQVLLTIYVDWHRHDNRHRNMLIRKGILQSLKSVTNIKLGRKAFIDANGMKILYNTSQECLAVRTLDPLVNTSSLIMRKCFPKNRLPLPTIKSSFHFQLPVIPVTGPVAQLYSLPPEVDDVVDESDDNDDIDVEAENETENEDDLDQNFKNDDIETDINKLKPQQEPGRTIEDLKMYEHLFPELVDDFQDYDLISKEPKPFVFEGKVRGPIVVPTAGEETSGNSGNLRKVVMKENISSKGDEGEKKSTFMDLAKEDIKDNDRTLQQQPGDQNRTISSVHGLNNDIVKALDRITLQNIPSQTAPGFTAEMKKDCSLPLTVLTCAKACPHMATCGNVLFEGRTVQLGKLCCTGVETEDDEDTESNSSVEQASVEVPDGPTLHDPDLYIEIVKNTKSVPEYSEVAYPDYFGHIPPPFKEPILERPYGVQRTKIAQDIERLIHQSDIIDRVVYDLDNPNYTIPEEGDILKFNSKFESGNLRKVIQIRKNEYDLILNSDINSNHYHQWFYFEVSGMRPGVAYRFNIINCEKSNSQFNYGMQPLMYSVQEALNARPWWIRMGTDICYYKNHFSRSSVAAGGQKGKSYYTITFTVNFPHKDDVCYFAYHYPYTYSTLQMHLQKLESAHNPQQIYFRKDVLCETLSGNSCPLVTITAMPESNYYEHICHFRNRPYVFLSARVHPGETNASWVMKGTLEYLMSNNPTAQSLRESYIFKIVPMLNPDGVINGNHRCSLSGEDLNRQWQSPSPDLHPTIYHAKGLLQYLAAVKRLPLVYCDYHGHSRKKNVFMYGCSIKETVWHTNDNATSCDVVEDTGYRTLPKILSHIAPAFCMSSCSFVVEKSKESTARVVVWREIGVQRSYTMESTLCGCDQGKYKGLQIGTRELEEMGAKFCVGLLRLKRLTSPLEYNLPSSLLDFENDLIESSCKVTSPTTYVLDEDEPRFLEEVDYSAESNDELDIELAENVGDYEPSAQEEVLSDSELSRTYLP

SEQ ID NO: 6116 - protein, 1204 aa, Homo sapiens
MYVTMMMTDQIPLELPPLLNGEVAMMPHLVNGDAAQQVILVQVNPGETFTIRAEDGTLQCIQGPAEVPMMSPNGSIPPIHVPPGYISQVIEDSTGVRRVVVTPQSPECYPPSYPSAMSPTHHLPPYLTHHPHFIHNSHTAYYPPVTGPGDMPPQFFPQHHLPHTIYGEQEIIPFYGMSTYITREDQYSKPPHKKLKDRQIDRQNRLNSPPSSIYKSSCTTVYNGYGKGHSGGSGGGGSGSGPGIKKTERRARSSPKSNDSDLQEYELEVKRVQDILSGIEKPQVSNIQARAVVLSWAPPVGLSCGPHSGLSFPYSYEVALSDKGRDGKYKIIYSGEELECNLKDLRPATDYHVRVYAMYNSVKGSCSEPVSFTTHSCAPECPFPPKLAHRSKSSLTLQWKAPIDNGSKITNYLLEWDEGKRNSGFRQCFFGSQKHCKLTKLCPAMGYTFRLAARNDIGTSGYSQEVVCYTLGNIPQMPSAPRLVRAGITWVTLQWSKPEGCSPEEVITYTLEIQEDENDNLFHPKYTGEDLTCTVKNLKRSTQYKFRLTASNTEGKSCPSEVLVCTTSPDRPGPPTRPLVKGPVTSHGFSVKWDPPKDNGGSEILKYLLEITDGNSEANQWEVAYSGSATEYTFTHLKPGTLYKLRACCISTGGHSQCSESLPVRTLSIAPGQCRPPRVLGRPKHKEVHLEWDVPASESGCEVSEYSVEMTEPEDVASEVYHGPELECTVGNLLPGTVYRFRVRALNDGGYGPYSDVSEITTAAGPPGQCKAPCISCTPDGCVLVGWESPDSSGADISEYRLEWGEDEESLELIYHGTDTRFEIRDLLPAAQYCCRLQAFNQAGAGPYSELVLCQTPASAPDPVSTLCVLEEEPLDAYPDSPSACLVLNWEEPCNNGSEILAYTIDLGDTSITVGNTTMHVMKDLLPETTYRIRIQAINEIGAGPFSQFIKAKTRPLPPLPPRLECAAAGPQSLKLKWGDSNSKTHAAEDIVYTLQLEDRNKRFISIYRGPSHTYKVQRLTEFTCYSFRIQAASEAGEGPFSETYTFSTTKSVPPTIKAPRVTQLEGNSCEILWETVPSMKGDPVNYILQVLVGRESEYKQVYKGEEATFQISGLQTNTDYRFRVCACRRCLDTSQELSGAFSPSAAFVLQRSEVMLTGDMGSLDDPKMKSMMPTDEQFAAIIVLGFATLSILFAFILQYFLMK

SEQ ID NO: 6117 - protein, 301 aa, Homo sapiens
MEDMNEYSNIEEFAEGSKINASKNQQDDGKMFIGGLSWDTSKKDLTEYLSRFGEVVDCTIKTDPVTGRSRGFGFVLFKDAASVDKVLELKEHKLDGKLIDPKRAKALKGKEPPKKVFVGGLSPDTSEEQIKEYFGAFGEIENIELPMDTKTNERRGFCFITYTDEEPVKKLLESRYHQIGSGKCEIKVAQPKEVYRQQQQQQKGGRGAAAGGRGGTRGRGRGQGQNWNQGFNNYYDQGYGNYNSAYGGDQNYSGYGGYDYTGYNYGNYGYGQGYADYSGQQSTYGKASRGGGNHQNNYQPY

SEQ ID NO: 6118 - protein, 454 aa, Homo sapiens
MYNTVWNMEDLDLEYAKTDINCGTDLMFYIEMDPPALPPKPPKPTTVANNGMNNNMSLQDAEWYWGDISREEVNEKLRDTADGTFLVRDASTKMHGDYTLTLRKGGNNKLIKIFHRDGKYGFSDPLTFSSVVELINHYRNESLAQYNPKLDVKLLYPVSKYQQDQVVKEDNIEAVGKKLHEYNTQFQEKSREYDRLYEEYTRTSQEIQMKRTAIEAFNETIKIFEEQCQTQERYSKEYIEKFKREGNEKEIQRIMHNYDKLKSRISEIIDSRRRLEEDLKKQAAEYREIDKRMNSIKPDLIQLRKTRDQYLMWLTQKGVRQKKLNEWLGNENTEDQYSLVEDDEDLPHHDEKTWNVGSSNRNKAENLLRGKRDGTFLVRESSKQGCYACSVVVDGEVKHCVINKTATGYGFAEPYNLYSSLKELVLHYQHTSLVQHNDSLNVTLAYPVYAQQRR

SEQ ID NO: 6119 - protein, 297 aa, Homo sapiens
MFSRAGVAGLSAWTLQPQWIQVRNMATLKDITRRLKSIKNIQKITKSMKMVAAAKYARAERELKPARIYGLGSLALYEKADIKGPEDKKKHLLIGVSSDRGLCGAIHSSIAKQMKSEVATLTAAGKEVMLVGIGDKIRGILYRTHSDQFLVAFKEVGRKPPTFGDASVIALELLNSGYEFDEGSIIFNKFRSVISYKTEEKPIFSLNTVASADSMSIYDDIDADVLQNYQEYNLANIIYYSLKESTTSEQSARMTAMDNASKNASEMIDKLTLTFNRTRQAVITKELIEIISGAAAL

SEQ ID NO: 6120 - protein, 495 aa, Homo sapiens
MAESAPARHRRKRRSTPLTSSTLPSQATEKSSYFQTTEISLWTVVAAIQAVEKKMESQAARLQSLEGRTGTAEKKLADCEKMAVEFGNQLEGKWAVLGTLLQEYGLLQRRLENVENLLRNRNFWILRLPPGSKGEAPKVSRSLENDGVCFTEQEWENLEDWQKELYRNVMESNYETLVSLKVLGQTEGEAELGTEMLGDLEEEGPGGAHPAGGVMIKQELQYTQEGPADLPGEFSCIAEEQAFLSPEQTELWGGQGSSVLLETGPGDSTLEEPVGSRVPSSSRTVGCPKQKSHRQVQLDQECGQGLKLKKDTSRPYECSECEITFRYKQQLATHLRSHSGWGSCTPEEPEESLRPRPRLKPQTKKAKLHQCDVCLRSFSCKVSLVTHQRCHLQEGPSAGQHVQERFSPNSLVALPGHIPWRKSRSSLICGYCGKSFSHPSDLVRHQRIHTGERPYSCTECEKSFVQKQHLLQHQKIHQRERGGLALEPGRPNGLL

SEQ ID NO: 6121 - protein, 582 aa, Homo sapiens
MMKLRHKNKKPGEGSKGHKKISWPYPQPAKQNGKKATSKVPSAPHFVHPNDHANREAELKKKWVEEMREKQQAAREQERQKRRTIESYCQDVLRRQEEFEHKEEVLQELNMFPQLDDEATRKAYYKEFRKVVEYSDVILEVLDARDPLGCRCFQMEEAVLRAQGNKKLVLVLNKIDLVPKEVVEKWLDYLRNELPTVAFKASTQHQVKNLNRCSVPVDQASESLLKSKACFGAENLMRVLGNYCRLGEVRTHIRVGVVGLPNVGKSSLINSLKRSRACSVGAVPGITKFMQEVYLDKFIRLLDAPGIVPGPNSEVGTILRNCVHVQKLADPVTPVETILQRCNLEEISNYYGVSGFQTTEHFLTAVAHRLGKKKKGGLYSQEQAAKAVLADWVSGKISFYIPPPATHTLPTHLSAEIVKEMTEVFDIEDTEQANEDTMECLATGESDELLGDTDPLEMEIKLLHSPMTKIADAIENKTTVYKIGDLTGYCTNPNRHQMGWAKRNVDHRPKSNSMVDVCSVDRRSVLQRIMETDPLQQGQALASALKNKKKMQKRADKIASKLSDSMMSALDLSGNADDGVGD

SEQ ID NO: 6122 - protein, 275 aa, Homo sapiens
MWPLTALLLLVPSSGQAATLEKPILSLHPPWTTIFKGERVTLKCDGYHPLLLELQPISTLWYLGHLLLPSHKKSIEVQTPGVYRCQTRGAPVSDPIHLSVSNDWLILQVPYAPVFEGEPLVLRCRGWYDKVVYKLHYYHDGQAVRYFHSSANYTVLQARASDSGRYQCSGTMRIPVESAPMFSAKVAVTVQEARHAAAVRVLQVQPRGAPLRLGRRVHSPGARGRGARIVLVRGGYRHPQCPETQSVAAAPGAGFSPGPGLHHRPSSMGRSLGSW

SEQ ID NO: 6123 - protein, 445 aa, Homo sapiens
MALVDKHKVKRQRLDRICEGIRPQIMNGPLHPRPLVALLDGRDCTVEMPILKDLATVAFCDAQSTQEIHEKVLNEAVGAMMYHTITLTREDLEKFKALRVIVRIGSGYDNVDIKAAGELGIAVCNIPSAAVEETADSTICHILNLYRRNTWLYQALREGTRVQSVEQIREVASGAARIRGETLGLIGFGRTGQAVAVRAKAFGFSVIFYDPYLQDGIERSLGVQRVYTLQDLLYQSDCVSLHCNLNEHNHHLINDFTIKQMRQGAFLVNAARGGLVDEKALAQALKEGRIRGAALDVHESEPFSFAQGPLKDAPNLICTPHTAWYSEQASLEMREAAATEIRRAITGRIPESLRNCVNKEFFVTSAPWSVIDQQAIHPELNGATYRYPPGIVGVAPGGLPAAMEGIIPGGIPVTHNLPTVAHPSQAPSPNQPTKHGDNREHPNEQ

SEQ ID NO: 6124 - protein, 420 aa, Homo sapiens
MTMEKGMSSGEGLPSRSSQVSAGKITAKELETKQSYKEKRGGFVLVHAGAGYHSESKAKEYKHVCKRACQKAIEKLQAGALATDAVTAALVELEDSPFTNAGMGSNLNLLGEIECDASIMDGKSLNFGAVGALSGIKNPVSVANRLLCEGQKGKLSAGRIPPCFLVGEGAYRWAVDHGIPSCPPNIMTTRFSLAAFKRNKRKLELAERVDTDFMQLKKRRQSSEKENDSGTLDTVGAVVVDHEGNVAAAVSSGGLALKHPGRVGQAALYGCGCWAENTGAHNPYSTAVSTSGCGEHLVRTILARECSHALQAEDAHQALLETMQNKFISSPFLASEDGVLGGVIVLRSCRCSAEPDSSQNKQTLLVEFLWSHTTESMCVGYMSAQDGKAKTHISRLPPGAVAGQSVAIEGGVCRLESPVN

SEQ ID NO: 6125 - protein, 1566 aa, Homo sapiens
MTADKDKDKDKEKDRDRDRDREREKRDKARESENSRPRRSCTLEGGAKNYAESDHSEDEDNDNNSATAEESTKKNKKKPPKKKSRYERTDTGEITSYITEDDVVYRPGDCVYIESRRPNTPYFICSIQDFKLVHNSQACCRSPTPALCDPPACSLPVASQPPQHLSEAGRGPVGSKRDHLLMNVKWYYRQSEVPDSVYQHLVQDRHNENDSGRELVITDPVIKNRELFISDYVDTYHAAALRGKCNISHFSDIFAAREFKARVDSFFYILGYNPETRRLNSTQGEIRVGPSHQAKLPDLQPFPSPDGDTVTQHEELVWMPGVNDCDLLMYLRAARSMAAFAGMCDGGSTEDGCVAASRDDTTLNALNTLHESGYDAGKALQRLVKKPVPKLIEKCWTEDEVKRFVKGLRQYGKNFFRIRKELLPNKETGELITFYYYWKKTPEAASSRAHRRHRRQAVFRRIKTRTASTPVNTPSRPPSSEFLDLSSASEDDFDSEDSEQELKGYACRHCFTTTSKDWHHGGRENILLCTDCRIHFKKYGELPPIEKPVDPPPFMFKPVKEEDDGLSGKHSMRTRRSRGSMSTLRSGRKKQPASPDGRTSPINEDIRSSGRNSPSAASTSSNDSKAETVKKSAKKVKEEASSPLKSNKRQREKVASDTEEADRTSSKKTKTQEISRPNSPSEGEGESSDSRSVNDEGSSDPKDIDQDNRSTSPSIPSPQDNESDSDSSAQQQMLQAQPPALQAPTGVTPAPSSAPPGTPQLPTPGPTPSATAVPPQGSPTASQAPNQPQAPTAPVPHTHIQQAPALHPQRPPSPHPPPHPSPHPPLQPLTGSAGQPSAPSHAQPPLHGQGPPGPHSLQAGPLLQHPGPPQPFGLPPQASQGQAPLGTSPAAAYPHTSLQLPASQSALQSQQPPREQPLPPAPLAMPHIKPPPTTPIPQLPAPQAHKHPPHLSGPSPFSMNANLPPPPALKPLSSLSTHHPPSAHPPPLQLMPQSQPLPSSPAQPPGLTQSQNLPPPPASHPPTGLHQVAPQPPFAQHPFVPGGPPPITPPTCPSTSTPPAGPGTSAQPPCSGAAASGGSIAGGSSCPLPTVQIKEEALDDAEEPESPPPPPRSPSPEPTVVDTPSHASQSARFYKHLDRGYNSCARTDLYFMPLAGSKLAKKREEAIEKAKREAEQKAREEREREKEKEKEREREREREREAERAAKASSSAHEGRLSDPQLSGPGHMRPSFEPPPTTIAAVPPYIGPDTPALRTLSEYARPHVMSPTNRNHPFYMPLNPTDPLLAYHMPGLYNVDPTIRERELREREIREREIRERELRERMKPGFEVKPPELDPLHPAANPMEHFARHSALTIPPTAGPHPFASFHPGLNPLERERLALAGPQLRPEMSYPDRLAAERIHAERMASLTSDPLARLQMFNVTPHHHQHSHIHSHLHLHQQDPLHQGSAGPVHPLVDPLTAGPHLARFPYPPGTLPNPLLGQPPHEHEMLRHPVFGTPYPRDLPGAIPPPMSAAHQLQAMHAQSAELQRLAMEQQWLHGHPHMHGGHLPSQEDYYSRLKKEGDKQL

SEQ ID NO: 6126 - protein, 696 aa, Homo sapiens
MESEYVLCNWKDQLWPAKVLSRSETSSNSKRKKAFSLEVQILSLDEKIKLDSTETKILNKSQIEAIAASLGLQSEDSAPPTEETAYGRSLKVALGILNERTNLSQASTSDEEEITMLSQNVPQKQSDSPPHKKYRKDEGDLPGCLEERENSACLLASSESDDSLYDDKSQAPTMVDTIPSEVETKSLQNSSWCETFPSLSEDNDEKENKNKIDISAVMSVHSAVKEESACVKDEKFAPPLSPLSSDMLIMPKALKEESEDTCLETLAVPSECSAFSENIEDPGEGPSNPCLDTSQNQPSMESEMGAAACPGSCSRECEVSFSASNPVWDYSHLMSSERNFQRLDFEELEEEGQASDKSLLPSRINLSLLDDDEEDEELPRFILHYETHPFETGMIVWFKYQKYPFWPAVIKSIRRKERKASVLFVEANMNSEKKGIRVNFRRLKKFDCKEKQMLVDKAREDYSESIDWCISLICDYRVRIGCGSFTGSLLEYYAADISYPVRKETKQDTFRNKFPKLHNEDAREPMAVTSQTKKMSFQKILPDRMKAARDRANKNLVDFIVNAKGTENHLLAIVNGTKGSRWLKSFLNANRFTPCIETYFEDEDQLDEVVKYLQEVCNQIDQIMPTWIKDDKIKFILEVLLPEAIICSISAVDGLDYEAAEAKYLKGPCLGYRERELFDAKIIYEKRRKAPTNEAH

SEQ ID NO: 6127 - protein, 339 aa, Homo sapiens
MAAERQEALREFVAVTGAEEDRARFFLESAGWDLQIALASFYEDGGDEDIVTISQATPSSVSRGTAPSDNRVTSFRDLIHDQDEDEEEEEGQRFYAGGSERSGQQIVGPPRKKSPNELVDDLFKGAKEHGAVAVERVTKSPGETSKPRVHVVLKLWKSGFSLDNGELRSYQDPSNAQFLESIRRGEVPAELRRLAHGGQVNLDMEDHRDEDFVKPKGAFKAFTGEGQKLGSTAPQVLSTSSPAQQAENEAKASSSILIDESEPTTNIQIRLADGGRLVQKFNHSHRISDIRLFIVDARPAMAATSFILMTTFPNKELADESQTLKEANLLNAVIVQRLT

SEQ ID NO: 6128 - protein, 239 aa, Homo sapiens [sequence omitted]

SEQ ID NO: 6129 - protein, 696 aa, Homo sapiens
MDADMDYERPNVETIKCVVVGDNAVGKTRLICARACNTTLTQYQLLATHVPTVWAIDQYRVCQEVLERSRDVVDEVSVSLRLWDTFGDHHKDRRFAYGRSDVVVLCFSIANPNSLNHVKSMWYPEIKHFCPRTPVILVGCQLDLRYADLEAVNRARRPLARPIKRGDILPPEKGREVAKELGLPYYETSVFDQFGIKDVFDNAIRAALISRRHLQFWKSHLKKVQKPLLQAPFLPPKAPPPVIKIPECPSMGTNEAACLLDNPLCADVLFILQDQEHIFAHRIYLATSSSKFYDLFLMECEESPNGSEGACEKEKQSRDFQGRILSVDPEEEREEGPPRIPQADQWKSSNKSLVEALGLEAEGAVPETQTLTGWSKGFIGMHREMQVNPISKRMGPMTVVRMDASVQPGPFRTLLQFLYTGQLDEKEKDLVGLAQIAEVLEMFDLRMMVENIMNKEAFMNQEITKAFHVRKANRIKECLSKGTFSDVTFKLDDGAISAHKPLLICSCEWMAAMFGGSFVESANSEVYLPNINKISMQAVLDYLYTKQLSPNLDLDPLELIALANRFCLPHLVALAEQHAVQELTKAATSGVGIDGEVLSYLELAQFHNAHQLAAWCLHHICTNYNSVCSKFRKEIKSKSADNQEYFERHRWPPVWYLKEEDHYQRVKREREKEDIALNKHRSRRKWCFWNSSPAVA

SEQ ID NO: 6130 - protein, 508 aa, Homo sapiens
MSRFVQDLSKAMSQDGASQFQEVIRQELELSVKKELEKILTTASSHEFEHTKKDLDGFRKLFHRFLQEKGPSVDWGKIQRPPEDSIQPYEKIKARGLPDNISSVLNKLVVVKLNGGLGTSMGCKGPKSLIGVRNENTFLDLTVQQIEHLNKTYNTDVPLVLMNSFNTDEDTKKILQKYNHCRVKIYTFNQSRYPRINKESLLPVAKDVSYSGENTEAWYPPGHGDIYASFYNSGLLDTFIGEGKEYIFVSNIDNLGATVDLYILNHLMNPPNGKRCEFVMEVTNKTRADVKGGTLTQYEGKLRLVEIAQVPKAHVDEFKSVSKFKIFNTNNLWISLAAVKRLQEQNAIDMEIIVNAKTLDGGLNVIQLETAVGAAIKSFENSLGINVPRSRFLPVKTTSDLLLVMSNLYSLNAGSLTMSEKREFPTVPLVKLGSSFTKVQDYLRRFESIPDMLELDHLTVSGDVTFGKNVSLKGTVIIIANHGDRIDIPPGAVLENKIVSGNLRILDH

SEQ ID NO: 6131 - protein, 1075 aa, Homo sapiens
MLKPQPLQQPSQPQQPPPTQQAVARRPPGGTSPPNGGLPGPLATSAAPPGPPAAASPCLGPVAAAGSGLRRGAEGILAPQPPPPQQHQERPGAAAIGSARGQSTGKGPPQSPVFEGVYNNSRMLHFLTAVVGSTCDVKVKNGTTYEGIFKTLSSKFELAVDAVHRKASEPAGGPRREDIVDTMVFKPSDVMLVHFRNVDFNYATKDKFTDSAIAMNSKVNGEHKEKVLQRWEGGDSNSDDYDLESDMSNGWDPNEMFKFNEENYGVKTTYDSSLSSYTVPLEKDNSEEFRQRELRAAQLAREIESSPQYRLRIAMENDDGRTEEEKHSAVQRQGSGRESPSLASREGKYIPLPQRVREGPRGGVRCSSSRGGRPGLSSLPPRGPHHLDNSSPGPGSEARGINGGPSRMSPKAQRPLRGAKTLSSPSNRPSGETSVPPPPAVGRMYPPRSPKSAAPAPISASCPEPPIGSAVPTSSASIPVTSSVSDPGVGSISPASPKISLAPTDVKELSTKEPGRTLEPQELARIAGKVPGLQNEQKRFQLEELRKFGAQFKLQPSSSPENSLDPFPPRILKEEPKGKEKEVDGLLTSEPMGSPVSSKTESVSDKEDKPPLAPSGGTEGPEQPPPPCPSQTGSPPVGLIKGEDKDEGPVAEQVKKSTLNPNAKEFNPTKPLLSVNKSTSTPTSPGPRTHSTPSIPVLTAGQSGLYSPQYISYIPQIHMGPAVQAPQMYPYPVSNSVPGQQGKYRGAKGSLPPQRSDQHQPASAPPMMQAAAAAGPPLVAATPYSSYIPYNPQQFPGQPAMMQPMAHYPSQPVFAPMLQSNPRMLTSGSHPQAIVSSSTPQYPSAEQPTPQALYATVHQSYPHHATQLHAHQPQPATTPTGSQPQSQHAAPSPVQHQAGQAPHLGSGQPQQNLYHPGALTGTPPSLPPGPSAQSPQSSFPQPAAVYAIHHQQLPHGFTNMAHVTQAHVQTGITAAPPPHPGAPHPPQVMLLHPPQSHGGPPQGAVPQSGVPALSASTPSPYPYIGHPQGEQPGQAPGFPGGADDRIREFSLAGGIWHGRAEGLQVGQDARVLGGE

SEQ ID NO: 6132 - protein, 721 aa, Homo sapiens
MGTPASGRKRTPVKDRFSAEDEALSNIAREAEARLAAKRAARAEARDIRMRELERQQKEYSLHSFDRKWGQIQKWLEDSERARYSHRSSHHRPYLGVEDALSIRSVGSHRYDMFKDRSSRLSSLNHSYSHSHGMKKRSSDSHKDLLSGLYFDQRNYSSLRHSKPTSAYYTRQSSSLYSDPLATYKSDRASPTANSGLLRSASLASLYNGGLYNPYGPRTPSECSYYSSRISSARSSPGFTNDDTASIVSSDRASRGRRESVVSAADYFSRSNRRGSVVSEVDDISIPDLSSLDEKSDKQYAENYTRPSSRNSASATTPLSGNSSRRGSGDTSSLIDPDTSLSELRDIYDLKDQIQDVEGRYMQGLKELKESLSEVEEKYKKAMVSNAQLDNEKNNLIYQVDTLKDVIEEQEEQMAEFYRENEEKSKELERQKHMCSVLQHKMEELKEGLRQRDELIEEKQRMQQKIDTMTKEVFDLQETLLWKDKKIGALEKQKEYIACLRNERDMLREELADLQETVKTGEKHGLVIIPDGTPNGDVSHEPVAGAITVVSQEAAQVLESAGEGPLDVRLRKLAGEKEELLSQIRKLKLQLEEERQKCSRNDGTVGDLAGLQNGSDLQFIEMQRDANRQISEYKFKLSKAEQDITTLEQSISRLEGQVLRYKTAAENAEKVEDELKAEKRKLQRELRTALDKIEEMEMTNSHLAKRLEKMKANRTALLAQQ

SEQ ID NO: 6133 - protein, 1870 aa, Homo sapiens
MENEIFTPLLEQFMTSPLVTWVKTFGPLAAGNGTNLDEYVALVDGVFLNQVMLQINPKLESQRVNKKVNNDASLRMHNLSILVRQIKFYYQETLQQLIMMSLPNVLIIGKNPFSEQGTEEVKKLLLLLLGCAVQCQKKEEFIERIQGLDFDTKAAVAAHIQEVTHNQENVFDLQWMEVTDMSQEDIEPLLKNMALHLKRLIDERDEHSETIIELSEERDGLHFLPHASSSAQSPCGSPGMKRTESRQHLSVELADAKAKIRRLRQELEEKTEQLLDCKQELEQMEIELKRLQQENMNLLSDARSARMYRDELDALREKAVRVDKLESEVSRYKERLHDIEFYKARVEELKEDNQVLLETKTMLEDQLEGTRARSDKLHELEKENLQLKAKLHDMEMERDMDRKKIEELMEENMTLEMAQKQSMDESLHLGWELEQISRTSELSEAPQKSLGHEVNELTSSRLLKLEMENQSLTKTVEELRTTVDSVEGNASKILKMEKENQRLSKKVEILENEIVQEKQSLQNCQNLSKDLMKEKAQLEKTIETLRENSERQIKILEQENEHLNQTVSSLRQRSQISAEARVKDIEKENKILHESIKETSSKLSKIEFEKRQIKKELEHYKEKGERAEELENELHHLEKENELLQKKITNLKITCEKIEALEQENSELERENRKLKKTLDSFKNLTFQLESLEKENSQLDEENLELRRNVESLKCASMKMAQLQLENKELESEKEQLKKGLELLKASFKKTERLEVSYQGLDIENQRLQKTLENSNKKIQQLESELQDLEMENQTLQKNLEELKISSKRLEQLEKENKSLEQETSQLEKDKKQLEKENKRLRQQAEIKDTTLEENNVKIGNLEKENKTLSKEIGIYKESCVRLKELEKENKELVKRATIDIKTLVTLREDLVSEKLKTQQMNNDLEKLTHELEKIGLNKERLLHDEQSTDDRYKLLESKLESTLKKSLEIKEEKIAALEARLEESTNYNQQLRQELKTVKKNYEALKQRQDEERMVQSSPPISGEDNKWERESQETTRELLKVKDRLIEVERNNATLQAEKQALKTQLKQLETQNNNLQAQILALQRQTVSLQEQNTTLQTQNAKLQVENSTLNSQSTSLMNQNAQLLIQQSSLENENESVIKEREDLKSLYDSLIKDHEKLELLHERQASEYESLISKHGTLKSAHKNLEVEHRDLEDRYNQLLKQKGQLEDLEKMLKVEQEKMLLENKNHETVAAEYKKLCGENDRLNHTYSQLLKETEVLQTDHKNLKSLLNNSKLEQTRLEAEFSKLKEQYQQLDITSTKLNNQCELLSQLKGNLEEENRHLLDQIQTLMLQNRTLLEQNMESKDLFHVEQRQYIDKLNELRRQKEKLEEKIMDQYKFYDPSPPRRRGNWITLKMRKLIKSKKDINRERQKSLTLTPTRSDSSEGFLQLPHQDSQDSSSVGSNSLEDGQTLGTKKSSMVALKRLPFLRNRPKDKDKMKACYRRSMSMNDLVQSMVLAGQWTGSTENLEVPDDISTGKRRKELGAMAFSTTAINFSTVNSSAGFRSKQLVNNKDTTSFEDISPQGVSDDSSTGSRVHASRPASLDSGRTSTSNSNNNASLHEVKAGAVNNQSRPQSHSSGEFSLLHDHEAWSSSGSSPIQYLKRQTRSSPVLQHKISETLESRHHKIKTGSPGSEVVTLQQFLEESNKLTSVQIKSSSQENLLDEVMKSLSVSSDFLGKDKPVSCGLARSVSGKTPGDFYDRRTTKPEFLRPGPRKTEDTYFISSAGKPTPGTQGKIKLVKESSLSRQSKDSNPYATLPRASSVISTAEGTTRRTSIHDFLTKDSRLPISVDSPPAAADSNTTAASNVDKVQESRNSKSRSREQQSS

SEQ ID NO: 6134 - protein, 1330 aa, Homo sapiens
MGTASSLVSPAGGEVIEDTYGAGGGEACEIPVEVKPKARLLRNSFRRGAGAAAGAGPGSLPRGVGAGGLLGASFKSTGSSVPELEYAAAEYERLRKEYEIFRVSKNQELLSMGRREAKLDTENKRLRAELQALQKTYQKILREKESALEAKYQAMERAATFEHDRDKVKRQFKIFRETKENEIQDLLRAKRELESKLQRLQAQGIQVFDPGESDSDDNCTDVTAAGTQCEYWTGGALGSEPSIGSMIQLQQSFRGPEFAHSSIDVEGPFANVNRDDWDIAVASLLQVTPLFSHSLWSNTVRCYLIYTDETQPEMDLFLKDYSPKLKRMCETMGYFFHAVYFPIDVENQYLTVRKWEIEKSSLVILFIHLTLPSLLLEDCEEAFLKNPEGKPRLIFHRLEDGKVSSDSVQQLIDQVSNLNKTSKAKIIDHSGDPAEGVYKTYICVEKIIKQDILGFENTDLETKDLGSEDSIPEEDDFGDVLWDIHDEQEQMETFQQASNSAHELGFEKYYQRLNDLVAAPAPIPPLLVSGGPGSGKSLLLSKWIQLQQKNSPNTLILSHFVGRPMSTSSESSLIIKRLTLKLMQHSWSVSALTLDPAKLLEEFPRWLEKLSARHQGSIIIVIDSIDQVQQVEKHMKWLIDPLPVNVRVIVSVNVETCPPAWRLWPTLHLDPLSPKDAKSIIIAECHSVDIKLSKEQEKKLERHCRSATTCNALYVTLFGKMIARAGRAGNLDKILHQCFQCQDTLSLYRLVLHSIRESMANDVDKELMKQILCLVNVSHNGVSESELMELYPEMSWTFLTSLIHSLYKMCLLTYGCGLLRFQHLQAWETVRLEYLEGPTVTSSYRQKLINYFTLQLSQDRVTWRSADELPWLFQQQGSKQKLHDCLLNLFVSQNLYKRGHFAELLSYWQFVGKDKSAMATEYFDSLKQYEKNCEGEDNMSCLADLYETLGRFLKDLGLLSQAIVPLQRSLEIRETALDPDHPRVAQSLHQLASVYVQWKKFGNAEQLYKQALEISENAYGADHPYTARELEALATLYQKQNKYEQAEHFRKKSFKIHQKAIKKKGNLYGFALLRRRALQLEELTLGKDTPDNARTLNELGVLYYLQNNLETADQFLKRSLEMRERVLGPDHPDCAQSLNNLAALCNEKKQYDKAEELYERALDIRRRALAPDHPSLAYTVKHLAILYKKMGKLDKAVPLYELAVEIRQKSFGPKHPSVATALVNLAVLYSQMKKHVEALPLYERALKIYEDSLGRMHPRVGETLKNLAVLSYEGGDFEKAAELYKRAMEIKEAETSLLGGKAPSRHSSSGDTFSLKTAHSPNVFLQQGQR

SEQ ID NO: 6135 - protein, 407 aa, Homo sapiens
MTTLAGAVPRMMRPGPGQNYPRSGFPLEVSTPLGQGRVNQLGGVFINGRPLPNHIRHKIVEMAHHGIRPCVISRQLRVSHGCVSKILCRYQETGSIRPGAIGGSKPKQVTTPDVEKKIEEYKRENPGMFSWEIRDKLLKDAVCDRNTVPSVSSISRILRSKFGKGEEEEADLERKEAEESEKKAKHSIDGILSERASAPQSDEGSDIDSEPDLPLKRKQRRSRTTFTAEQLEELERAFERTHYPDIYTREELAQRAKLTEARVQVWFSNRRARWRKQAGANQLMAFNHLIPGGFPPTAMPTLPTYQLSETSYQPTSIPQAVSDPSSTVHRPQPLPPSTVHQSTIPSNPDSSSAYCLPSTRHGFSSYTDSFVPPSGPSNPMNPTIGNGLSPQVPFIISSQISLGFKSF

SEQ ID NO: 6136 - protein, 688 aa, Homo sapiens
MARKLVMFRDVAIDFSQEEWECLDSAQRDLYRDVMLENYSNLVSLDLPSRCASKDLSPEKNTYETELSQWEMSDRLENCDLEESNSRDYLEAKGKMEKQQENQKEYFRQGMIIYDKMSIFNQHTYLSQHSRCHSTEKPYKCKECGKAFRRASHLTQHQSIHTGEKPYECKQCGKAFSRDSQLSLHQRLHTGEKPYACKECGKAFTQSSQLILHHRIHTGEKPYKCEECGKAFIRSSQLTRHQKVHTGEKPYECKECGKAFTQNSQLTLHQRLHTGEKLYECKECRKVFTQLSQLILHKRIHTGEKPYECKECGKAFICGSQLSQHQKIHNGEKPYECKECGRAFIRGSLLMQHQRIHTGEKPYKCEECGKAFIRGSQLTQHQRIHTNEKPYECKECGKMFSHGSQLTQHQRIHTGEKPYQCKECGKAFNRGSLLTRHQRIHTGEKPYECKECGKTFSRGSELTQHERIHTGEKPYECKECGKSFIRGSQLTQHQRIHTGEKPYECKECRMAFTQSSHLSQHQRLHTGEKPYVCNECGKAFARGLLLIQHQRIHTGEKPYQCKECGKAFIRGSQLTQHQRIHTGEKPYECKECGKAFSHGSQLTLHQRIHTGEKPYECRECRKAFTQSSHLSRHQRIHTGEKPYQCKECGKAFTRGSQLTQHQRIHISEKSFEYKECGIDFSHGSQVYM

SEQ ID NO: 6137 - protein, 801 aa, Homo sapiens
MSRRKQGKPQHLSKREFSPEPLEAILTDDEPDHGPLGAPEGDHDLLTCGQCQMNFPLGDILIFIEHKRKQCNGSLCLEKAVDKPPSPSPIEMKKASNPVEVGIQVTPEDDDCLSTSSRGICPKQEHIAGKDEPSSYTCTTCKQPFTSAWFLLQHAQNTHGLRIYLESEHGSPLTPRVGIPSGLGAECPSQPPLHGIHIADNNPFNLLRIPGSVSREASGLAEGRFPPTPPLFSPPPRHHLDPHRIERLGAEEMALATHHPSAFDRVLRLNPMAMEPPAMDFSRRLRELAGNTSSPPLSPGRPSPMQRLLQPFQPGSKPPFLATPPLPPLQSAPPPSQPPVKSKSCEFCGKTFKFQSNLVVHRRSHTGEKPYKCNLCDHACTQASKLKRHMKTHMHKSSPMTVKSDDGLSTASSPEPGTSDLVGSASSALKSVVAKFKSENDPNLIPENGDEEEEEDDEEEEEEEEEEEEELTESERVDYGFGLSLEAARHHENSSRGAVVGVGDESRALPDVMQGMVLSSMQHFSEAFHQVLGEKHKRGHLAEAEGHRDTCDEDSVAGESDRIDDGTVNGRGCSPGESASGGLSKKLLLGSPSSLSPFSKRIKLEKEFDLPPAAMPNTENVYSQWLAGYAASRQLKDPFLSFGDSRQSPFASSSEHSSENGSLRFSTPPGELDGGISGRSGTGSGGSTPHISGPGPGRPSSKEGRRSDTCEYCGKVFKNCSNLTVHRRSHTGERPYKCELCNYACAQSSKLTRHMKTHGQVGKDVYKCEICKMPFSVYSTLEKHMKKWHSDRVLNNDIKTE

SEQ ID NO: 6138 - protein, 411 aa, Homo sapiens
MGMRARVPKVAHSTRRPPAARMWLPRFSSKTVTVLLLAQTTCLLLFIISRPGPSSPAGGEDRVHVLVLSSWRSGSSFLGQLFSQHPDVFYLMEPAWHVWTTLSQGSAATLHMAVRDLMRSIFLCDMDVFDAYMPQSRNLSAFFNWATSRALCSPPACSAFPRGTISKQDVCKTLCTRQPFSLAREACRSYSHVVLKEVRFFNLQVLYPLLSDPALNLRIVHLVRDPRAVLRSREAAGPILARDNGIVLGTNGKWVEADPHLRLIREVCRSHVRIAEAATLKPPPFLRGRYRLVRFEDLAREPLAEIRALYAFTGLTLTPQLEAWIHNITHGSGIGKPIEAFHTSSRNARNVSQAWRHALPFTKILRVQEVCAGALQLLGYRPVYSADQQRDLTLDLVLPRGPDHFSWASPD

SEQ ID NO: 6139 - protein, 1113 aa, Homo sapiens
MFSQVPRTPASGCYYLNSMTPEGQEMYLRFDQTTRRSPYRMSRILARHQLVTKIQQEIEAKEACDWLRAAGFPQYAQLYEDSQFPINIVAVKNDHDFLEKDLVEPLCRRLNTLNKCASMKLDVNFQRKKGDDSDEEDLCISNKWTFQRTSRRWSRVDDLYTLLPRGDRNGSPGGTGMRNTTSSESVLTDLSEPEVCSIHSESSGGSDSRSQPGQCCTDNPVMLDAPLVSSSLPQPPRDVLNHPFHPKNEKPTRARAKSFLKRMETLRGKGAHGRHKGSGRTGGLVISGPMLQQEPESFKAMQCIQIPNGDLQNSPPPACRKGLPCSGKSSGESSPSEHSSSGVSTPCLKERKCHEANKRGGMYLEDLDVLAGTALPDAGDQSRMHEFHSQENLVVHIPKDHKPGTFPKALSIESLSPTDSSNGVNWRTGSISLGREQVPGAREPRLMASCHRASRVSIYDNVPGSHLYASTGDLLDLEKDDLFPHLDDILQHVNGLQEVVDDWSKDVLPELQTHDTLVGEPGLSTFPSPNQITLDFEGNSVSEGRTTPSDVERDVTSLNESEPPGVRDRRDSGVGASLTRPNRRLRWNSFQLSHQPRPAPASPHISSQTASQLSLLQRFSLLRLTAIMEKHSMSNKHGWTWSVPKFMKRMKVPDYKDKAVFGVPLIVHVQRTGQPLPQSIQQALRYLRSNCLDQVGLFRKSGVKSRIHALRQMNENFPENVNYEDQSAYDVADMVKQFFRDLPEPLFTNKLSETFLHIYQYVSKEQRLQAVQAAILLLADENREVLQTLLCFLNDVVNLVEENQMTPMNLAVCLAPSLFHLNLLKKESSPRVIQKKYATGKPDQKDLNENLAAAQGLAHMIMECDRLFEVPHELVAQSRNSYVEAEIHVPTLEELGTQLEESGATFHTYLNHLIQGLQKEAKEKFKGWVTCSSTDNTDLAFKKVGDGNPLKLWKASVEVEAPPSVVLNRVLRERHLWDEDFVQWKVVETLDRQTEIYQYVLNSMAPHPSRDFVVLRTWKTDLPKGMCTLVSLSVEHEEAQLLGGVRAVVMDSQYLIEPCGSGKSRLTHICRIDLKGHSPEWYSKGFGHLCAAEVARIRNSFQPLIAEGPETKI

SEQ ID NO: 6140 - protein, 426 aa, Homo sapiens
MPPKKQAQAGGSKKAEQKKKEKIIEDKTFGLKNKKGAKQQKFIKAVTHQVKFGQQNPRQVAQSEAEKKLKKDDKKKELQELNELFKPVVAAQKISKGADPKSVVCAFFKQGQCTKGDKCKFSHDLTLERKCEKRSVYIDARDEELEKDTMDNWDEKKLEEVVNKKHGEAEKKKPKTQIVCKHFLEAIENNKYGWFWVCPGGGDICMYRHALPPGFVLKKDKKKEEKEDEISLEDLIERERSALGPNVTKITLESFLAWKKRKRQEKIDKLEQDMERRKADFKAGKALVISGREVFEFRPELVNDDDEEADDTRYTQGTGGDEVDDSVSVNDIDLSLYIPRDVDETGITVASLERFSTYTSDKDENKLSEASGGRAENGERSDLEEDNEREGTENGAIDAVPVDENLFTGEDLDELEEELNTLDLEE

SEQ ID NO: 6141 - protein, 1549 aa, Homo sapiens
MPSDFISLLSADLDLESPKSLYSRDSLKLHPSQNFHRAGLLEESVYDLLPKELQLPPSRETSVASMSQTSGGEAGSPPPAVVAADASSAPSSSSMGGACSSFTTSSSPTIYSTSVTDSKAMQVESCSSAVGVSNRGVSEKQLTSNTVQQHPSTPKRHTVLYISPPPEDLLDNSRMSCQDEGCGLESEQSCSMWMEDSPSNFSNMSTSSYNDNTEVPRKSRKRNPKQRPGVKRRDCEESNMDIFDADSAKAPHYVLSQLTTDNKGNSKAGNGTLENQKGTGVKKSPMLCGQYPVKSEGKELKIVVQPETQHRARYLTEGSRGSVKDRTQQGFPTVKLEGHNEPVVLQVFVGNDSGRVKPHGFYQACRVTGRNTTPCKEVDIEGTTVIEVGLDPSNNMTLAVDCVGILKLRNADVEARIGIAGSKKKSTRARLVFRVNIMRKDGSTLTLQTPSSPILCTQPAGVPEILKKSLHSCSVKGEEEVFLIGKNFLKGTKVIFQENVSDENSWKSEAEIDMELFHQNHLIVKVPPYHDQHITLPVSVGIYVVTNAGRSHDVQPFTYTPDPAAAGALNVNVKKEISSPARPCSFEEAMKAMKTTGCNLDKVNIIPNALMTPLIPSSMIKSEDVTPMEVTAEKRSSTIFKTTKSVGSTQQTLENISNIAGNGSFSSPSSSHLPSENEKQQQIQPKAYNPETLTTIQTQDISQPGTFPAVSASSQLPNSDALLQQATQFQTRETQSREILQSDGTVVNLSQLTEASQQQQQSPLQEQAQTLQQQISSNIFPSPNSVSQLQNTIQQLQAGSFTGSTASGSSGSVDLVQQVLEAQQQLSSVLFSAPDGNENVQEQLSADIFQQVSQIQSGVSPGMFSSTEPTVHTRPDNLLPGRAESVHPQSENTLSNQQQQQQQQQQVMESSAAMVMEMQQSICQAAAQIQSELFPSTASANGNLQQSPVYQQTSHMMSALSTNEDMQMQCELFSSPPAVSGNETSTTTTQQVATPGTTMFQTSSSGDGEETGTQAKQIQNSVFQTMVQMQHSGDNQPQVNLFSSTKSMMSVQNSGTQQQGNGLFQQGNEMMSLQSGNFLQQSSHSQAQLFHPQNPIADAQNLSQETQGSLFHSPNPIVHSQTSTTSSEQMQPPMFHSQSTIAVLQGSSVPQDQQSTNIFLSQSPMNNLQTNTVAQEAFFAAPNSISPLQSTSNSEQQAAFQQQAPISHIQTPMLSQEQAQPPQQGLFQPQVALGSLPPNPMPQSQQGTMFQSQHSIVAMQSNSPSQEQQQQQQQQQQQQQQQQQSILFSNQNTMATMASPKQPPPNMIFNPNQNPMANQEQQNQSIFHQQSNMAPMNQEQQPMQFQSQSTVSSLQNPGPTQSESSQTPLFHSSPQIQLVQGSPSSQEQQVTLFLSPASMSALQTSINQQDMQQSPLYSPQNNMPGIQGATSSPQPQATLFHNTAGGTMNQLQNSPGSSQQTSGMFLFGIQNNCSQLLTSGPATLPDQLMAISQPGQPQNEGQPPVTTLLSQQMPENSPLASSINTNQNIEKIDLLVSLQNQGNNLTGSF

SEQ ID NO: 6142 - protein, 765 aa, Homo sapiens
MDPVATHSCHLLQQLHEQRIQGLLCDCMLVVKGVCFKAHKNVLAAFSQYFRSLFQNSSSQKNDVFHLDVKNVSGIGQILDFMYTSHLDLNQDNIQVMLDTAQCLQVQNVLSLCHTFLKSATVVQPPGMPCNSTLSLQSTLTPDATCVISENYPPHLLQECSADAQQNKTLDESHPHASPSVNRHHSAGEISKQAPDTSDGSCTELPFKQPNYYYKLRNFYSKQYHKHAAGPSQERVVEQPFAFSTSTDLTTVESQPCAVSHSECILESPEHLPSNFLAQPVNDSAPHPESDATCQQPVKQMRLKKAIHLKKLNFLKSQKYAEQVSEPKSDDGLTKRLESASKNTLEKASSQSAEEKESEEVVSCENFNCISETERPEDPAALEDQSQTLQSQRQYACELCGKPFKHPSNLELHKRSHTGEKPFECNICGKHFSQAGNLQTHLRRHSGEKPYICEICGKRFAASGDVQRHIIIHSGEKPHLCDICGRGFSNFSNLKEHKKTHTADKVFTCDECGKSFNMQRKLVKHRIRHTGERPYSCSACGKCFGGSGDLRRHVRTHTGEKPYTCEICNKCFTRSAVLRRHKKMHCKAGDESPDVLEELSQAIETSDLEKSQSSDSFSQDTSVTLMPVSVKLPVHPVENSVAEFDSHSGGSYCKLRSMIQPHGVSDQEKLSLDPGKLAKPQMQQTQPQAYAYSDVDTPAGGEPLQADGMAMIRSSLAALDNHGGDPLGSRASSTTYRNSEGQFFSSMTLWGLAMKTLQNENELDQ

SEQ ID NO: 6143 - protein, 278 aa, Homo sapiens
MQWLRVRESPGEATGHRVTMGTAALGPVWAALLLFLLMCEIPMVELTFDRAVASGCQRCCDSEDPLDPAHVSSASSSGRPHALPEIRPYINITILKGDKGDPGPMGLPGYMGREGPQGEPGPQGSKGDKGEMGSPGAPCQKRFFAFSVGRKTALHSGEDFQTLLFERVFVNLDGCFDMATGQFAAPLRGIYFFSLNVHSWNYKETYVHIMHNQKEAVILYAQPSERSIMQSQSVMLDLAYGDRVWVRLFKRQRENAIYSNDFDTYITFSGHLIKAEDD

SEQ ID NO: 6144 - protein, 1058 aa, Homo sapiens
MTTVVVHVDSKAELTTLLEQWEKEHGSGQDMVPILTRMSQLIEKETEEYRKGDPDPFDDRHPGRADPECMLGHLLRILFKNDDFMNALVNAYVMTSREPPLNTAACRLLLDIMPGLETAVVFQEKEGIVENLFKWAREADQPLRTYSTGLLGGAMENQDIAANYRDENSQLVAIVLRRLRELQLQEVALRQENKRPSPRKLSSEPLLPLDEEAVDMDYGDMAVDDAEIQKSALQIIINCVCGPDNRISSIGKFISGTPRRKLPQNPKSSEHTLAKMWNVVQSNNGIKVLLSLLSIKMPITDADQIRALACKALVGLSRSSTVRQIISKLPLFSSCQIQQLMKEPVLQDKRSDHVKFCKYAAELIERVSGKPLLIGTDVSLARLQKADVVAQSRISFPEKELLLLIRNHLISKGLGETATVLTKEADLPMTAASHSSAFTPVTAAASPVSLPRTPRIANGIATRLGSHAAVGASAPSAPTAHPQPRPPQGPLALPGPSYAGNSPLIGRISFIRERPSPCNGRKIRVLRQKSDHGAYSQSPAIKKQLDRHLPSPPTLDSIITEYLREQHARCKNPVATCPPFSLFTPHQCPEPKQRRQAPINFTSRLNRRASFPKYGGVDGGCFDRHLIFSRFRPISVFREANEDESGFTCCAFSARERFLMLGTCTGQLKLYNVFSGQEEASYNCHNSAITHLEPSRDGSLLLTSATWSQPLSALWGMKSVFDMKHSFTEDHYVEFSKHSQDRVIGTKGDIAHIYDIQTGNKLLTLFNPDLANNYKRNCATFNPTDDLVLNDGVLWDVRSAQAIHKFDKFNMNISGVFHPNGLEVIINTEIWDLRTFHLLHTVPALDQCRVVFNHTGTVMYGAMLQADDEDDLMEERMKSPFGSSFRTFNATDYKPIATIDVKRNIFDLCTDTKDCYLAVIENQGSMDALNMDTVCRLYEVGRQRLAEDEDEEEDQEEEEQEEEDDDEDDDDTDDLDELDTDQLLEAELEEDDNNENAGEDGDNDFSPSDEELANLLEEGEDGEDEDSDADEEVELILGDTDSSDNSDLEDDIILSLNE

SEQ ID NO: 6145 - protein, 609 aa, Homo sapiens
MAGTLDLDKGCTVEELLRGCIEAFDDSGKVRDPQLVRMFLMMHPWYIPSSQLAAKLLHIYQQSRKDNSNSLQVKTCHLVRYWISAFPAEFDLNPELAEQIKELKALLDQEGNRRHSSLIDIDSVPTYKWKRQVTQRNPVGQKKRKMSLLFDHLEPMELAEHLTYLEYRSFCKILFQDYHSFVTHGCTVDNPVLERFISLFNSVSQWVQLMILSKPTAPQRALVITHFVHVAEKLLQLQNFNTLMAVVGGLSHSSISRLKETHSHVSPETIKLWEGLTELVTATGNYGNYRRRLAACVGFRFPILGVHLKDLVALQLALPDWLDPARTRLNGAKMKQLFSILEELAMVTSLRPPVQANPDLLSLLTVSLDQYQTEDELYQLSLQREPRSKSSPTSPTSCTPPPRPPVLEEWTSAAKPKLDQALVVEHIEKMVESVFRNFDVDGDGHISQEEFQIIRGNFPYLSAFGDLDQNQDGCISREEMVSYFLRSSSVLGGRMGFVHNFQESNSLRPVACRHCKALILGIYKQGLKCRACGVNCHKQCKDRLSVECRRRAQSVSLEGSAPSPSPMHSHHHRAFSFSLPRPGRRGSRPPEIREEEVQTVEDGVFDIHL

SEQ ID NO: 6146 - protein, 1024 aa, Homo sapiens
MASVPVYCLCRLPYDVTRFMIECDMCQDWFHGSCVGVEEEKAADIDLYHCPNCEVLHGPSIMKKRRGSSKGHDTHKGKPVKTGSPTFVRELRSRTFDSSDEVILKPTGNQLTVEFLEENSFSVPILVLKKDGLGMTLPSPSFTVRDVEHYVGSDKEIDVIDVTRQADCKMKLGDFVKYYYSGKREKVLNVISLEFSDTRLSNLVETPKIVRKLSWVENLWPEECVFERPNVQKYCLMSVRDSYTDFHIDFGGTSVWYHVLKGEKIFYLIRPTNANLTLFECWSSSSNQNEMFFGDQVDKCYKCSVKQGQTLFIPTGWIHAVLTPVDCLAFGGNFLHSLNIEMQLKAYEIEKRLSTADLFRFPNFETICWYVGKHILDIFRGLRENRRHPASYLVHGGKALNLAFRAWTRKEALPDHEDEIPETVRTVQLIKDLAREIRLVEDIFQQNVGKTSNIFGLQRIFPAGSIPLTRPAHSTSVSMSRLSLPSKNGSKKKGLKPKELFKKAERKGKESSALGPAGQLSYNLMDTYSHQALKTGSFQKAKFNITGACLNDSDDDSPDLDLDGNESPLALLMSNGSTKRVKSLSKSRRTKIAKKVDKARLMAEQVMEDEFDLDSDDELQIDERLGKEKATLIIRPKFPRKLPRAKPCSDPNRVREPGEVEFDIEEDYTTDEDMVEGVEGKLGNGSGAGGILDLLKASRQVGGPDYAALTEAPASPSTQEAIQGMLCMANLQSSSSSPATSSLQAWWTGGQDRSSGSSSSGLGTVSNSPASQRTPGKRPIKRPAYWRTESEEEEENASLDEQDSLGACFKDAEYIYPSLESDDDDPALKSRPKKKKNSDDAPWSPKARVTPTLPKQDRPVREGTRVASIETGLAAAAAKLAQQELQKAQKKKYIKKKPLLKEVEQPRPQDSNLSLTVPAPTVAATPQLVTSSSPLPPPEPKQEALSGSLADHEYTARPNAFGMAQANRSTTPMAPGVFLTQRRPSVGSQSNQAGQGKRPKKGLATAKQRLGRILKIHRNGKLLL

SEQ ID NO: 6147 - protein, 707 aa, Homo sapiens
MDPGWGQRDVGWAALLILFAASLLTVFAWLLQYARGLWLARARGDRGPGPALAGEPAGSLRELGVWRSLLRLRATRAGAAEEPGVRGLLASLFAFKSFRENWQRAWVRALNEQACRNGSSIQIAFEEVPQLPPRASISHVTCVDQSEHTMVLRCQLSAEEVRFPVSVTQQSPAAVSMETYHVTLTLPPTQLEVNLEEIPGEGLLISWAFTDRPDLSLTVLPKLQARERGEEQVELSTIEELIKDAIVSTQPAMMVNLRACSAPGGLVPSEKPPMMPQAQPAIPRPNRLFLRQLRASHLGNELEGTEELCCVAELDNPMQQKWTKPARAGSEVEWTEDLALDLGPQSRELTLKVLRSSSCGDTELLGQATLPVGSPSRPLSRRQLCPLTPGPGKALGPAATMAVELHYEEGSPRNLGTPTSSTPRPSITPTKKIELDRTIMPDGTIVTTVTTVQSRPRIDGKLDSPSRSPSKVEVTEKTTTVLSESSGPSNTSHSSSPGDSHLSNGLDPVAETAIRQLTEPSGRVAKKTPTKRSTLIISGVSKVPIAQDELALSLGYAASLEASVQDDAGTSGGPSSPPSDPPAMSPGPLDALSSPTSVQEADETTRSDISERPSVDDIESETGSTGALETRSLKDHKVSFLRSGTKLIFRRRPRQKEAGLSQSHDDLSNATATPSVRKKAGSFSRRLIKRFSFKSKPKANGNPSPQL

SEQ ID NO: 6148 - protein, 386 aa, Homo sapiens
MILGSLSRAGPLPLLRQPPIMQPPLDLKQILPFPLEPAPTLGLFSNYSTMDPVQKAVLSHTFGGPLLKTKRPVISCNICQIRFNSQSQAEAHYKGNRHARRVKGIEAAKTRGREPGVREPGDPAPPGSTPTNGDGVAPRPVSMENGLGPAPGSPEKQPGSPSPPSIPETGQGVTKGEGGTPAPASLPGGSKEEEEKAKRLLYCALCKVAVNSLSQLEAHNKGTKHKTILEARSGLGPIKAYPRLGPPTPGEPEAPAQDRTFHCEICNVKVNSEVQLKQHISSRRHRDGVAGKPNPLLSRHKKSRGAGELAGTLTFSKELPKSLAGGLLPSPLAVAAVMAAAAGSPLSLRPAPAAPLLQGPPITHPLLHPAPGPIRTAHGPILFSPY

SEQ ID NO: 6149 - protein, 128 aa, Homo sapiens
MASSSTVPLGFHYETKYVVLSYLGLLSQEKLQEQHLSSPQGVQLDIASQSLDQEILLKVKTEIEEELKSLDKEISEDFGASGFATTNAFGIDKTWSRTFERTAAVWRDIPGGLFGRVHHSARWLGHCV

SEQ ID NO: 6150 - protein, 662 aa, Homo sapiens
MAAENEASQESALGAYSPVDYMSITSFPRLPEDEPAPAAPLRGRKDEDAFLGDPDTDPDSFLKSARLQRLPSSSSEMGSQDGSPLRETRKDPFSAAAAECSCRQDGLTVIVTACLTFATGVTVALVMQIYFGDPQIFQQGAVVTDAARCTSLGIEVLSKQGSSVDAAVAAALCLGIVAPHSSGLGGGGVMLVHDIRRNESHLIDFRESAPGALREETLQRSWETKPGLLVGVPGMVKGLHEAHQLYGRLPWSQVLAFAAAVAQDGFNVTHDLARALAEQLPPNMSERFRETFLPSGRPPLPGSLLHRPDLAEVLDVLGTSGPAAFYAGGNLTLEMVAEAQHAGGVITEEDFSNYSALVEKPVCGVYRGHLVLSPPPPHTGPALISALNILEGFNLTSLVSREQALHWVAETLKIALALASRLGDPVYDSTITESMDDMLSKVEAAYLRGHINDSQAAPAPLLPVYELDGAPTAAQVLIMGPDDFIVAMVSSLNQPFGSGLITPSGILLNSQMLDFSWPNRTANHSAPSLENSVQPGKRPLSFLLPTVVRPAEGLCGTYLALGANGAARGLSGLTQVLLNVLTLNRNLSDSLARGRLHPDLQSNLLQVDSEFTEEEIEFLEARGHHVEKVDVLSWVHGSRRTNNFIIAVKDPRSPDAAGATIL

SEQ ID NO: 6151 - protein, 974 aa, Homo sapiens
MSAQSLLHSVFSCSSPASSSAASAKGFSKRKLRQTRSLDPALIGGCGSDEAGAEGSARGATAGRLYSPSLPAESLGPRLASSSRGPPPRATRLPPPGPLCSSFSTPSTPQEKSPSGSFHFDYEVPLGRGGLKKSMAWDLPSVLAGPASSRSASSILCSSGGGPNGIFASPRRWLQQRKFQSPPDSRGHPYVVWKSEGDFTWNSMSGRSVRLRSVPIQSLSELERARLQEVAFYQLQQDCDLSCQITIPKDGQKRKKSLRKKLDSLGKEKNKDKEFIPQAFGMPLSQVIANDRAYKLKQDLQRDEQKDASDFVASLLPFGNKRQNKELSSSNSSLSSTSETPNESTSPNTPEPAPRARRRGAMSVDSITDLDDNQSRLLEALQLSLPAEAQSKKEKARDKKLSLNPIYRQVPRLVDSCCQHLEKHGLQTVGIFRVGSSKKRVRQLREEFDRGIDVSLEEEHSVHDVAALLKEFLRDMPDPLLTRELYTAFINTLLLEPEEQLGTLQLLIYLLPPCNCDTLHRLLQFLSIVARHADDNISKDGQEVTGNKMTSLNLATIFGPNLLHKQKSSDKEFSVQSSARAEESTAIIAVVQKMIENYEALFMVPPDLQNEVLISLLETDPDVVDYLLRRKASQSSSPDMLQSEVSFSVGGRHSSTDSNKASSGDISPYDNNSPVLSERSLLAMQEDAAPGGSEKLYRVPGQFMLVGHLSSSKSRESSPGPRLGKDLSEEPFDIWGTWHSTLKSGSKDPGMTGSSGDIFESSSLRAGPCSLSQGNLSPNWPRWQGSPAELDSDTQGARRTQAAAPATEGRAHPAVSRACSTPHVQVAGKAERPTARSEQYLTLSGAHDLSESELDVAGLQSRATPQCQRPHGSGRDDKRPPPPYPGPGKPAAAAAWIQGPPEGVETPTDQGGQAAEREQQVTQKKLSSANSLPAGEQDSPRLGDAGWLDWQRERWQIWELLSTDNPDALPETLV

SEQ ID NO: 6152 - protein, 338 aa, Homo sapiens
MDQYCILGRIGEGAHGIVFKAKHVEPRVGWQCLPSILQTGEIVALKKVALRRLEDGFPNQALREIKALQEMEDNQYVVQLKAVFPHGGGFVLAFEFMLSDLAEVVRHAQRPLAQAQVKSYLQMLLKGVAFCHANNIVHRDLKPANLLISASGQLKIADFGLARVFSPDGSRLYTHQVATRSVGCIMGELLNGSPLFPGKNDIEQLCYVLRILGTPNPQVWPELTELPDYNKISFKEQVPMPLEEVLPDVSPQALDLLGQFLLYPPHQRIAASKALLHQYFFTAPLPAHPSELPIPQRLGGPAPKAHPGPPHIHDFHVDRPLEESLLNPELIRPFILEG

SEQ ID NO: 6153 - protein, 218 aa, Homo sapiens
MNCRSEVLEVSVEGRQVEEAMLAVLHTVLLHRSTGKFHYKKEGTYSIGTVGTQDVDCDFIDFTYVRVSSEELDRALRKVVGEFKDALRNSGGDGLGQMSLEFYQKKKSRWPFSDECIPWEVWTVKVHVVALATEQERQICREKVGEKLCEKIINIVEVMNRHEYLPKMPTQSEVDNVFDTGLRDVQPYLYKISFQITDALGTSVTTTMRRLIKDTLAL

SEQ ID NO: 6154 - protein, 489 aa, Homo sapiens [sequence omitted]

SEQ ID NO: 6155 - protein, 838 aa, Homo sapiens
MTGAEIEPSAQAKPEKKAGEEVIAGPERENDVPLVVRPKVRTQATTGARPKTETKSVPAARPKTEAQAMSGARPKTEVQVMGGARPKTEAQGITGARPKTDARAVGGARSKTDAKAIPGARPKDEAQAWAQSEFGTEAVSQAEGVSQTNAVAWPLATAESGSVTKSKGLSMDRELVNVDAETFPGTQGQKGIQPWFGPGEETNMGSWCYSRPRAREEASNESGFWSADETSTASSFWTGEETSVRSWPREESNTRSRHRAKHQTNPRSRPRSKQEAYVDSWSGSEDEASNPFSFWVGENTNNLFRPRVREEANIRSKLRTNREDCFESESEDEFYKQSWVLPGEEANSRFRHRDKEDPNTALKLRAQKDVDSDRVKQEPRFEEEVIIGSWFWAEKEASLEGGASAICESEPGTEEGAIGGSAYWAEEKSSLGAVAREEAKPESEEEAIFGSWFWDRDEACFDLNPCPVYKVSDRFRDAAEELNASSRPQTWDEVTVEFKPGLFHGVGFRSTSPFGIPEEASEMLEAKPKNLELSPEGEEQESLLQPDQPSPEFTFQYDPSYRSVREIREHLRARESAESESWSCSCIQCELKIGSEEFEEFLLLMDKIRDPFIHEISKIAMGMRSASQFTRDFIRDSGVVSLIETLLNYPSSRVRTSFLENMIHMAPPYPNLNMIETFICQVCEETLAHSVDSLEQLTGIRMLRHLTMTIDYHTLIANYMSGFLSLLTTANARTKFHVLKMLLNLSENPAVAKKLFSAKALSIFVGLFNIEETNDNIQIVIKMFQNISNIIKSGKMSLIDDDFSLEPLISAFREFEELAKQLQAQIDNQNDPEVGQQS

SEQ ID NO: 6156 - protein, 1944 aa, Homo sapiens
MSNFYEERTTMIAARDLQEFVPFGRDHCKHHPNALNLQLRQLQPASELWSSDGAAGLVGSLQEVTIHEKQKESWQLRKGVSEIGEDVDYDEELYVAGNMVIWSKGSKSQALAVYKAFTVDSPVQQALWCDFIISQDKSEKAYSSNEVEKCICILQSSCINMHSIEGKDYIASLPFQVANVWPTKYGLLFERSASSHEVPPGSPREPLPTMFSMLHPLDEITPLVCKSGSLFGSSRVQYVVDHAMKIVFLNTDPSIVMTYDAVQNVHSVWTLRRVKSEEENVVLKFSEQGGTPQNVATSSSLTAHLRSLSKGDSPVTSPFQNYSSIHSQSRSTSSPSLHSRSPSISNMAALSRAHSPALGVHSFSGVQRFNISSHNQSPKRHSISHSPNSNSNGSFLAPETEPIVPELCIDHLWTETITNIREKNSQASKVFITSDLCGQKFLCFLVESQLQLRCVKFQESNDKTQLIFGSVTNIPAKDAAPVEKIDTMLVLEGSGNLVLYTGVVRVGKVFIPGLPAPSLTMSNTMPRPSTPLDGVSTPKPLSKLLGSLDEVVLLSPVPELRDSSKLHDSLYNEDCTFQQLGTYIHSIRDPVHNRVTLELSNGSMVRITIPEIATSELVQTCLQAIKFILPKEIAVQMLVKWYNVHSAPGGPSYHSEWNLFVTCLMNMMGYNTDRLAWTRNFDFEGSLSPVIAPKKARPSETGSDDDWEYLLNSDYHQNVESHLLNRSLCLSPSEASQMKDEDFSQNLSLDSSTLLFTHIPAIFFVLHLVYEELKLNTLMGEGICSLVELLVQLARDLKLGPYVDHYYRDYPTLVRTTGQVCTIDPGQTGFMHHPSFFTSEPPSIYQWVSSCLKGEGMPPYPYLPGICERSRLVVLSIALYILGDESLVSDESSQYLTRITIAPQKLQVEQEENRFSFRHSTSVSSLAERLVVWMTNVGFTLRDLETLPFGIALPIRDAIYHCREQPASDWPEAVCLLIGRQDLSKQACEGNLPKGKSVLSSDVPSGTETEEEDDGMNDMNHEVMSLIWSEDLRVQDVRRLLQSAHPVRVNVVQYPELSDHEFIEEKENRLLQLCQRTMALPVGRGMFTLFSYHPVPTEPLPIPKLNLTGRAPPRNTTVDLNSGNIDVPPNMTSWASFHNGVAAGLKIAPASQIDSAWIVYNKPKHAELANEYAGFLMALGLNGHLTKLATLNIHDYLTKGHEMTSIGLLLGVSAAKLGTMDMSITRLLSIHIPALLPPTSTELDVPHNVQVAAVVGIGLVYQGTAHRHTAEVLLAEIGRPPGPEMEYCTDRESYSLAAGLALGMVCLGHGSNLIGMSDLNVPEQLYQYMVGGHRRFQTGMHREKHKSPSYQIKEGDTINVDVTCPGATLALAMIYLKTNNRSIADWLRAPDTMYLLDFVKPEFLLLRTLARCLILWDDILPNSKWVDSNVPQIIRENSISLSEIELPCSEDLNLETLSQAHVYIIAGACLSLGFRFAGSENLSAFNCLHKFAKDFMTYLSAPNASVTGPHNLETCLSVVLLSLAMVMAGSGNLKVLQLCRFLHMKTGGEMNYGFHLAHHMALGLLFLGGGRYSLSTSNSSIAALLCALYPHFPAHSTDNRYHLQALRHLYVLAAEPRLLVPVDVDTNTPCYALLEVTYKGTQWYEQTKEELMAPTLLPELHLLKQIKVKGPRYWELLIDLSKGTQHLKSILSKDGVLYVKLRAGQLSYKEDPMGWQSLLAQTVANRNSEARAFKPETISAFTSDPALLSFAEYFCKPTVNMGQKQEILDLFSSVLYECVTQETPEMLPAYIAMDQAIRRLGRREMSETSELWQIKLVLEFFSSRSHQERLQNHPKRGLFMNSEFLPVVKCTIDNTLDQWLQVGGDMCVHAYLSGQPLEESQLSMLACFLVYHSVPAPQHLPPIGLEGSTSFAELLFKFKQLKMPVRALLRLAPLLLGNPQPMVM

SEQ ID NO: 6157 - protein, 1005 aa, Homo sapiens
MEKQRALVAAKDGDVATLERLLEAGALGPGITDALGAGLVHHATRAGHLDCVKFLVQRAQLPGNQRAHNGATPAHDAAATGSLAELCWLVREGGCGLQDQDASGVSPLHLAARFGHPVLVEWLLHEGHSATLETREGARPLHHAAVSGDLTCLKLLTAAHGSSVNRRTRSGASPLYLACQEGHLHLAQFLVKDCGADVHLRALDGMSALHAAAARGHYSLVVWLVTFTDIGLTARDNEGATALHFAARGGHTPILDRLLLMGTPILRDSWGGTPLHDAAENGQMECCQTLVSHHVDPSLRDEDGYTAADLAEYHGHRDCAQYLREVAQPVPLLMTPPPPPFPPPPLLATRRSLEDGRRGGPGPGNPSPMSLSPAWPGHPDQPLPREQMTSPAPPRIITSATADPEGTETALAGDTSDGLAALQLDGLPSGDIDGLVPTRDERGQPIPEWKRQVMVRKLQARLGAESSAEAQDNGGSSGPTEQAAWRYSQTHQAILGPFGELLTEDDLVYLEKQIADLQLRRRCQEYESELGRLAAELQALLPEPLVSITVNSHFLPRAPGLEVEEASIPAAEPAGSAEASEVAPGVQPLPFWCSHISRLVRSLSLLLKGVHGLVQGDEKPSTRPLQDTCREASASPPRSEAQRQIQEWGVSVRTLRGNFESASGPLCGFNPGPCEPGAQHRQCLSGCWPALPKPRSGLASGEPRPGDTEEASDSGISCEEVPSEAGAAAGPDLASLRKERIIMLFLSHWRRSAYTPALKTVACRTLGARHAGLRGQEAARSPGPPSPPSEGPRLGHLWQQRSTITHLLGNWKAIMAHVPARQLRRLSRQPRGALSPEQFLPHVDGAPVPYSSLSLDLFMLGYFQLLECDLPAEERKLRHLLCFEVFEHLGTHGWEAVRAFHKAVTDEVAAGRRAWTDGFEDIKARFFGSSQRPAWDTEPGRKSGLTLLGPLPHAAVPCSGPEPTAQRLGSRSQQGSFNGEDICGYINRSFAFWKEKEAEMFNFGE

SEQ ID NO: 6158 - protein, 687 aa, Homo sapiens
GEVGADGVPGFPGLPGREGIAGPQGPKGDRGSRGEKGDPGKDGVGQPGLPGPPGPPGPVVYVSEQDGSVLSVPGPEGRPGFAGFPGPAGPKGNLGSKGERGSPGPKGEKGEPGSIFSPDGGALGPAQKGAKGEPGFRGPPGPYGRPGYKGEIGFPGRPGRPGMNGLKGEKGEPGDASLGFGMRGMPGPPGPPGPPGPPGTPVYDSNVFAESSRPGPPGLPGNQGPPGPKGAKGEVGPPGPPGQFPFDFLQLEAEMKGEKGDRGDAGQKGERGEPGGGGFFGSSLPGPPGPPGPPGPRGYPGIPGPKGESIRGQPGPPGPQGPPGIGYEGRQGPPGPPGPPGPPSFPGPHRQTISVPGPPGPPGPPGPPGTMGASSGQVRLWATRQAMLGQVHEVPEGWLIFVAEQEELYVRVQNGFRKVQLEARTPLPRGTDNEVAALQPPVVQLHDSNPYPRREHPHPTARPWRADDILASPPRLPEPQPYPGAPHHSSYVHLRPARPTSPPAHSHRDFQPVLHLVALNSPLSGGMRGIRGADFQCFQQARAVGLAGTFRAFLSSRLQDLYSIVRRADRAAVPIVNLKDELLFPSWEALFSGSEGPLKPGARIFSFDGKDVLRHPTWPQKSVWHGSDPNGRRLTESYCETWRTEAPSATGQASSLLGGRLLGQSAASCHHAYIVLCIENSFMTASK

SEQ ID NO: 6159 - protein, 493 aa, Homo sapiens
MNRTKGDEEEYWNSSKFKAFTFDDEDDELSQLKESKRAVNSLRDFVDDDDDDDLERVSWSGEPVGSISWSIRETAGNSGSTHEGREQLKSRNSFSSYAQLPKPTSTYSLSSFFRGRTRPGSFQSLSDALSDTPAKSYAPELGRPKGEYRDYSNDWSPSDTVRRLRKGKVCSLERFRSLQDKLQLLEEAVSMHDGNVITAVLIFLKRTLSKEILFRELEVRQVALRHLIHFLKEIGDQKLLLDLFRFLDRTEELALSHYREHLNIQDPDKRKEFLKTCVGLPFSAEDSAHIQDHYTLLERQIIIEANDRHLESAGQTEIFRKHPRKASILNMPLVTTLFYSCFYHYTEAEGTFSSPVNLKKTFKIPDKQYVLTALAARAKLRAWNDVDALFTTKNWLGYTKKRAPIGFHRVVEILHKNNAPVQILQEYVNLVEDVDTKLNLATKFKCHDVVIDTYRDLKDRQQLLAYRSKVDKGSAEEEKIDALLSSSQIRWKN

SEQ ID NO: 6160 - protein, 523 aa, Homo sapiens
MMLSRAKPAVGRGVQHTDKRKKKGRKIPKLEELLSKRDFTGAITLLEEYENATKEENCNSEVWVNLACTYFFLGMYKQAEAAGFKASKSRLQNRLLFHLAHKFNDEKKLMSFHQNLQDVTEDQLSLASIHYMRSHYQEAIDIYKRILLDNREYLALNVYVALCYYKLDYYDVSQEVLAVYLQQIPDSTIALNLKACNHFRLYNGRAAEAELKSLMDNASSSFEFAKELIRHNLVVFRGGEGALQVLPPLVDVIPEARLNLVIYYLRQDDVQEAYNLIKDLEPTTPQEYILKGVVNAALGQEMGSRDHMKIAQQFFQLVGGSASECDTIPGRQCMASCFFLLKQFDDVLIYLNSFKSYFYNDDIFNFNYAQAKAATGNTSEGEEAFLLIQSEKMKNDYIYLSWLARCYIMNKKPRLAWELYLKMETSGESFSLLQLIANDCYKMGQFYYSAKAFDVLERLDPNPEYWEGKRGACVGIFQMIIAGREPKETLREVLHLLRSTGNTQVEYMIRIMKKWAKENRVSI

SEQ ID NO: 6161 - protein, 758 aa, Homo sapiens
MAPAMQPAEIQFAQRLASSEKGIRDRAVKKLRQYISVKTQRETGGFSQEELLKIWKGLFYCMWVQDEPLLQEELANTIAQLVHAVNNSAAQHLFIQTFWQTMNREWKGIDRLRLDKYYMLIRLVLRQSFEVLKRNGWEESRIKVFLDVLMKEVLCPESQSPNGVRFHFIDIYLDELSKVGGKELLADQNLKFIDPFCKIAAKTKDHTLVQTIARGVFEAIVDQSPFVPEETMEEQKTKVGDGDLSAEEIPENEVSLRRAVSKKKTALGKNHSRKDGLSDERGRDDCGTFEDTGPLLQFDYKAVADRLLEMTSRKNTPHFNRKRLSKLIKKFQDLSEGSSISQLSFAEDISADEDDQILSQGKHKKKGNKLLEKTNLEKEKGSRVFCVEEEDSESSLQKRRRKKKKKHHLQPENPGPGGAAPSLEQNRGREPEASGLKALKARVAEPGAEATSSTGEESGSEHPPAVPMHNKRKRPRKKSPRAHREMLESAVLPPEDMSQSGPSGSHPQGPRGSPTGGAQLLKRKRKLGVVPVNGSGLSTPAWPPLQQEGPPTGPAEGANSHTTLPQRRRLQKKKAGPGSLELCGLPSQKTASLKKRKKMRVMSNLVEHNGVLESEAGQPQALGSSGTCSSLKKQKLRAESDFVKFDTPFLPKPLFFRRAKSSTATHPPGPAVQLNKTPSSSKKVTFGLNRNMTAEFKKTDKSILVSPTGPSRVAFDPEQKPLHGVLKTPTSSPASSPLVAKKPLTTTPRRRPRAMDFF

SEQ ID NO: 6162 - protein, 443 aa, Homo sapiens
MDFPCLWLGLLLPLVAALDFNYHRQEGMEAFLKTVAQNYSSVTHLHSIGKSVKGRNLWVLVVGRFPKEHRIGIPEFKYVANMHGDETVGRELLLHLIDYLVTSDGKDPEITNLINSTRIHIMPSMNPDGFEAVKKPDCYYSIGRENYNQYDLNRNFPDAFEYNNVSRQPETVAVMKWLKTETFVLSANLHGGALVASYPFDNGVQATGALYSRSLTPDDDVFQYLAHTYASRNPNMKKGDECKNKMNFPNGVTNGYSWYPLQGGMQDYNYIWAQCFEITLELSCCKYPREEKLPSFWNNNKASLIEYIKQVHLGVKGQVFDQNGNPLPNVIVEVQDRKHICPYRTNKYGEYYLLLLPGSYIINVTVPGHDPHITKVIIPEKSQNFSALKKDILLPFQGQLDSIPVSNPSCPMIPLYRNLPDHSAATKPSLFLFLVSLLHIFFK

SEQ ID NO: 6163 - protein, 539 aa, Homo sapiens
MEVPQPEPAPGSALSPAGVCGGAQRPGHLPGLLLGSHGLLGSPVRAAASSPVTTLTQTMHDLAGLGSETPKSQVGTLLFRSRSRLTHLSLSRRASESSLSSESSESSDAGLCMDSPSPMDPHMAEQTFEQAIQAASRIIRNEQFAIRRFQSMPDGFVFKMPWKPTHPSSTHALAEWASRREAFAQRPSSAPDLMCLSPDRKMEVEELSPLALGRFSLTPAEGDTEEDDGFVDILESDLKDDDAVPPGMESLISAPLVKTLEKEEEKDLVMYSKCQRLFRSPSMPCSVIRPILKRLERPQDRDTPVQNKRRRSVTPPEEQQEAEEPKARVLRSKSLCHDEIENLLDSDHRELIGDYSKAFLLQTVDGKHQDLKYISPETMVALLTGKFSNIVDKFVIVDCRYPYEYEGGHIKTAVNLPLERDAESFLLKSPIAPCSLDKRVILIFHCEFSSERGPRMCRFIRERDRAVNDYPSLYYPEMYILKGGYKEFFPQHPNFCEPQDYRPMNHEAFKDELKTFRLKTRSWAGERSRRELCSRLQDQ

SEQ ID NO: 6164 - protein, 1196 aa, Homo sapiens
MGHFEKGQHALLNEGEENEMEIFGYRTQGCRKSLCLAGSIFSFGILPLVFYWRPAWHVWAHCVPCSLQEADTVLLRTTDEFQIYSWKKVIWIYLSALNSAFGLTPDHPLMTDEEYIINRAIRKPDLKVRCIKVQKIRYVWNYLEGQFQKIGSLEDWLSSAKIHQKFGSGLTREEQEIRRLICGPNTIDVEVTPIWKLLIKEVLNPFYIFQLFSVCLWFSEDYKEYAFAIIIMSIISISLTVYDLREQSVKLHHLVESHNSITVSVCGRKAGVQELESRVLVPGDLLILTGNKVLMPCDAVLIEGSCVVDEGMLTGESIPVTKTPLPKMDSSVPWKTQSEADYKRHVLFCGTEVIQAKAACSGTVRAVVLQTGFNTAKGDLVRSILYPKPVNFQLYRDAIRFLLCLVGTATIGMIYTLCVYVLSGEPPEEVVRKALDVITIAVPPALPAALTTGIIYAQRRLKKRGIFCISPQRINVCGQLNLVCFDKTGTLTRDGLDLWGVVSCDRNGFQEVHSFASGQALPWGPLCAAMASCHSLILLDGTIQGDPLDLKMFEATTWEMAFSGDDFHIKGVPAHAMVVKPCRTASQVPVEGIAILHQFPFSSALQRMTVIVQEMGGDRLAFMKGAPERVASFCQPETVPTSFVSELQIYTTQGFRVIALAYKKLENDHHATTLTRETVESDLIFLGLLILENRLKEETKPVLEELISARIRTVMITGDNLQTAITVARKSGMVSESQKVILIEANETTGSSSASISWTLVEEKKHIMYGNQDNYINIRDEVSDKGREGSYHFALTGKSFHVISQHFSSLLPKILINGTIFARMSPGQKSSLVEEFQKLDYFVGMCGDGANDCGALKMAHVGISLSEQEASVASPFTSKTPNIECVPHLIKEGRAALVTSFCMFKYMALYSMIQYVGVLLLYWETNSLSNYQFLFQDLAITTLIGVTMNLNGAYPKLVPFRPAGRLISPPLLLSVIFNILLSLAMHIAGFILVQRQPWYSVEIHSACTVQNESISELTMSPTAPEKMESNSTFTSFENTTVWFLGTINCITVALVFSKGKPFRQPTYTNYIFVLVLIIQLGVCLFILFADIPELYRRLDLLCTPVLWRASIVIMLSLNFIVSLVAEEAVIENRALWMMIKRCFGYQSKSQYRIWQRDLANDPSWPPLNQTSHSDMPECGRGVSYSNPVFESNEEQL

SEQ ID NO: 6165 - protein, 1064 aa, Homo sapiens
MVLGTVLLPPNSYGRDQDTSLCCLCTEASESALPDLTDHFASCVEDGFEGDKTGGSSPEALHRPYGCDVEPQALNEAIRWSSKENLLGATESDPNLFVALYDFVASGDNTLSITKGEKLRVLGYNQNGEWSEVRSKNGQGWVPSNYITPVNSLEKHSWYHGPVSRSAAEYLLSSLINGSFLVRESESSPGQLSISLRYEGRVYHYRINTTADGKVYVTAESRFSTLAELVHHHSTVADGLVTTLHYPAPKCNKPTVYGVSPIHDKWEMERTDITMKHKLGGGQYGEVYVGVWKKYSLTVAVKTLKEDTMEVEEFLKEAAVMKEIKHPNLVQLLGVCTLEPPFYIVTEYMPYGNLLDYLRECNREEVTAVVLLYMATQISSAMEYLEKKNFIHRDLAARNCLVGENHVVKVADFGLSRLMTGDTYTAHAGAKFPIKWTAPESLAYNTFSIKSDVWAFGVLLWEIATYGMSPYPGIDLSQVYDLLEKGYRMEQPEGCPPKVYELMRACWKWSPADRPSFAETHQAFETMFHDSSISEEVAEELGRAASSSSVVPYLPRLPILPSKTRTLKKQVENKENIEGAQDATENSASSLAPGFIRGAQASSGSPALPRKQRDKSPSSLLEDAKETCFTRDRKGGFFSSFMKKRNAPTPPKRSSSFREMENQPHKKYELTGLPEQDRMAMTLPRNCQRSKLQLERTVSTSSQPEENVDRANDMLPKKSEESAAPSRERPKAKLLPRGATALPLRTPSGDLAITEKDPPGVGVAGVAAAPKGKEKNGGARLGMAGVPEDGEQPGWPSPAKAAPVLPTTHNHKVPVLISPTLKHTPADVQLIGTDSQGNKFKLLSEHQVTSSGDKDRPRRVKPKCAPPPPPVMRLLQHPSICSDPTEEPTALTAGQSTSETQEGGKKAALGAVPISGKAGRPVMPPPQVPLPTSSISPAKMANGTAGTKVALRKTKQAAEKISADKISKEALLECADLLSSALTEPVPNSQLVDTGHQLLDYCSGYVDCIPQTRNKFAFREAVSKLELSLQELQVSSAAAGVPGTNPVLNNLLSCVQEISDVVQR

SEQ ID NO: 6166 - protein, 727 aa, Homo sapiens
MAADSREEKDGELNVLDDILTEVPEQDDELYNPESEQDKNEKKGSKRKSDRMESTDTKRQKPSVHSRQLVSKPLSSSVSNNKRIVSTKGKSATEYKNEEYQRSERNKRLDADRKIRLSSSASREPYKNQPEKTCVRKRDPERRAKSPTPDGSERIGLEVDRRASRSSQSSKEEVNSEEYGSDHETGSSGSSDEQGNNTENEEEGVEEDVEEDEEVEEDAEEDEEVDEDGEEEEEEEEEEEEEEEEEEEEYEQDERDQKEEGNDYDTRSEASDSGSESVSFTDGSVRSGSGTDGSDEKKKERKRARGISPIVFDRSGSSASESYAGSEKKHEKLSSSVRAVRKDQTSKLKYVLQDARFFLIKSNNHENVSLAKAKGVWSTLPVNEKKLNLAFRSARSVILIFSVRESGKFQGFARLSSESHHGGSPIHWVLPAGMSAKMLGGVFKIDWICRRELPFTKSAHLTNPWNEHKPVKIGRDGQEIELECGTQLCLLFPPDESIDLYQVIHKMRHKRRMHSQPRSRGRPSRREPVRDVGRRRPEDYDIHNSRKKPRIDYPPEFHQRPGYLKDPRYQEVDRRFSGVRRDVFLNGSYNDYVREFHNMGPPPPWQGMPPYPGMEQPPHHPYYQHHAPPPQAHPPYSGHHPVPHEARYRDKRVHDYDMRVDDFLRRTQAVVSGRRSRPRERDRERERDRPRDNRRDRERDRGRDRERERERLCDRDRDRGERGRYRR

SEQ ID NO: 6167 - protein, 602 aa, Homo sapiens
MDSRVSGTTSNGETKPVYPVMEKKEEDGTLERGHWNNKMEFVLSVAGEIIGLGNVWRFPYLCYKNGGGAFFIPYLVFLFTCGIPVFLLETALGQYTSQGGVTAWRKICPIFEGIGYASQMIVILLNVYYIIVLAWALFYLFSSFTIDLPWGGCYHEWNTEHCMEFQKTNGSLNGTSENATSPVIEFWERRVLKISDGIQHLGALRWELALCLLLAWVICYFCIWKGVKSTGKVVYFTATFPYLMLVVLLIRGVTLPGAAQGIQFYLYPNLTRLWDPQVWMDAGTQIFFSFAICLGCLTALGSYNKYHNNCYRDCIALCFLNSGTSFVAGFAIFSILGFMSQEQGVPISEVAESGPGLAFIAYPRAVVMLPFSPLWACCFFFMVVLLGLDSQFVCVESLVTALVDMYPHVFRKKNRREVLILGVSVVSFLVGLIMLTEGGMYVFQLFDYYAASGMCLLFVAIFESLCVAWVYGAKRFYDNIEDMIGYRPWPLIKYCWLFLTPAVCTATFLFSLIKYTPLTYNKKYTYPWWGDALGWLLALSSMVCIPAWSLYRLGTLKGPFRERIRQLMCPAEDLPQRNPAGPSAPATPRTSLLRLTELESHC

SEQ ID NO: 6168 - protein, 783 aa, Homo sapiens
MSQEKNEMFESEWSKEREREKQLASGLDTAEKALKVESEELQKSKSELICLYNEVHNLPGESESKDHFLIACDLLQRENSELETKVLKLSQEFAQLNHFTLGGKTAPSNLITSENTCKDPESNEPILETEIQSRKEETEELCPKLGERKQKEIPEESVKEGSFPREGQKEEGSQQNRDMKDEEKEQQLTMKPEEIVRLREELSHINQSLLQSQSSGDSSDDSGAQHPSSGEKLKYNQQGEVQQLHQNLHRLQILCNSAENELRYERGQNLDLKQHNSLLQEENIKIKIELKHAQQKLLDSTKMCSSLTAEYKHCQQKIKELELEVLKHTQSIKSQNNLQEKLVQEKSKVADAEEKILDLQRKLEHAHKVCLTDTCISEKQQLEEKIKEATQNEAKVKQQYQEEQQKRKLLYQNVDELHRQVRTLQDKENLLEMTCSQQQSRIQQQEALLKQLENEKRKYDEHVKSNQELSEKLSKLQQEKEALREEYLRLLKLLNVHVRNYNEKHHQQKVKLQKVKYRLTNEVELRDKRINQFEDEIGILQHKIEKEKAIQDQITAQNDTLLLEKRKLQEQVIEQEQLIHSNKWTISSIQSRVLYMDKENKQLQENSLRLTQQIGFLERIIRSIHIRRGENLKEFPVPKWWHRGKLASLPPTKKQKEIYSTEVFTSNNAELQHEDESVPEATEKWKHSEQMETTISDILESEVVNEILPLSNSSFSGKGLVESFASLQETEEIKSKEAMASSKSPEKSPENLVCSQNSEAGYINVASLKETHGIQEQDQKSEL

SEQ ID NO: 6169 - protein, 3097 aa, Homo sapiens
MSGSSGGAAAPAASSGPAAAASAAGSGCGGGAGEGAEEAAKDLADIAAFFRSGFRKNDEMKAMDVLPILKEKVAYLSGGRDKRGGPILTFPARSNHDRIRQEDLRRLISYLACIPSEEVCKRGFTVIVDMRGSKWDSIKPLLKILQESFPCCIHVALIIKPDNFWQKQRTNFGSSKFEFETNMVSLEGLTKVVDPSQLTPEFDGCLEYNHEEWIEIRVAFEDYISNATHMLSRLEELQDILAKKELPQDLEGARNMIEEHSQLKKKVIKAPIEDLDLEGQKLLQRIQSSESFPKKNSGSGNADLQNLLPKVSTMLDRLHSTRQHLHQMWHVRKLKLDQCFQLRLFEQDAEKMFDWITHNKGLFLNSYTEIGTSHPHAMELQTQHNHFAMNCMNVYVNINRIMSVANRLVESGHYASQQIRQIASQLEQEWKAFAAALDERSTLLDMSSIFHQKAEKYMSNVDSWCKACGEVDLPSELQDLEDAIHHHQGIYEHITLAYSEVSQDGKSLLDKLQRPLTPGSSDSLTASANYSKAVHHVLDVIHEVLHHQRQLENIWQHRKVRLHQRLQLCVFQQDVQQVLDWIENHGEAFLSKHTGVGKSLHRARALQKRHEDFEEVAQNTYTNADKLLEAAEQLAQTGECDPEEIYQAAHQLEDRIQDFVRRVEQRKILLDMSVSFHTHVKELWTWLEELQKELLDDVYAESVEAVQDLIKRFGQQQQTTLQVTVNVIKEGEDLIQQLRDSAISSNKTPHNSSINHIETVLQQLDEAQSQMEELFQERKIKLELFLQLRIFERDAIDIISDLESWNDELSQQMNDFDTEDLTIAEQRLQHHADKALTMNNLTFDVIHQGQDLLQYVNEVQASGVELLCDRDVDMATRVQDLLEFLHEKQQELDLAAEQHRKHLEQCVQLRHLQAEVKQVLGWIRNGESMLNAGLITASSLQEAEQLQREHEQFQHAIEKTHQSALQVQQKAEAMLQANHYDMDMIRDCAEKVASHWQQLMLKMEDRLKLVNASVAFYKTSEQVCSVLESLEQEYKREEDWCGGADKLGPNSETDHVTPMISKHLEQKEAFLKACTLARRNADVFLKYLHRNSVNMPGMVTHIKAPEQQVKNILNELFQRENRVLHYWTMRKRRLDQCQQYVVFERSAKQALEWIHDNGEFYLSTHTSTGSSIQHTQELLKEHEEFQITAKQTKERVKLLIQLADGFCEKGHAHAAEIKKCVTAVDKRYRDFSLRMEKYRTSLEKALGISSDSNKSSKSLQLDIIPASIPGSEVKLRDAAHELNEEKRKSARRKEFIMAELIQTEKAYVRDLRECMDTYLWEMTSGVEEIPPGIVNKELIIFGNMQEIYEFHNNIFLKELEKYEQLPEDVGHCFVTWADKFQMYVTYCKNKPDSTQLILEHAGSYFDEIQQRHGLANSISSYLIKPVQRITKYQLLLKELLTCCEEGKGEIKDGLEVMLSVPKRANDAMHLSMLEGFDENIESQGELILQESFQVWDPKTLIRKGRERHLFLFEMSLVFSKEVKDSSGRSKYLYKSKLFTSELGVTEHVEGDPCKFALWVGRTPTSDNKIVLKASSIENKQDWIKHIREVIQERTIHLKGALKEPIHIPKTAPATRQKGRRDGEDLDSQGDGSSQPDTISIASRTSQNTLDSDKLSGGCELTVVIHDFTACNSNELTIRRGQTVEVLERPHDKPDWCLVRTTDRSPAAEGLVPCGSLCIAHSRSSMEMEGIFNHKDSLSVSSNDASPPASVASLQPHMIGAQSSPGPKRPGNTLRKWLTSPVRRLSSGKADGHVKKLAHKHKKSREVRKSADAGSQKDSDDSAATPQDETVEERGRNEGLSSGTLSKSSSSGMQSCGEEEGEEGADAVPLPPPMAIQQHSLLQPDSQDDKASSRLLVRPTSSETPSAAELVSAIEELVKSKMALEDRPSSLLVDQGDSSSPSFNPSDNSLLSSSSPIDEMEERKSSSLKRRHYVLQELVETERDYVRDLGYVVEGYMALMKEDGVPDDMKGKDKIVFGNIHQIYDWHRDFFLGELEKCLEDPEKLGSLFVKHERRLHMYIAYCQNKPKSEHIVSEYIDTFFEDLKQRLGHRLQLTDLLIKPVQRIMKYQLLLKDFLKYSKKASLDTSELERAVEVMCIVPRRCNDMMNVGRLQGFDGKIVAQGKLLLQDTFLVTDQDAGLLPRCRERRIFLFEQIVIFSEPLDKKKGFSMPGFLFKNSIKVSCLCLEENVENDPCKFALTSRTGDVVETFILHSSSPSVRQTWIHEINQILENQRNFLNALTSPIEYQRNHSGGGGGGGSGGSGGGGGSGGGGAPSGGSGHSGGPSSCGGAPSTSRSRPSRIPQPVRHHPPVLVSSAASSQAEADKMSGTSTPGPSLPPPGAAPEAGPSAPSRRPPGADAEGSEREAEPIPKMKVLESPRKGAANASGSSPDAPAKDARASLGTLPLGKPRAGAASPLNSPLSSAVPSLGKEPFPPSSPLQKGGSFWSSIPASPASRPGSFTFPGDSDSLQRQTPRHAAPGKDTDRMSTCSSASEQSVQSTQSNGSESSSSSNISTMLVTHDYTAVKEDEINVYQGEVVQILASNQQNMFLVFRAATDQCPAAEGWIPGFVLGHTSAVIVENPDGTLKKSTSWHTALRLRKKSEKKDKDGKREGKLENGYRKSREGLSNKVSVKLLNPNYIYDVPPEFVIPLSEVTCETGETVVLRCRVCGRPKASITWKGPEHNTLNNDGHYSISYSDLGEATLKIVGVTTEDDGIYTCIAVNDMGSASSSASLRVLGPGMDGIMVTWKDNFDSFYSEVAELGRGRFSVVKKCDQKGTKRAVATKFVNKKLMKRDQVTHELGILQSLQHPLLVGLLDTFETPTSYILVLEMADQGRLLDCVVRWGSLTEGKIRAHLGEVLEAVRYLHNCRIAHLDLKPENILVDESLAKPTIKLADFGDAVQLNTTYYIHQLLGNPEFAAPEIILGNPVSLTSDTWSVGVLTYVLLSGVSPFLDDSVEETCLNICRLDFSFPDDYFKGVSQKAKEFVCFLLQEDPAKRPSAALALQEQWLQAGNGRSTGVLDTSRLTSFIERRKHQNDVRPIRSIKNFLQSRLLPRV

SEQ ID NO: 6170 - protein, 2250 aa, Homo sapiens
MDEEEDGAGAEESGQPRSFMRLNDLSGAGGRPGPGSAEKDPGSADSEAEGLPYPALAPVVFFYLSQDSRPRSWCLRTVCNPWFERISMLVILLNCVTLGMFRPCEDIACDSQRCRILQAFDDFIFAFFAVEMVVKMVALGIFGKKCYLGDTWNRLDFFIVIAGMLEYSLDLQNVSFSAVRTVRVLRPLRAINRVPSMRILVTLLLDTLPMLGNVLLLCFFVFFIFGIVGVQLWAGLLRNRCFLPENFSLPLSVDLERYYQTENEDESPFICSQPRENGMRSCRSVPTLRGDGGGGPPCGLDYEAYNSSSNTTCVNWNQYYTNCSAGEHNPFKGAINFDNIGYAWIAIFQVITLEGWVDIMYFVMDAHSFYNFIYFILLIIVGSFFMINLCLVVIATQFSETKQRESQLMREQRVRFLSNASTLASFSEPGSCYEELLKYLVYILRKAARRLAQVSRAAGVRVGLLSSPAPLGGQETQPSSSCSRSHRRLSVHHLVHHHHHHHHHYHLGNGTLRAPRASPEIQDRDANGSRRLMLPPPSTPALSGAPPGGAESVHSFYHADCHLEPVRCQAPPPRSPSEASGRTVGSGKVYPTVHTSPPPETLKEKALVEVAASSGPPTLTSLNIPPGPYSSMHKLLETQSTGACQSSCKISSPCLKADSGACGPDSCPYCARAGAGEVELADREMPDSDSEAVYEFTQDAQHSDLRDPHSRRQRSLGPDAEPSSVLAFWRLICDTFRKIVDSKYFGRGIMIAILVNTLSMGIEYHEQPEELTNALEISNIVFTSLFALEMLLKLLVYGPFGYIKNPYNIFDGVIVVISVWEIVGQQGGGLSVLRTFRLMRVLKLVRFLPALQRQLVVLMKTMDNVATFCMLLMLFIFIFSILGMHLFGCKFASERDGDTLPDRKNFDSLLWAIVTVFQILTQEDWNKVLYNGMASTSSWAALYFIALMTFGNYVLFNLLVAILVEGFQAEGDANKSESEPDFFSPSLDGDGDRKKCLALVSLGEHPELRKSLLPPLIIHTAATPMSLPKSTSTGLGEALGPASRRTSSSGSAEPGAAHEMKSPPSARSSPHSPWSAASSWTSRRSSRNSLGRAPSLKRRSPSGERRSLLSGEGQESQDEEESSEEERASPAGSDHRHRGSLEREAKSSFDLPDTLQVPGLHRTASGRGSASEHQDCNGKSASGRLARALRPDDPPLDGDDADDEGNLSKGERVRAWIRARLPACCLERDSWSAYIFPPQSRFRLLCHRIITHKMFDHVVLVIIFLNCITIAMERPKIDPHSAERIFLTLSNYIFTAVFLAEMTVKVVALGWCFGEQAYLRSSWNVLDGLLVLISVIDILVSMVSDSGTKILGMLRVLRLLRTLRPLRVISRAQGLKLVVETLMSSLKPIGNIVVICCAFFIIFGILGVQLFKGKFFVCQGEDTRNITNKSDCAEASYRWVRHKYNFDNLGQALMSLFVLASKDGWVDIMYDGLDAVGVDQQPIMNHNPWMLLYFISFLLIVAFFVLNMFVGVVVENFHKCRQHQEEEEARRREEKRLRRLEKKRRSKEKQMAEAQCKPYYSDYSRFRLLVHHLCTSHYLDLFITGVIGLNVVTMAMEHYQQPQILDEALKICNYIFTVIFVLESVFKLVAFGFRRFFQDRWNQLDLAIVLLSIMGITLEEIEVNASLPINPTIIRIMRVLRIARVLKLLKMAVGMRALLDTVMQALPQVGNLGLLFMLLFFIFAALGVELFGDLECDETHPCEGLGRHATFRNFGMAFLTLFRVSTGDNWNGIMKDTLRDCDQESTCYNTVISPIYFVSFVLTAQFVLVNVVIAVLMKHLEESNKEAKEEAELEAELELEMKTLSPQPHSPLGSPFLWPGVEGPDSPDSPKPGALHPAAHARSASHFSLEHPTMQPHPTELPGPDLLTVRKSGVSRTHSLPNDSYMCRHGSTAEGPLGHRGWGLPKAQSGSVLSVHSQPADTSYILQLPKDAPHLLQPHSAPTWGTIPKLPPPGRSPLAQRPLRRQAAIRTDSLDVQGLGSREDLLAEVSGPSPPLARAYSFWGQSSTQAQQHSRSHSKISKHMTPPAPCPGPEPNWGKGPPETRSSLELDTELSWISGDLLPPGGQEEPPSPRDLKKCYSVEAQSCQRRPTSWLDEQRRHSIAVSCLDSGSQPHLGTDPSNLGGQPLGGPGSRPKKKLSPPSITIDPPESQGPRTPPSPGICLRRRAPSSDSKDPLASGPPDSMAASPSPKKDVLSLSGLSSDPADLDP

SEQ ID NO: 6171 - protein, 260 aa, Homo sapiens
MSDPITLNVGGKLYTTSLATLTSFPDSMLGAMFSGKMPTKRDSQGNCFIDRDGKVFRYILNFLRTSHLDLPEDFQEMGLLRREADFYQVQPLIEALQEKEVELSKAEKNAMLNITLNQRVQTVHFTVREAPQIYSLSSSSMEVFNANIFSTSCLFLKLLGSKLFYCSNGNLSSITSHLQDPNHLTLDWVANVEGLPEEEYTKQNLKRLWVVPANKQINSFQVFVEEVLKIALSDGFCIDSSHPHALDFMNNKIIRLIRYR

SEQ ID NO: 6172 - protein, 906 aa, Homo sapiens
MQHIFAFFCTGFLGAVVGANFPNNIQIGGLFPNQQSQEHAAFRFALSQLTEPPKLLPQIDIVNISDSFEMTYRFCSQFSKGVYAIFGFYERRTVNMLTSFCGALHVCFITPSFPVDTSNQFVLQLRPELQDALISIIDHYKWQKFVYIYDADRGLSVLQKVLDTAAEKNWQVTAVNILTTTEEGYRMLFQDLEKKKERLVVVDCESERLNAILGQIIKLEKNGIGYHYILANLGFMDIDLNKFKESGANVTGFQLVNYTDTIPAKIMQQWKNSDARDHTRVDWKRPKYTSALTYDGVKVMAEAFQSLRRQRIDISRRGNAGDCLANPAVPWGQGIDIQRALQQVRFEGLTGNVQFNEKGRRTNYTLHVIEMKHDGIRKIGYWNEDDKFVPAATDAQAGGDNSSVQNRTYIVTTILEDPYVMLKKNANQFEGNDRYEGYCVELAAEIAKHVGYSYRLEIVSDGKYGARDPDTKAWNGMVGELVYGRADVAVAPLTITLVREEVIDFSKPFMSLGISIMIKKPQKSKPGVFSFLDPLAYEIWMCIVFAYIGVSVVLFLVSRFSPYEWHSEEFEEGRDQTTSDQSNEFGIFNSLWFSLGAFMQQGCDISPRSLSGRIVGGVWWFFTLIIISSYTANLAAFLTVERMVSPIESAEDLAKQTEIAYGTLEAGSTKEFFRRSKIAVFEKMWTYMKSAEPSVFVRTTEEGMIRVRKSKGKYAYLLESTMNEYIEQRKPCDTMKVGGNLDSKGYGIATPKGSALRGPVNLAVLKLSEQGVLDKLKSKWWYDKGECGSKDSGSKDKTSALSLSNVAGVFYILIGGLGLAMLVALIEFCYKSRSESKRMKGFCLIPQQSINEAIRTSTLPRNSGAGASSGGSGENGRVVSHDFPKSMQSIPCMSHSSGMPLGATGL

SEQ ID NO: 6173 - protein, 670 aa, Homo sapiens
MHLLGPWLLLLVLEYLAFSDSSKWVFEHPETLYAWEGACVWIPCTYRALDGDLESFILFHNPEYNKNTSKFDGTRLYESTKDGKVPSEQKRVQFLGDKNKNCTLSIHPVHLNDSGQLGLRMESKTEKWMERIHLNVSERPFPPHIQLPPEIQESQEVTLTCLLNFSCYGYPIQLQWLLEGVPMRQAAVTSTSLTIKSVFTRSELKFSPQWSHHGKIVTCQLQDADGKFLSNDTVQLNVKHPPKKVTTVIQNPMPIREGDTVTLSCNYNSSNPSVTRYEWKPHGAWEEPSLGVLKIQNVGWDNTTIACAACNSWCSWASPVALNVQYAPRDVRVRKIKPLSEIHSGNSVSLQCDFSSSHPKEVQFFWEKNGRLLGKESQLNFDSISPEDAGSYSCWVNNSIGQTASKAWTLEVLYAPRRLRVSMSPGDQVMEGKSATLTCESDANPPVSHYTWFDWNNQSLPYHSQKLRLEPVKVQHSGAYWCQGTNSVGKGRSPLSTLTVYYSPETIGRRVAVGLGSCLAILILAICGLKLQRRWKRTQSQQGLQENSSGQSFFVRNKKVRRAPLSEGPHSLGCYNPMMEDGISYTTLRFPEMNIPRTGDAESSEMQRPPPDCDDTVTYSALHKRQVGDYENVIPDFPEDEGIHYSELIQFGVGERPQAQENVDYVILKH

SEQ ID NO: 6174 - protein, 383 aa, Homo sapiens
MSPEVALNRISPMLSPFISSVVRNGKVGLDATNCLRITDLKSGCTSLTPGPNCDRFKLHIPYAGETLKWDIIFNAQYPELPPDFIFGEDAEFLPDPSALQNLASWNPSNPECLLLVVKELVQQYHQFQCSRLRESSRLMFEYQTLLEEPQYGENMEIYAGKKNNWTGEFSARFLLKLPVDFSNIPTYLLKDVNEDPGEDVALLSVSFEDTEATQVYPKLYLSPRIEHALGGSSALHIPAFPGGGCLIDYVPQVCHLLTNKVQYVIQGYHKRREYIAAFLSHFGTGVVEYDAEGFTKLTLLLMWKDFCFLVHIDLPLFFPRDQPTLTFQSVYHFTNSGQLYSQAQKNYPYSPRWDGNEMAKRAKAYFKTFVPQFQEAAFANGKL

SEQ ID NO: 6175 - protein, 445 aa, Homo sapiens
MDLELDEYYNKTLATENNTAATRNSDFPVWDDYKSSVDDLQYFLIGLYTFVSLLGFMGNLLILMALMKKRNQKTTVNFLIGNLAFSDILVVLFCSPFTLTSVLLDQWMFGKVMCHIMPFLQCVSVLVSTLILISIAIVRYHMIKHPISNNLTANHGYFLIATVWTLGFAICSPLPVFHSLVELQETFGSALLSSRYLCVESWPSDSYRIAFTISLLLVQYILPLVCLTVSHTSVCRSISCGLSNKENRLEENEMINLTLHPSKKSGPQVKLSGSHKWSYSFIKKHRRRYSKKTACVLPAPERPSQENHSRILPENFGSVRSQLSSSSKFIPGVPTCFEIKPEENSDVHELRVKRSVTRIKKRSRSVFYRLTILILVFAVSWMPLHLFHVVTDFNDNLISNRHFKLVYCICHLLGMMSCCLNPILYGFLNNGIKADLVSLIHCLHM

SEQ ID NO: 6176 - protein, 832 aa, Homo sapiens
MAMRSGRHPSLLLLLVLLLWLLQVSIIDSVQQETDDLTKQTKEKIYQPLRRSKRRWVITTLELEEEDPGPFPKLIGELFNNMSYNMSLMYLISGPGVDEYPEIGLFSLEDHENGRIYVHRPVDREMTPSFTVYFDVVERSTGKIVDTSLIFNIRISDVNDHAPQFPEKEFNITVQENQSAGQPIFQMLAVDLDEENTPNSQVLYFLISQTPLLKESGFRVDRLSGEIRLSGCLDYETAPQFTLLIRARDCGEPSLSSTTTVHVDVQEGNNHRPAFTQENYKVQIPEGRASQGVLRLLVQDRDSPFTSAWRAKFNILHGNEEGHFDISTDPETNEGILNVIKPLDYETRPAQSLIIVVENEERLVFCERGKLQPPRKAAASATVSVQVTDANDPPAFHPQSFIVNKEEGARPGTLLGTFNAMDPDSQIRYELVHDPANWVSVDKNSGVVITVEPIDRESPHVNNSFYVIIIHAVDDGFPPQTATGTLMLFLSDINDNVPTLRPRSRYMEVCESAVHEPLHIEAEDPDLEPFSDPFTFELDNTWGNAEDTWKLGRNWGQSVELLTLRSLPRGNYLVPLFIGDKQGLSQKQTVHVRICPCASGLTCVELADAEVGLHVGALFPVCAAFVALAVALLFLLRCYFVLEPKRHGCSVSNDEGHQTLVMYNAESKGTSAQTWSDVEGQRPALLICTAAAGPTQGVKDLEEVPPSAASQSAQARCALGSWGYGKPFEPRSVKNIHSTPAYPDATMHRQLLAPVEGRMAETLNQKLHVANVLEDDPGYLPHVYSEEGECGGAPSLSSLASLEQELQPDLLDSLGSKATPFEEIYSESGVPS

SEQ ID NO: 6177 - protein, 255 aa, Homo sapiens
MILNKALLLGALALTTVMSPCGGEDIVADHVASCGVNLYQFYGPSGQYTHEFDGDEQFYVDLERKETAWRWPEFSKFGGFDPQGALRNMAVAKHNLNIMIKRYNSTAATNEVPEVTVFSKSPVTLGQPNTLICLVDNIFPPVVNITWLSNGQSVTEGVSETSFLSKSDHSFFKISYLTFLPSADEIYDCKVEHWGLDQPLLKHWEPEIPAPMSELTETVVCALGLSVGLMGIVVGTVFIIQGLRSVGASRHQGPL

SEQ ID NO: 6178 - protein, 400 aa, Homo sapiens
MEVLRPQLIRIDGRNYRKNPVQEQTYQHEEDEEDFYQGSMECADEPCDAYEVEQTPQGFRSTLRAPSLLYNLIHLNTSNDCGFQKITLDCQNIYTWKSRHIVGKRGDTRKKIEMETKTSISIPKPGQDGEIVITGQHRNGVISARTRIDVLLDTFRRKQPFTHFLAFFLNEVEVQEGFLRFQEEVLAKCSMDHGVDSSIFQNPKKLHLTIGMLVLLSEEEIQQTCEMLQQCKEEFINDISGGKPLEVEMAGIEYMNDDPGMVDVLYAKVHMKDGSNRLQELVDRVLERFQASGLIVKEWNSVKLHATVMNTLFRKDPNAEGRYNLYTAEGKYIFKERESFDGRNILKSFALLPRLEYNDAISAHCNLCLPGSSDSPASASQVAGITGVSDAYSQSLPGKS

SEQ ID NO: 6179 - protein, 612 aa, Homo sapiens
MSDKSELKAELERKKQRLAQIREEKKRKEEERKKKETDQKKEAVAPVQEESDLEKKRREAEALLQSMGLTPESPIVPPPMSPSSKSVSTPSEAGSQDSGDGAVGSRRGPIKLGMAKITQVDFPPREIVTYTKETQTPVMAQPKEDEEEDDDVVAPKPPIEPEEEKTLKKDEENDSKAPPHELTEEEKQQILHSEEFLSFFDHSTRIVERALSEQINIFFDYSGRDLEDKEGEIQAGAKLSLNRQFFDERWSKHRVVSCLDWSSQYPELLVASYNNNEDAPHEPDGVALVWNMKYKKTTPEYVFHCQSAVMSATFAKFHPNLVVGGTYSGQIVLWDNRSNKRTPVQRTPLSAAAHTHPVYCVNVVGTQNAHNLISISTDGKICSWSLDMLSHPQDSMELVHKQSKAVAVTSMSFPVGDVNNFVVGSEEGSVYTACRHGSKAGISEMFEGHQGPITGIHCHAAVGAVDFSHLFVTSSFDWTVKLWTTKNNKPLYSFEDNADYVYDVMWSPTHPALFACVDGMGRLDLWNLNNDTEVPTASISVEGNPALNRVRWTHSGREIAVGDSEGQIVIYDVGEQIAVPRNDEWARFGRTLAEINANRADAEEEAATRIPA

SEQ ID NO: 6180 - protein, 591 aa, Homo sapiens
MGNLALGRKLWADTTCGQNATELYCFYSENTDLTCRQPKCDKCNAAYPHLAHLPSAMADSSFRFPRTWWQSAEDVHREKIQLDLEAEFYFTHLIVMFKSPRPAAMVLDRSQDFGKTWKPYKYFATNCSATFGLEDDVVKKGAICTSKYSSPFPCTGGEVIFKALSPPYDTENPYSAKVQEQLKITNLRVQLLKRQSCPCQRNDLNEEPQHFTHYAIYDFIVKGSCFCNGHADQCIPVHGFRPVKAPGTFHMVHGKCMCKHNTAGSHCQHCAPLYNDRPWEAADGKTGAPNECRTCKCNGHADTCHFDVNVWEASGNRSGGVCDDCQHNTEGQYCQRCKPGFYRDLRRPFSAPDACKPCSCHPVGSAVLPANSVTFCDPSNGDCPCKPGVAGRRCDRCMVGYWGFGDYGCRPCDCAGSCDPITGDCISSHTDIDWYHEVPDFRPVHNKSEPAWEWEDAQGFSALLHSGKCECKEQTLGNAKAFCGMKYSYVLKIKILSAHDKGTHVEVNVKIKKVLKSTKLKIFRGKRTLYPESWTDRGCTCPILNPGLEYLVAGHEDIRTGKLIVNMKSFVQHWKPSLGRKVMDILKRECK

SEQ ID NO: 6181 - protein, 1129 aa, Homo sapiens
MGDQQLYKTNHVAHGSENLFYQQPPLGVHSGLNHNYGNAVTGGGMDAPQASPISPHFPQDTRDGLGLPVGSKNLGQMDTSRQGGWGSHAGPGNHVQLRGNLANSNMMWGAPAQAEPTDGYQYTYSQASEIRTQKLTSGVLHKLDSFTQVFANQNLRIQVNNMAQVLHTQSAVMDGAPDSALRQLLSQKPMEPPAPAIPSRYQQVPQQPHPGFTGGLSKPALQVGQHPTQGHLYYDYQQPLAQVPVQGGQPLQAPQMLSQHMQQMQQHQYYPPQQQQQAGQQRISMQEIQTQPQQIRPSQPQPPPQQQQPQQLQLQQRQGSMQIPQYYQPQPMMQHLQEQQQQQMHLQPPSYHRDPHQYTPEQAHTVQLIPLGSMSQYYYQEPQQPYSHPLYQQSHLSQHQQREDSQLKTYSSDRQAQAMLSSHGDLGPPDTGMGDPASSDLTRVSSTLPHRPLLSPSGIHLNNMGPQHQQLSPSAMWPQMHLPDGRAQPGSPESSGQPKGAFGEQFDAKNKLTCSICLKEFKNLPALNGHMRSHGGMRASPNLKQEIPRKHQPSVPKAEEPLKTVQEKKKFRHRPEPLFIPPPPSYNPNPAASYSGATLYQSQLRSPRVLGDHLLLDPTHELPPYTPPPMLSPVRQGSGLFSNVLISGHGPGAHPQLPLTPLTPTPRVLLCRSNSIDGSNVTVTPGPGEQTVDVEPRINIGLRFQAEIPELQDISALAQDTHKATLVWKPWPELENHDLQQRVENLLNLCCSSALPGGGTNSEFALHSLFEAKGDVMVALEMLLLRKPVRLKCHPLANYHYAGSDKWTSLERKLFNKALATYSKDFIFVQKMVKSKTVAQCVEYYYTWKKIMRLGRKHRTRLAEIIDDCVTSEEEEELEEEEEEDPEEDRKSTKEEESEVPKSPEPPPVPVLAPTEGPPLQALGQPSGSFICEMPNCGADCRCHVTPFLPQVFSSRQALNGHARIHGGTNQVTKARGAIPSGKQKPGGTQSGYCSVKSSPSHSTTSGETDPTTIFPCKECGKVFFKIKSRNAHMKTHRQQEEQQRQKAQKAAFAAEMAATIERTTGPVGAPGLLPLDQLSLIKPIKDVDILDDDVVQQLGGVMEEAEVVDTDLLLDDQDSVLLQGDAEL

SEQ ID NO: 6182 - protein, 1166 aa, Homo sapiens
MDLGTAEGTRCTDPPAGKPAMAPKRKGGLKLNAICAKLSRQVVVEKRADAGSHTEGSPSQPRDQERSGPESGAARAPRSEEDKRRAVIEKWVNGEYSEEPAPTPVLGRIAREGLELPPEGVYMVQPQGCSDEEDHAEEPSKDGGALEEKDSDGAASKEDSGPSTRQASGEASSLRDYAASTMTEFLGMFGYDDQNTRDELARKISFEKLHAGSTPEAATSSMLPTSEDTLSKRARFSKYEEYIRKLKAGEQLSWPAPSTKTEERVGKEVVGTLPGLRLPSSTAHLETKATILPLPSHSSVQMQNLVARASKYDFFIQKLKTGENLRPQNGSTYKKPSKYDLENVKYLHLFKPGEGSPDMGGAIAFKTGKVGRPSKYDVRGIQKPGPAKVPPTPSLAPAPLASVPSAPSAPGPGPEPPASLSFNTPEYLKSTFSKTDSITTGTVSTVKNGLPTDKPAVTEDVNIYQKYIARFSGSQHCGHIHCAYQYREHYHCLDPECNYQRFTSKQDVIRHYNMHKKRDNSLQHGFMRFSPLDDCSVYYHGCHLNGKSTHYHCMQVGCNKVYTSTSDVMTHENFHKKNTQLINDGFQRFRATEDCGTADCQFYGQKTTHFHCRRPGCTFTFKNKCDIEKHKSYHIKDDAYAKDGFKKFYKYEECKYEGCVYSKATNHFHCIRAGCGFTFTSTSQMTSHKRKHERRHIRSSGALGLPPSLLGAKDTEHEESSNDDLVDFSALSSKNSSLSASPTSQQSSASLAAATAATEAGPSATKPPNSKISGLLPQGLPGSIPLALALSNSGLPTPTPYFPILAGRGSTSLPVGTPSLLGAVSSGSAASATPDTPTLVASGAGDSAPVAAASVPAPPASIMERISASKGLISPMMARLAAAALKPSATFDPGSGQQVTPARFPPAQVKPEPGESTGAPGPHEASQDRSLDLTVKEPSNESNGHAVPANSSLLSSLMNKMSQGNPGLGSLLNIKAEAEGSPAAEPSPFLGKAVKALVQEKLAEPWKVYLRRFGTKDFCDGQCDFLHKAHFHCVVEECGALFSTLDGAIKHANFHFRTEGGAAKGNTEAAFPASAAETKPPMAPSSPPVPPVTTATVSSLEGPAPSPASVPSTPTLLAWKQLASTIPQMPQIPASVPHLPASPLATTSLENAKPQVKPGFLQFQEK

SEQ ID NO: 6183 - protein, 406 aa, Homo sapiens
MLLLLLLLPLLWGTKGMEGDRQYGDGYLLQVQELVTVQEGLCVHVPCSFSYPQDGWTDSDPVHGYWFRAGDRPYQDAPVATNNPDREVQAETQGRFQLLGDIWSNDCSLSIRDARKRDKGSYFFRLERGSMKWSYKSQLNYKTKQLSVFVTDPPWNLTMTVFQGDATASTALGNGSSLSVLEGQSLRLVCAVNSNPPARLSWTRGSLTLCPSRSSNPGLLELPRVHVRDEGEFTCRAQNAQGSQHISLSLSLQNEGTGTSRPVSQVTLAAVGGAGATALAFLSFCIIFIIVRSCRKKSARPAAGVGDTGMEDAKAIRGSASQGPLTESWKDGNPLKKPPPAVAPSSGEEGELHYATLSFHKVKPQDPQGQEATDSEYSEIKIHKRETAETQACLRNHNPSSKEVRG

SEQ ID NO: 6184 - protein, 561 aa, Homo sapiens
MSTSWSDRLQNAADMPANMDKHALKKYRREAYHRVFVNRSLAMEKIKCFGFDMDYTLAVYKSPEYESLGFELTVERLVSIGYPQELLSFAYDSTFPTRGLVFDTLYGNLLKVDAYGNLLVCAHGFNFIRGPETREQYPNKFIQRDDTERFYILNTLFNLPETYLLACLVDFFTNCPRYTSCETGFKDGDLFMSYRSMFQDVRDAVDWVHYKGSLKEKTVENLEKYVVKDGKLPLLLSRMKEVGKVFLATNSDYKYTDKIMTYLFDFPHGPKPGSSHRPWQSYFDLILVDARKPLFFGEGTVLRQVDTKTGKLKIGTYTGPLQHGIVYSGGSSDTICDLLGAKGKDILYIGDHIFGDILKSKKRQGWRTFLVIPELAQELHVWTDKSSLFEELQSLDIFLAELYKHLDSSSNERPDISSIQRRIKKVTHDMDMCYGMMGSLFRSGSRQTLFASQVMRYADLYAASFINLLYYPFSYLFRAAHVLMPHESTVEHTHVDINEMESPLATRNRTSVDFKDTDYKRHQLTRSISEIKPPNLFPLAPQEITHCHDEDDDEEEEEEEE

SEQ ID NO: 6185 - protein, 430 aa, Homo sapiens
MLVSLKMSYKAAAGEDYKADCPPGNPAPTSNHGPDATEAEEDFVDPWTVQTSSAKGIDYDKLIVRFGSSKIDKELINRIERATGQRPHHFLRRGIFFSHRDMNQVLDAYENKKPFYLYTGRGPSSEAMHVGHLIPFIFTKWLQDVFNVPLVIQMTDDEKYLWKDLTLDQAYSYAVENAKDIIACGFDINKTFIFSDLDYMGMSSGFYKNVVKIQKHVTFNQVKGIFGFTDSDCIGKISFPAIQAAPSFSNSFPQIFRDRTDIQCLIPCAIDQDPYFRMTRDVAPRIGYPKPALLHSTFFPALQGAQTKMSASDPNSSIFLTDTAKQIKTKVNKHAFSGGRDTIEEHRQFGGNCDVDVSFMYLTFFLEDDDKLEQIRKDYTSGAMLTGELKKALIEVLQPLIAEHQARRKEVTDEIVKEFMTPRKLSFDFQ

SEQ ID NO: 6186 - protein, 980 aa, Homo sapiens
MTSPQLEWTLQTLLEQLNEDELKSFKSLLWAFPLEDVLQKTPWSEVEEADGKKLAEILVNTSSENWIRNATVNILEEMNLTELCKMAKAEMMEDGQVQEIDNPELGDAEEDSELAKPGEKEGWRNSMEKQSLVWKNTFWQGDIDNFHDDVTLRNQRFIPFLNPRTPRKLTPYTVVLHGPAGVGKTTLAKKCMLDWTDCNLSPTLRYAFYLSCKELSRMGPCSFAELISKDWPELQDDIPSILAQAQRILFVVDGLDELKVPPGALIQDICGDWEKKKPVPVLLGSLLKRKMLPRAALLVTTRPRALRDLQLLAQQPIYVRVEGFLEEDRRAYFLRHFGDEDQAMRAFELMRSNAALFQLGSAPAVCWIVCTTLKLQMEKGEDPVPTCLTRTGLFLRFLCSRFPQGAQLRGALRTLSLLAAQGLWAQMSVFHREDLERLGVQESDLRLFLDGDILRQDRVSKGCYSFIHLSFQQFLTALFYALEKEEGEDRDGHAWDIGDVQKLLSGEERLKNPDLIQVGHFLFGLANEKRAKELEATFGCRMSPDIKQELLQCKAHLHANKPLSVTDLKEVLGCLYESQEEELAKVVVAPFKEISIHLTNTSEVMHCSFSLKHCQDLQKLSLQVAKGVFLENYMDFELDIEFERCTYLTIPNWARQDLRSLRLWTDFCSLFSSNSNLKFLEVKQSFLSDSSVRILCDHVTRSTCHLQKVEIKNVTPDTAYRDFCLAFIGKKTLTHLTLAGHIEWERTMMLMLCDLLRNHKCNLQYLRLGGHCATPEQWAEFFYVLKANQSLKHLRLSANVLLDEGAMLLYKTMTRPKHFLQMLSLENCRLTEASCKDLAAVLVVSKKLTHLCLAKNPIGDTGVKFLCEGLSYPDCKLQTLVLQQCSITKLGCRYLSEALQEACSLTNLDLSINQIARGLWILCQALENPNCNLKHLRLKTYETNLEIKKLLEEVKEKNPKLTIDCNASGATAPPCCDFFC

SEQ ID NO: 6187 - protein, 117 aa, Homo sapiens
MSEKKNCKNSSTNNNQTQDPSRNELQVPRSFVDRVVQDERDVQSQSSSTINTLLTLLDCLADYIMERVGLEASNNGSMRNTSQDREREVDNNREPHSAESDVTRFLFDEMPKSRKND

SEQ ID NO: 6188 - protein, 287 aa, Homo sapiens
MSSTLPALLCVGLCLSQRISAQQQTLPKPFIWAEPHFMVPKEKQVTICCQGNYGAVEYQLHFEGSLFAVDRPKPPERINKVQFYIPDMNSRMAGQYSCIYRVGELWSEPSNLLDLVVTEMYDTPTLSVHPGPEVISGEKVTFYCRLDTATSMFLLLKEGRSSHVQRGYGKVQAEFPLGPVTTAHRGTYRCFGSYNNHAWSFPSEPVKLLVTGDIENTSLAPEDPTFPDHALWDHTAQNLLRMGLAFLVLVALVWFLVEDWLSRKRTRERASRASTWEGRRRLNTQTL

SEQ ID NO: 6189 - protein, 362 aa, Homo sapiens
MLQKPKSVKLRALRSPRKFGVAGRSCQEVLRKGCLRFQLPERGSRLCLYEDGTELTEDYFPSVPDNAELVLLTLGQAWQGCEWQGLWRMCLLLDRHLLFVPLVADVSDIRRFLSAFHEPQVGLIQAAQQLLCDEQAPQRQRLLADLLHNVSQNIAAETRAEDPPWFEGLESRFQSKSGYLRYSCESRIRSYLREVSSYPSTVGAEAQEEFLRVLGSMCQRLRSMQYNGSYFDRGAKGGSRLCTPEGWFSCQGPFDMDSCLSRHSINPYSNRESRILFSTWNLDHIIEKKRTIIPTLVEAIKEQDGREVDWEYFYGLLFTSENLKLVHIVCHKKTTHKLNCDPSRIYKPQTRLKRKQPVRKRQ

SEQ ID NO: 6190 - protein, 1024 aa, Homo sapiens
MSNAKERKHAKKMRNQPTNVTLSSGFVADRGVKHHSGGEKPFQAQKQEPHPGTSRQRQTRVNPHSLPDPEVNEQSSSKGMFRKKGGWKAGPEGTSQEIPKYITASTFAQARAAEISAMLKAVTQKSSNSLVFQTLPRHMRRRAMSHNVKRLPRRLQEIAQKEAEKAVHQKKEHSKNKCHKARRCHMNRTLEFNRRQKKNIWLETHIWHAKRFHMVKKWGYCLGERPTVKSHRACYRAMTNRCLLQDLSYYCCLELKGKEEEILKALSGMCNIDTGLTFAAVHCLSGKRQGSLVLYRVNKYPREMLGPVTFIWKSQRTPGDPSESRQLWIWLHPTLKQDILEEIKAACQCVEPIKSAVCIADPLPTPSQEKSQTELPDEKIGKKRKRKDDGENAKPIKKIIGDGTRDPCLPYSWISPTTGIIISDLTMEMNRFRLIGPLSHSILTEAIKAASVHTVGEDTEETPHRWWIETCKKPDSVSLHCRQEAIFELLGGITSPAEIPAGTILGLTVGDPRINLPQKKSKALPNPEKCQDNEKVRQLLLEGVPVECTHSFIWNQDICKSVTENKISDQDLNRMRSELLVPGSQLILGPHESKIPILLIQQPGKVTGEDRLGWGSGWDVLLPKGWGMAFWIPFIYRGVRVGGLKESAVHSQYKRSPNVPGDFPDCPAGMLFAEEQAKNLLEKYKRRPPAKRPNYVKLGTLAPFCCPWEQLTQDWESRVQAYEEPSVASSPNGKESDLRRSEVPCAPMPKKTHQPSDEVGTSIEHPREAEEVMDAGCQESAGPERITDQEASENHVAATGSHLCVLRSRKLLKQLSAWCGPSSEDSRGGRRAPGRGQQGLTREACLSILGHFPRALVWVSLSLLSKGSPEPHTMICVPAKEDFLQLHEDWHYCGPQESKHSDPFRSKILKQKEKKKREKRQKPGRASSDGPAGEEPVAGQEALTLGLWSGPLPRVTLHCSRTLLGFVTQGDFSMAVGCGEALGFVSLTGLLDMLSSQPAAQRGLVLLRPPASLQYRFARIAIEV

SEQ ID NO: 6191 - protein, 457 aa, Homo sapiens
MAAEAADLGLGAAVPVELRRERRMVCVEYPGVVRDVAKMLPTLGGEEGVSRIYADPTKRLELYFRPKDPYCHPVCANRFSTSSLLLRIRKRTRRQKGVLGTEAHSEVTFDMEILGIISTIYKFQGMSDFQYLAVHTEAGGKHTSMYDKVLMLRPEKEAFFHQELPLYIPPPIFSRLDAPVDYFYRPETQHREGYNNPPISGENLIGLSRARRPHNAIFVNFEDEEVPKHLWIRFGYDPRKNPDAKIYQVLDFRIRCGMKHGYAPSDLPVKAKRSTYNYSLPITVKKTSSQLVTMHDLKQGLGPSGTSGARKPASSKYKLKVSLQTLRDSVYIFREGALPPYRQMFYQLCDLNVEELQKIIHRNDGAENSCTERDGWCLPKTSDELRDTMSLMIRQTIRSKRPALFSSSAKADGGKEQLTYESGEDEEDEEEEEEEEEDFKPSDGSENEMETEILDYV

SEQ ID NO: 6192 - protein, 550 aa, Homo sapiens
MAEDWLDCPALGPGWKRREVFRKSGATCGRSDTYYQSPTGDRIRSKVELTRYLGPACDLTLFDFKQGILCYPAPKAHPVAVASKKRKKPSRPAKTRKRQVGPQSGEVRKEAPRDETKADTDTAPASFPAPGCCENCGISFSGDGTQRQRLKTLCKDCRAQRIAFNREQRMFKRVGCGECAACQVTEDCGACSTCLLQLPHDVASGLFCKCERRRCLRIVERSRGCGVCRGCQTQEDCGHCPICLRPPRPGLRRQWKCVQRRCLRGKHARRKGGCDSKMAARRRPGAQPLPPPPPSQSPEPTEPHPRALAPSPPAEFIYYCVDEDELQPYTNRRQNRKCGACAACLRRMDCGRCDFCCDKPKFGGSNQKRQKCRWRQCLQFAMKRLLPSVWSESEDGAGSPPPYRRRKRPSSARRHHLGPTLKPTLATRTAQPDHTQAPTKQEAGGGFVLPPPGTDLVFLREGASSPVQVPGPVAASTEALLQAVDPGLPSVKQEPPDPEEDKEENKDDSASKLAPEEEAGGAGTPVEPTTQPQYSGNFDNDLYEIYLIDI

SEQ ID NO: 6193 - protein, 381 aa, Homo sapiens
MDGVGVPASMYGDPHAPRPIPPVHHLNHGPPLHATQHYGAHAPHPNVMPASMGSAVNDALKRDKDAIYGHPLFPLLALVFEKCELATCTPREPGVAGGDVCSSDSFNEDIAVFAKQVRAEKPLFSSNPELDNLMIQAIQVLRFHLLELEKVHELCDNFCHRYISCLKGKMPIDLVIDERDGSSKSDHEELSGSSTNLADHNPSSWRDHDDATSTHSAGTPGPSSGGHASQSGDNSSEQGDGLDNSVASPGTGDDDDPDKDKKRQKKRGIFPKVATNIMRAWLFQHLTHPYPSEEQKKQLAQDTGLTILQVNNWFINARRRIVQPMIDQSNRAVSQGAAYSPEGQPMGSFVLDGQQHMGIRPAGPMSGMGMNMGMDGQWHYM

SEQ ID NO: 6194 - protein, 2019 aa, Homo sapiens
MGAMTQLLAGVFLAFLALATEGGVLKKVIRHKRQSGVNATLPEENQPVVFNHVYNIKLPVGSQCSVDLESASGEKDLAPPSEPSESFQEHTVDGENQIVFTHRINIPRRACGCAAAPDVKELLSRLEELENLVSSLREQCTAGAGCCLQPATGRLDTRPFCSGRGNFSTEGCGCVCEPGWKGPNCSEPECPGNCHLRGRCIDGQCICDDGFTGEDCSQLACPSDCNDQGKCVNGVCICFEGYAGADCSREICPVPCSEEHGTCVDGLCVCHDGFAGDDCNKPLCLNNCYNRGRCVENECVCDEGFTGEDCSELICPNDCFDRGRCINGTCYCEEGFTGEDCGKPTCPHACHTQGRCEEGQCVCDEGFAGVDCSEKRCPADCHNRGRCVDGRCECDDGFTGADCGELKCPNGCSGHGRCVNGQCVCDEGYTGEDCSQLRCPNDCHSRGRCVEGKCVCEQGFKGYDCSDMSCPNDCHQHGRCVNGMCVCDDGYTGEDCRDRQCPRDCSNRGLCVDGQCVCEDGFTGPDCAELSCPNDCHGQGRCVNGQCVCHEGFMGKDCKEQRCPSDCHGQGRCVDGQCICHEGFTGLDCGQHSCPSDCNNLGQCVSGRCICNEGYSGEDCSEVSPPKDLVVTEVTEETVNLAWDNEMRVTEYLVVYTPTHEGGLEMQFRVPGDQTSTIIQELEPGVEYFIRVFAILENKKSIPVSARVATYLPAPEGLKFKSIKETSVEVEWDPLDIAFETWEIIFRNMNKEDEGEITKSLRRPETSYRQTGLAPGQEYEISLHIVKNNTRGPGLKRVTTTRLDAPSQIEVKDVTDTTALITWFKPLAEIDGIELTYGIKDVPGDRTTIDLTEDENQYSIGNLKPDTEYEVSLISRRGDMSSNPAKETFTTGLDAPRNLRRVSQTDNSITLEWRNGKAAIDSYRIKYAPISGGDHAEVDVPKSQQATTKTTLTGLRPGTEYGIGVSAVKEDKESNPATINAATELDTPKDLQVSETAETSLTLLWKTPLAKFDRYRLNYSLPTGQWVGVQLPRNTTSYVLRGLEPGQEYNVLLTAEKGRHKSKPARVKASTEQAPELENLTVTEVGWDGLRLNWTAADQAYEHFIIQVQEANKVEAARNLTVPGSLRAVDIPGLKAATPYTVSIYGVIQGYRTPVLSAEASTGETPNLGEVVVAEVGWDALKLNWTAPEGAYEYFFIQVQEADTVEAAQNLTVPGGLRSTDLPGLKAATHYTITIRGVTQDFSTTPLSVEVLTEDLPQLGDLAVSEVGWDGLRLNWTAADNAYEHFVIQVQEVNKVEAAQNLTLPGSLRAVDIPGLEAATPYRVSIYGVIRGYRTPVLSAEASTAKEPEIGNLNVSDITPESFNLSWMATDGIFETFTIEIIDSNRLLETVEYNISGAERTAHISGLPPSTDFIVYLSGLAPSIRTKTISATATTEAEPEVDNLLVSDATPDGFRLSWTADEGVFDNFVLKIRDTKKQSEPLEITLLAPERTRDITGLREATEYEIELYGISKGRRSQTVSAIATTAMGSPKEVIFSDITENSATVSWRAPTAQVESFRITYVPITGGTPSMVTVDGTKTQTRLVKLIPGVEYLVSIIAMKGFEESEPVSGSFTTALDGPSGLVTANITDSEALARWQPAIATVDSYVISYTGEKVPEITRTVSGNTVEYALTDLEPATEYTLRIFAEKGPQKSSTITAKFTTDLDSPRDLTATEVQSETALLTWRPPRASVTGYLLVYESVDGTVKEVIVGPDTTSYSLADLSPSTHYTAKIQALNGPLRSNMIQTIFTTIGLLYPFPKDCSQAMLNGDTTSGLYTIYLNGDKAEALEVFCDMTSDGGGWIVFLRRKNGRENFYQNWKAYAAGFGDRREEFWLGLDNLNKITAQGQYELRVDLRDHGETAFAVYDKFSVGDAKTRYKLKVEGYSGTAGDSMAYHNGRSFSTFDKDTDSAITNCALSYKGAFWYRNCHRVNLMGRYGDNNHSQGVNWFHWKGHEHSIQFAEMKLRPSNFRNLEGRRKRA

SEQ ID NO: 6195 - protein, 405 aa, Homo sapiens
MWYVSTRGVAPRVNFEGALFSGYAPDGGLFMPEELPQLDRGTLCQWSTLSYPGLVKELCALFIGSELLPKDELNDLIDRAFSRFRHREVVHLSRLRNGLNVLELWHGVTYAFKDLSLSCTTQFLQYFLEKREKHVTVVVGTSGDTGSAAIESVQGAKNMDIIVLLPKGHCTKIQELQMTTVLKQNVHVFGVEGNSDELDEPIKTVFADVAFVKKHNLMSLNSINWSRVLVQMAHHFFAYFQCTPSLDTHPLPLVEVVVPTGAAGNLAAGYIAQKIGLPIRLVVAVNRNDIIHRTVQQGDFSLSEAVKSTLASAMDIQVPYNMERVFWLLSGSDSQVTRALMEQFERTQSVNLPKELHSKWERQDYEKMAVMECDGCCVELCLGNCGPRRGSVTDIPGTAMVRGGG

SEQ ID NO: 6196 - protein, 213 aa, Homo sapiens [sequence omitted]

SEQ ID NO: 6197 - protein, 829 aa, Homo sapiens
MAQPGPASQPDVSLQQRVAELEKINAEFLRAQQQLEQEFNQKRAKFKELYLAKEEDLKRQNAVLQAAQDDLGHLRTQLWEAQAEMENIKAIATVSENTKQEAIDEVKRQWREEVASLQAVMKETVRDYEHQFHLRLEQERTQWAQYRESAEREIADLRRRLSEGQEEENLENEMKKAQEDAEKLRSVVMPMEKEIAALKDKLTEAEDKIKELEASKVKELNHYLEAEKSCRTDLEMYVAVLNTQKSVLQEDAEKLRKELHEVCHLLEQERQQHNQLKHTWQKANDQFLESQRLLMRDMQRMEIVLTSEQLRQVEELKKKDQEDDEQQRLNKRKDHKKADVEEEIKIPVVCALTQEESSAQLSNEEEHLDSTRGSVHSLDAGLLLPSGDPFSKSDNDMFKDGLRRAQSTDSLGTSGSLQSKALGYNYKAKSAGNLDESDFGPLVGADSVSENFDTASLGSLQMPSGFMLTKDQERAIKAMTPEQEETASLLSSVTQGMESAYVSPSGYRLVSETEWNLLQKEVHNAGNKLGRRCDMCSNYEKQLQGIQIQEAETRDQVKKLQLMLRQANDQLEKTMKDKQELEDFIKQSSEDSSHQISALVLRAQASEILLEELQQGLSQAKRDVQEQMAVLMQSREQVSEELVRLQKDNDSLQGKHSLHVSLQQAEDFILPDTTEALRELVLKYREDIINVRTAADHVEEKLKAEILFLKEQIQAEQCLKENLEETLQLEIENCKEEIASISSLKAELERIKVEKGQATVEQLMFEEKNKAQRLQTELDVSEQVQRDFVKLSQTLQVQLERIRQADSLERIRAILNDTKLTDINQLPET

SEQ ID NO: 6198 - protein, 496 aa, Homo sapiens
MFAKATRNFLREVDADGDLIAVSNLNDSDKLQLLSLVTKKKRFWCWQRPKYQFLSLTLGDVLIEDQFPSPVVVESDFVKYEGKFANHVSGTLETALGKVKLNLGGSSRVESQSSFGTLRKQEVDLQQLIRDSAERTINLRNPVLQQVLEGRNEVLCVLTQKITTMQKCVISEHMQVEEKCGGIVGIQTKTVQVSATEDGNVTKDSNVVLEIPAATTIAYGVIELYVKLDGQFEFCLLRGKQGGFENKKRIDSVYLDPLVFREFAFIDMPDAAHGISSQDGPLSVLKQATLLLERNFHPFAELPEPQQTALSDIFQAVLFDDELLMVLEPVCDDLVSGLSPTVAVLGELKPRQQQDLVAFLQLVGCSLQGGCPGPEDAGSKQLFMTAYFLVSALAEMPDSAAALLGTCCKLQIIPTLCHLLRALSDDGVSDLEDPTLTPLKDTERFGIVQRLFASADISLERLKSSVKAVILKDSKVFPLLLCITLNGLCALGREHS

SEQ ID NO: 6199 - protein, 545 aa, Homo sapiens
MQSISKQTLQMDVNKLNITLLRIFRQGVAAALGLLPQQVHINRLIGKKNSIELFVSPINRKTGISDALPSEEVLRSLNINVLHQSLSQFGITEVSPEKNVLQGQHEADKIWSKEGFYAVVIFLSIFVIIVTCLMILYRLKERFQLSLRQDKEKNQEIHLSPITLQPALSEAKTVHSMVQPEQAPKVLNVVVDPQGRGAPEIKATTATSVCPSPFKMKPIGLQERRGSNVSLTLDMSSLGNIEPFVSIPTPREKVAMEYLQSASRILTRSQLRDVVASSHLLQSEFMEIPMNFVDPKEIDIPRHGTKNRYKTILPNPLSRVCLRPKNVTDSLSTYINANYIRGYSGKEKAFIATQGPMINTVDDFWQMVWQEDSPVIVMITKLKEKNEKCVLYWPEKRGIYGKVEVLVISVNECDNYTIRNLVLKQGSHTQHVKHYWYTSWPDHKTPDSAQPLLQLMLDVEEDRLASQGRGPVVVHCSAGIGRTGCFIATSIGCQQLKEEGVVDALSIVCQLRMDRGGMVQTSEQYEFVHHALCLYESRLSAETVQ

SEQ ID NO: 6200 - protein, 841 aa, Homo sapiens
MVQKSRNGGVYPGPSGEKKLKVGFVGLDPGAPDSTRDGALLIAGSEAPKRGSILSKPRAGGAGAGKPPKRNAFYRKLQNFLYNVLERPRGWAFIYHAYVFLLVFSCLVLSVFSTIKEYEKSSEGALYILEIVTIVVFGVEYFVRIWAAGCCCRYRGWRGRLKFARKPFCVIDIMVLIASIAVLAAGSQGNVFATSALRSLRFLQILRMIRMDRRGGTWKLLGSVVYAHSKELVTAWYIGFLCLILASFLVYLAEKGENDHFDTYADALWWGLITLTTIGYGDKYPQTWNGRLLAATFTLIGVSFFALPAGILGSGFALKVQEQHRQKHFEKRRNPAAGLIQSAWRFYATNLSRTDLHSTWQYYERTVTVPMYSSQTQTYGASRLIPPLNQLELLRNLKSKSGLAFRKDPPPEPSPSPRGVAAKGKGSPQAQTVRRSPSADQSLEDSPSKVPKSWSFGDRSRARQAFRIKGAASRQNSEASLPGEDIVDDKSCPCEFVTEDLTPGLKVSIRAVCVMRFLVSKRKFKESLRPYDVMDVIEQYSAGHLDMLSRIKSLQSRVDQIVGRGPAITDKDRTKGPAEAELPEDPSMMGRLGKVEKQVLSMEKKLDFLVNIYMQRMGIPPTETEAYFGAKEPEPAPPYHSPEDSREHVDRHGCIVKIVRSSSSTGQKNFSAPPAAPPVQCPPSTSWQPQSHPRQGHGTSPVGDHGSLVRIPPPPAHERSLSAYGGGNRASMEFLRQEDTPGCRPPEGNLRDSDTSISIPSVDHEELERSFSGFSISQSKENLDALNSCYAAVAPCAKVRPYIAEGESDTDSDLCTPCGPPPRSATGEGPFGDVGWAGPRK

SEQ ID NO: 6201 - protein, 429 aa, Homo sapiens
MATLSFVFLLLGAVSWPPASASGQEFWPGQSAADILSGAASRRRYLLYDVNPPEGFNLRRDVYIRIASLLKTLLKTEEWVLVLPPWGRLYHWQSPDIHQVRIPWSEFFDLPSLNKNIPVIEYEQFIAESGGPFIDQVYVLQSYAEGWKEGTWEEKVDERPCIDQLLYSQDKHEYYRGWFWGYEETRGLNVSCLSVQGSASIVAPLLLRNTSARSVMLDRAENLLHDHYGGKEYWDTRRSMVFARHLREVGDEFRSRHLNSTDDADRIPFQEDWMKMKVKLGSALGGPYLGVHLRRKDFIWGHRQDVPSLEGAVRKIRSLMKTHRLDKVFVATDAVRKEYEELKKLLPEMVRFEPTWEELELYKDGGVAIIDQWICAHARFFIGTSVSTFSFRIHEEREILGLDPKTTYNRFCGDQEKACEQPTHWKITY

SEQ ID NO: 6202 - protein, 1881 aa, Homo sapiens
MPYSVGFREADAATSFLRAARSGNLDKALDHLRNGVDINTCNQNGLNGLHLASKEGHVKMVVELLHKEIILETTTKKGNTALHIAALAGQDEVVRELVNYGANVNAQSQKGFTPLYMAAQENHLEVVKFLLENGANQNVATEDGFTPLAVALQQGHENVVAHLINYGTKGKVRLPALHIAARNDDTRTAAVLLQNDPNPDVLSKTGFTPLHIAAHYENLNVAQLLLNRGASVNFTPQNGITPLHIASRRGNVIMVRLLLDRGAQIETKTKDELTPLHCAARNGHVRISEILLDHGAPIQAKTKNGLSPIHMAAQGDHLDCVRLLLQYDAEIDDITLDHLTPLHVAAHCGHHRVAKVLLDKGAKPNSRALNGFTPLHIACKKNHVRVMELLLKTGASIDAVTESGLTPLHVASFMGHLPIVKNLLQRGASPNVSNVKVETPLHMAARAGHTEVAKYLLQNKAKVNAKAKDDQTPLHCAARIGHTNMVKLLLENNANPNLATTAGHTPLHIAAREGHVETVLALLEKEASQACMTKKGFTPLHVAAKYGKVRVAELLLERDAHPNAAGKNGLTPLHVAVHHNNLDIVKLLLPRGGSPHSPAWNGYTPLHIAAKQNQVEVARSLLQYGGSANAESVQGVTPLHLAAQEGHAEMVALLLSKQANGNLGNKSGLTPLHLVAQEGHVPVADVLIKHGVMVDATTRMGYTPLHVASHYGNIKLVKFLLQHQADVNAKTKLGYSPLHQAAQQGHTDIVTLLLKNGASPNEVSSDGTTPLAIAKRLGYISVTDVLKVVTDETSFVLVSDKHRMSFPETVDEILDVSEDEGEELISFKAERRDSRDVDEEKELLDFVPKLDQVVESPAIPRIPCAMPETVVIRSEEQEQASKEYDEDSLIPSSPATETSDNISPVASPVHTGFLVSFMVDARGGSMRGSRHNGLRVVIPPRTCAAPTRITCRLVKPQKLSTPPPLAEEEGLASRIIALGPTGAQFLSPVIVEIPHFASHGRGDRELVVLRSENGSVWKEHRSRYGESYLDQILNGMDEELGSLEELEKKRVCRIITTDFPLYFVIMSRLCQDYDTIGPEGGSLKSKLVPLVQATFPENAVTKRVKLALQAQPVPDELVTKLLGNQATFSPIVTVEPRRRKFHRPIGLRIPLPPSWTDNPRDSGEGDTTSLRLLCSVIGGTDQAQWEDITGTTKLVYANECANFTTNVSARFWLSDCPRTAEAVNFATLLYKELTAVPYMAKFVIFAKMNDPREGRLRCYCMTDDKVDKTLEQHENFVEVARSRDIEVLEGMSLFAELSGNLVPVKKAAQQRSFHFQSFRENRLAMPVKVRDSSREPGGSLSFLRKAMKYEDTQHILCHLNITMPPCAKGSGAEDRRRTPTPLALRYSILSESTPGSLSGTEQAEMKMAVISEHLGLSWAELARELQFSVEDINRIRVENPNSLLEQSVALLNLWVIREGQNANMENLYTALQSIDRGEIVNMLEGSGRQSRNLKPDRRHTDRDYSLSPSQMNGYSSLQDELLSPASLGCALSSPLRADQYWNEVAVLDAIPLAATEHDTMLEMSDMQVWSAGLTPSLVTAEDSSLECSKAEDSDATGHEWKLEGALSEEPRGPELGSLELVEDDTVDSDATNGLIDLLEQEEGQRSEEKLPGSKRQDDATGAGQDSENEVSLVSGHQRGQARITHSPTVSQVTERSQDRLQDWDADGSIVSYLQDAAQGSWQEEVTQGPHSFQGTSTMTEGLEPGGSQEYEKVLVSVSEHTWTEQPEAESSQADRDRRQQGQEEQVQEAKNTFTQVVQGNEFQNIPGEQVTEEQFTDEQGNIVTKKIIRKVVRQIDLSSADAAQEHEEVTVEGPLEDPSELEVDIDYFMKHSKDHTSTPNP

SEQ ID NO: 6203 - protein, 272 aa, Homo sapiens
MKGKKGIVAASGSETEDEDSMDIPLDLSSSAGSGKRRRRGNLPKESVQILRDWLYEHRYNAYPSEQEKALLSQQTHLSTLQVCNWFINARRRLLPDMLRKDGKDPNQFTISRRGAKISETSSVESVMGIKNFMPALEETPFHSCTAGPNPTLGRPLSPKPSSPGSVLARPSVICHTTVTALKDVPFSLCQSVGVGQNTDIQQIAAKNFTDTSLMYPEDTCKSGPSTNTQSGLFNTPPPTPPDLNQDFSGFQLLVDVALKRAAEMELQAKLTA

SEQ ID NO: 6204 - protein, 821 aa, Homo sapiens
MDPECAQLLPALCAVLVDPRQPVADDTCLEKLLDWFKTVTEGESSVVLLQEHPCLVELLSHVLKVQDLSSGVLSFSLRLAGTFAAQENCFQYLQQGELLPGLFGEPGPLGRATWAVPTVRSGWIQGLRSLAQHPSALRFLADHGAVDTIFSLQGDSSLFVASAASQLLVHVLALSMRGGAEGQPCLPGGDWPACAQKIMDHVEESLCSAATPKVTQALNVLTTTFGRCQSPWTEALWVRLSPRVACLLERDPIPAAHSFVDLLLCVARSPVFSSSDGSLWETVARALSCLGPTHMGPLALGILKLEHCPQALRTQAFQVLLQPLACVLKATVQAPGPPGLLDGTADDATTVDTLLASKSSCAGLLCRTLAHLEELQPLPQRPSPWPQASLLGATVTVLRLCDGSAAPASSVGGHLCGTLAGCVRVQRAALDFLGTLSQGTGPQELVTQALAVLLECLESPGSSPTVLKKAFQATLRWLLSSPKTPGCSDLGPLIPQFLRELFPVLQKRLCHPCWEVRDSALEFLTQLSRHWGGQADFRCALLASEVPQLALQLLQDPESYVRASAVTAMGQLSSQGLHAPTSPEHAEARQSLFLELLHILSVDSEGFPRRAVMQVFTEWLRDGHADAAQDTEQFVATVLQAASRDLDWEVRAQGLELALVFLGQTLGPPRTHCPYAVALPEVAPAQPLTEALRALCHVGLFDFAFCALFDCDRPVAQKSCDLLLFLRDKIASYSSLREARGSPNTASAEATLPRWRAGEQAQPPGDQEPEAVLAMLRSLDLEGLRSTLAESSDHVEKSPQSLLQDMLATGGFLQGDEADCY

SEQ ID NO: 6205 - protein, 601 aa, Homo sapiens
MAKTPSDHLLSTLEELVPYDFEKFKFKLQNTSVQKEHSRIPRSQIQRARPVKMATLLVTYYGEEYAVQLTLQVLRAINQRLLAEELHRAAIQDMGSCYVAQVGLELLISNNPPIFASETAGITGRPPDTAASPRCHAQEGDPVDGTCVRDSCSFPEAVSGHPQASGSRSPGCPRCQDSHERKSPGSLSPQPLPQCKRHLKQVQLLFCEDHDEPICLICSLSQEHQGHRVRPIEEVALEHKKKIQKQLEHLKKLRKSGEEQRSYGEEKAVSFLKQTEALKQRVQRKLEQVYYFLEQQEHFFVASLEDVGQMVGQIRKAYDTRVSQDIALLDALIGELEAKECQSEWELLQDIGDILHRAKTVPVPEKWTTPQEIKQKIQLLHQKSEFVEKSTKYFSETLRSEMEMFNVPELIGAQAHAVNVILDAETAYPNLIFSDDLKSVRLGNKWERLPDGPQRFDSCIIVLGSPSFLSGRRYWEVEVGDKTAWILGACKTSISRKGNMTLSPENGYWVVIMMKENEYQASSVPPTRLLIKEPPKRVGIFVDYRVGSISFYNVTARSHIYTFASCSFSGPLQPIFSPGTRDGGKNTAPLTICPVGGQGPD

SEQ ID NO: 6206 - protein, 455 aa, Homo sapiens
MARKALKLASWTSMALAASGIYFYSNKYLDPNDFGAVRVGRAVATTAVISYDYLTSLKSVPYGSEEYLQLRSKIHDLFQSFDDTPLGTASLAQVHKAVLHDGRTVAVKVQHPKVRAQSSKDILLMEVLVLAVKQLFPEFEFMWLVDEAKKNLPLELDFLNEGRNAEKVSQMLRHFDFLKVPRIHWDLSTERVLLMEFVDGGQVNDRDYMERNKIDVNEISRHLGKMYSEMIFVNGFVHCDPHPGNVLVRKHPGTGKAEIVLLDHGLYQMLTEEFRLNYCHLWQSLIWTDMKRVKEYSQRLGAGDLYPLFACMLTARSWDSVNRGISQAPVTATEDLEIRNNAANYLPQISHLLNHVPRQMLLILKTNDLLRGIEAALGTRASASSFLNMSRCCIRALAEHKKKNTCSFFRRTQISFSEAFNLWQINLHELILRVKGLKLADRVLALICWLFPAPL

SEQ ID NO: 6207 - protein, 359 aa, Homo sapiens
MNFIKDNSRALIQRMGMTVIKQITDDLFVWNVLNREEVNIICCEKVEQDAARGIIHMILKKGSESCNLFLKSLKEWNYPLFQDLNGQSGLTDSLGNLKNLTKLIMDNIKMNEEDAIKLAEGLKNLKKMCLFHLTHLSDIGEGMDYIVKSLSSEPCDLEEIQLVSCCLSANAVKILAQNLHNLVKLSILDLSENYLEKDGNEALHELIDRMNVLEQLTALMLPWGCDVQGSLSSLLKHLEEVPQLVKLGLKNWRLTDTEIRILGAFFGKNPLKNFQQLNLAGNRVSSDGWLAFMGVFENLKQLVFFDFSTKEFLPDPALVRKLSQVLSKLTFLQEARLVGWQFDDDDLSVITGAFKLVTA

SEQ ID NO: 6208 - protein, 321 aa, Homo sapiens
MKEDCLPSSHVPISDSKSIQKSELLGLLKTYNCYHEGKSFQLRHREEEGTLIIEGLLNIAWGLRRPIRLQMQDDREQVHLPSTSWMPRRPSCPLKEPSPQNGNITAQGPSIQPVHKAESSTDSSGPLEEAEEAPQLMRTKSDASCMSQRRPKCRAPGEAQRIRRHRFSINGHFYNHKTSVFTPAYGSVTNVRVNSTMTTLQVLTLLLNKFRVEDGPSEFALYIVHESGERTKLKDCEYPLISRILHGPCEKIARIFLMEADLGVEVPHEVAQYIKFEMPVLDSFVEKLKEEEEREIIKLTMKFQALRLTMLQRLEQLVEAK

SEQ ID NO: 6209 - protein, 311 aa, Homo sapiens
MDNLTKVTEFLLMEFSGIWELQVLHAGLFLLIYLAVLVGNLLIIAVITLDQHLHTPMYFFLKNLSVLDLCYISVTVPKSIRNSLTRRSSISYLGCVAQVYFFSAFASAELAFLTVMSYDRYVAICHPLQYRAVMTSGGCYQMAVTTWLSCFSYAAVHTGNMFREHVCRSSVIHQFFRDIPHVLALVSCEVFFVEFLTLALSSCLVLGCFILMMISYFQIFSTVLRIPSGQSRAKAFSTCSPQLIVIMLFLTTGLFAALGPIAKALSIQDLVIALTYTVLPPFLNPIIYSLRNKEIKTAMWRLFVKIYFLQK

SEQ ID NO: 6210 - protein, 414 aa, Homo sapiens
MGRPRVRQAWPGCCGHTGRLPAGRGYLASHMCDPAGAELIGDGMSDPTPPSNACTGHIQDPASQRLTWNKSPKSVLVIKKMRDASLLQPFKELCTHLMEENMIVYVEKKVLEDPAIASDESFGAVKKKFCTFREDYDDISNQIDFIICLGGDGTLLYASSLFQGSVPPVMAFHLGSLGFLTPFSFENFQSQVTQVIEGNAAVVLRSRLKVRVVKELRGKKTAVHNGLGENGSQAAGLDMDVGKQAMQYQVLNEVVIDRGPSSYLSNVDVYLDGHLITTVQGDGVIVSTPTGSTAYAAAAGASMIHPNVPAIMITPICPHSLSFRPIVVPAGVELKIMLSPEARNTAWVSFDGRKRQEIRHGDSISITTSCYPLPSICVRDPVSDWFESLAQCLHWNVRKKQAHFEEEEEEEEEG

SEQ ID NO: 6211 - protein, 961 aa, Homo sapiens
MLAPRGAAVLLLHLVLQRWLAAGAQATPQVFDLLPSSSQRLNPGALLPVLTDPALNDLYVISTFKLQTKSSATIFGLYSSTDNSKYFEFTVMGRLNKAILRYLKNDGKVHLVVFNNLQLADGRRHRILLRLSNLQRGAGSLELYLDCIQVDSVHNLPRAFAGPSQKPETIELRTFQRKPQDFLEELKLVVRGSLFQVASLQDCFLQQSEPLAATGTGDFNRQFLGQMTQLNQLLGEVKDLLRQQVKETSFLRNTIAECQACGPLKFQSPTPSTVVPPAPPAPPTRPPRRCDSNPCFRGVQCTDSRDGFQCGPCPEGYTGNGITCIDVDECKYHPCYPGVHCINLSPGFRCDACPVGFTGPMVQGVGISFAKSNKQVCTDIDECRNGACVPNSICVNTLGSYRCGPCKPGYTGDQIRGCKAERNCRNPELNPCSVNAQCIEERQGDVTCVCGVGWAGDGYICGKDVDIDSYPDEELPCSARNCKKDNCKYVPNSGQEDADRDGIGDACDEDADGDGILNEQDNCVLIHNVDQRNSDKDIFGDACDNCLSVLNNDQKDTDGDGRGDACDDDMDGDGIKNILDNCPKFPNRDQRDKDGDGVGDACDSCPDVSNPNQSDVDNDLVGDSCDTNQDSDGDGHQDSTDNCPTVINSAQLDTDKDGIGDECDDDDDNDGIPDLVPPGPDNCRLVPNPAQEDSNSDGVGDICESDFDQDQVIDRIDVCPENAEVTLTDFRAYQTVVLDPEGDAQIDPNWVVLNQGMEIVQTMNSDPGLAVGYTAFNGVDFEGTFHVNTQTDDDYAGFIFGYQDSSSFYVVMWKQTEQTYWQATPFRAVAEPGIQLKAVKSKTGPGEHLRNSLWHTGDTSDQVRLLWKDSRNVGWKDKVSYRWFLQHRPQVGYIRVRFYEGSELVADSGVTIDTTMRGGRLGVFCFSQENIIWSNLKYRCNDTIPEDFQEFQTQNFDRFDN

SEQ ID NO: 6212 - protein, 458 aa, Homo sapiens
MSILIIEAFYGGSHKQLVDLLQEELGDCVVYTLPAKKWHWRARTSALYFSQTIPISEHYRTLFASSVLNLTELAALRPDLGKLKKILYFHENQLIYPVKKCQERDFQYGYNQILSCLVADVVVFNSVFNMESFLTSMGKFMKLIPDHRPKDLESIIRPKCQVIYFPIRFPDVSRFMPKHKTTHLKKMLGLKGNGGAVLSMALPFQPEQRDSEDLLKNFNSECDTHCGLDTARQEYLGNSLRQESDLKKSTSSDNSSSHHGENKQNLTVDPCDILGGVDNQQRLLHIVWPHRWEHDKDPESFFKVLMHLKDLGLNFHVSVLGETFTDVPDIFSEAKKALGSSVLHWGYLPSKDDYFQVLCMADVVISTAKHEFFGVAMLEAVYCGCYPLCPKDLVYPEIFPAEYLYSTPEQLSKRLQNFCKRPDIIRKHLYKGEIAPFSWAALHGKFRSLLTTEPREDL

SEQ ID NO: 6213 - protein, 689 aa, Homo sapiens
MEDTGIQRGIWDGDAKAVQQCLTDIFTSVYTTCDIPENAIFGPCVLSHTSLYDSIAFIALKSTDKRTVPYIFRVDTSAANGSSEGLMWLRLVQSARDKEEQNLEAYIKNGQLFYRSLRRIAKDEELLVWYGKELTELLLLCPSRSHNKMNGSSPYTCLECSQRFQFEFPYVAHLRFRCPKRLHSADISPQDEQGGGVGTKDHGGGGGGGKDQQQQQQEAPLGPGPKFCKAGPLHHYPSPSPESSNPSAAAGGSSAKPSTDFHNLARELENSRGGSSCSPAQSLSSGSGSGGGGGHQEAELSPDGIATGGGKGKRKFPEEAAEGGGGAGLVGGRGRFVERPLPASKEDLVCTPQQYRASGSYFGLEENGRLFAPPSPETGEAKRSAFVEVKKAARAASLQEEGTADGAGVASEDQDAGGGGGSSTPAAASPVGAEKLLAPRPGGPLPSRLEGGSPARGSAFTSVPQLGSAGSTSGGGGTGAGAAGGAGGGQGAASDERKSAFSQPARSFSQLSPLVLGQKLGALEPCHPADGVGPTRLYPAAADPLAVKLQGAADLNGGCGSLPSGGGGLPKQSPFLYATAFWPKSSAAAAAAAAAAAAGPLQLQLPSALTLLPPSFTSLCLPAQNWCAKCNASFRMTSDLVYHMRSHHKKEYAMEPLVKRRREEKLKCPICNESFRERHHLSRHMTSHN

SEQ ID NO: 6214 - protein, 673 aa, Homo sapiens
MMFQDSVAFEDVAVTFTQEEWALLDPSQKNLCRDVMQETFRNLASIGKKWKPQNIYVEYENLRRNLRIVGERLFESKEGHQHGEILTQVPDDMLKKTTTGVKSCESSVYGEVGSAHSSLNRHIRDDTGHKAYEYQEYGQKPYKCKYCKKPFNCLSSVQTHERAHSGRKLYVCEECGKTFISHSNLQRHRIMHRGDGPYKCKFCGKALMFLSLYLIHKRTHTGEKPYQCKQCGKAFSHSSSLRIHERTHTGEKPYKCNECGKAFHSSTCLHAHKRTHTGEKPYECKQCGKAFSSSHSFQIHERTHTGEKPYECKECGKAFKCPSSVRRHERTHSRKKPYECKHCGKVLSYLTSFQNHLGMHTGEISHKCKICGKAFYSPSSLQTHEKTHTGEKPYKCNQCGKAFNSSSSFRYHERTHTGEKPYECKQCGKAFRSASLLQTHGRTHTGEKPYACKECGKPFSNFSFFQIHERMHREEKPYECKGYGKTFSLPSLFHRHERTHTGGKTYECKQCGRSFNCSSSFRYHGRTHTGEKPYECKQCGKAFRSASQLQIHGRTHTGEKPYECKQCGKAFGSASHLQMHGRTHTGEKPYECKQCGKSFGCASRLQMHGRTHTGEKPYKCKQCGKAFGCPSNLRRHGRTHTGEKPYKCNQCGKVFRCSSQLQVHGRAHCIDTP

SEQ ID NO: 6215 - protein, 766 aa, Homo sapiens
MGEERWVSLTPEEFDQLQKYSEYSSKKIKDALTEFNEGGSLKQYDPHEPISYDVFKLFMRAYLEVDLPQPLSTHLFLAFSQKPRHETSDHPTEGASNSEANSADTNIQNADNATKADEACAPDTESNMAEKQAPAEDQVAATPLEPPVPRSSSSESPVVYLKDVVCYLSLLETGRPQDKLEFMFRLYDSDENGLLDQAEMDCIVNQMLHIAQYLEWDPTELRPILKEMLQGMDYDRDGFVSLQEWVHGGMTTIPLLVLLGMDDSGSKGDGRHAWTMKHFKKPTYCNFCHIMLMGVRKQGLCCTYCKYTVHERCVSRNIPGCVKTYSKAKRSGEVMQHAWVEGNSSVKCDRCHKSIKCYQSVTARHCVWCRMTFHRKCELSTLCDGGELRDHILLPTSICPITRDRPGEKSDGCVSAKGELVMQYKIIPTPGTHPLLVLVNPKSGGRQGERLNFFRDTPDFRVLACGGDGTVGWILDCIDKANFAKHPPVAVLPLGTGNDLARCLRWGGGYEGGSLTKILKDIEQSPLVMLDRWHLEVIPREEVENGDQVPYSIMNNYFSIGVDASIAHRFHVMREKHPEKFNSRMKNKLWYFEFGTSETFAATCKKLHDHIELECDGVGVDLSNIFLEGIAILNIPSMYGGTNLWGENKKNRAVIRESRKGVTDPKELKFCVQDLSDQLLEVVGLEGAMEMGQIYTGLKSAGRRLAQCASVTIRTNKLLPMQVDGEPWMQPCCTIKITHKNQAPMMMGPPQKSSFFSLRRKSRSKD

SEQ ID NO: 6216 - protein, 514 aa, Homo sapiens
MDEGMEISSEGNSLIKAVHQSRLRLTRLLLEGGAYINESNDRGETPLMIACKTKHVDHQSVSKAKMVKYLLENNADPNIQDKSGKTALMHACLEKAGPEVVSLLLKSGADLSLQDHSSYSALVYAINSEDTETLKVLLSACKAKGKEVIIITTAKLPCGKHTTKQYLNMPPVDIDGCHSPATCTTPSEIDIKTASSPLSHSSETELTLFGFKDLELAGSNDDTWDPGSPVRKPALAPKGPKLPHAPPWVKSPPLLMHQNRVASLQEELQDITPEEELSYKTNGLALSKRFITRHQSIDVKDTAHLLRAFDQASSRKMSYDEINCQSYLSEGNQQCIEVPVDQDPDSNQTIFASTLRSIVQKRNLGANHYSSDSQLSAGLTPPTSEDGKALIGKKKILSPSPSQLSESKELLENIPPGPLSRRNHAVLERRGSGAFPLDHSVTQTRQGFLPPLNVNSHPPISDINVNNKICSLLSCGQKVLMPTVPIFPKEFKSKKMLLRRQSLQTEQIKQLVNF

SEQ ID NO: 6217 - protein, 325 aa, Homo sapiens
MKAKDLIVTPATILKEKPDPNNLVFGTVFTDHMLTVEWSSEFGWEKPHIKPLQNLSLHPGSSALHYAVEVFDKEELLECIQQLVKLDQEWVPYSTSASLYIRPTFIGTEPSLGVKKPTKALLFVLLSPVGPYFSSGTFNPVSLWANPKYVRAWKGGTGDCKMGGNYGSSLFAQCEAVDNGCQQVLWLYGEDHQITEVGTMNLFLYWINEDGEEELATPPLDGIILPGVTRRCILDLAHQWGEFKVSERYLTMDDLTTALEGNRVREMFGSGTACVVCPVSDILYKGETIHIPTMENGPKLASRILSKLTDIQYGREESDWTIVLS

SEQ ID NO: 6218 - protein, 377 aa, Homo sapiens
MRLSVRRVLLAAGCALVLVLAVQLGQQVLECRAVLAGLRSPRGAMRPEQEELVMVGTNHVEYRYGKAMPLIFVGGVPRSGTTLMRAMLDAHPEVRCGEETRIIPRVLAMRQAWSKSGREKLRLDEAGVTDEVLDAAMQAFILEVIAKHGEPARVLCNKDPFTLKSSVYLSRLFPNSKFLLMVRDGRASVHSMITRKVTIAGFDLSSYRDCLTKWNKAIEVMYAQCMEVGKEKCLPVYYEQLVLHPRRSLKLILDFLGIAWSDAVLHHEDLIGKPGGVSLSKIERSTDQVIKPVNLEALSKWTGHIPGDVVRDMAQIAPMLAQLGYDPYANPPNYGNPDPFVINNTQRVLKGDYKTPANLKGYFQVNQNSTSSHLGSS

SEQ ID NO: 6219 - protein, 836 aa, Homo sapiens
MQVDPPLHGPPNDFLIFQIIPLHSLSIMPRFLWILCFSMEETQGELTSSCGSKTMANVSLAFRDVSIDLSQEEWECLDAVQRDLYKDVMLENYSNLVSLGYTIPKPDVITLLEQEKEPWIVMREGTRNWFTDLEYKYITKNLLSEKNVCKIYLSQLQTGEKSKNTIHEDTIFRNGLQCKHEFERQERHQMGCVSQMLIQKQISHPLHPKIHAREKSYECKECRKAFRQQSYLIQHLRIHTGERPYKCMECGKAFCRVGDLRVHHTIHAGERPYECKECGKAFRLHYHLTEHQRIHSGVKPYECKECGKAFSRVRDLRVHQTIHAGERPYECKECGKAFRLHYQLTEHQRIHTGERPYECKVCGKTFRVQRHISQHQKIHTGVKPYKCNECGKAFSHGSYLVQHQKIHTGEKPYECKECGKSFSFHAELARHRRIHTGEKPYECRECGKAFRLQTELTRHHRTHTGEKPYECKECGKAFICGYQLTLHLRTHTGEIPYECKECGKTFSSRYHLTQHYRIHTGEKPYICNECGKAFRLQGELTRHHRIHTCEKPYECKECGKAFIHSNQFISHQRIHTSESTYICKECGKIFSRRYNLTQHFKIHTGEKPYICNECGKAFRFQTELTQHHRIHTGEKPYKCTECGKAFIRSTHLTQHHRIHTGEKPYECTECGKTFSRHYHLTQHHRGHTGEKPYICNECGNAFICSYRLTLHQRIHTGELPYECKECGKTFSRRYHLTQHFRLHTGEKPYSCKECGNAFRLQAELTRHHIVHTGEKPYKCKECGKAFSVNSELTRHHRIHTGEKPYQCKECGKAFIRSDQLTLHQRNHISEEVLCIM

SEQ ID NO: 6220 - protein, 808 aa, Homo sapiens
MGAPACALALCVAVAIVAGASSESLGTEQRVVGRAAEVPGPEPGQQEQLVFGSGDAVELSCPPPGGGPMGPTVWVKDGTGLVPSERVLVGPQRLQVLNASHEDSGAYSCRQRLTQRVLCHFSVRVTDAPSSGDDEDGEDEAEDTGVDTGAPYWTRPERMDKKLLAVPAANTVRFRCPAAGNPTPSISWLKNGREFRGEHRIGGIKLRHQQWSLVMESVVPSDRGNYTCVVENKFGSIRQTYTLDVLERSPHRPILQAGLPANQTAVLGSDVEFHCKVYSDAQPHIQWLKHVEVNGSKVGPDGTPYVTVLKSWISESVEADVRLRLANVSERDGGEYLCRATNFIGVAEKAFWLSVHGPRAAEEELVEADEAGSVYAGILSYGVGFFLFILVVAAVTLCRLRSPPKKGLGSPTVHKISRFPLKRQVSLESNASMSSNTPLVRIARLSSGEGPTLANVSELELPADPKWELSRARLTLGKPLGEGCFGQVVMAEAIGIDKDRAAKPVTVAVKMLKDDATDKDLSDLVSEMEMMKMIGKHKNIINLLGACTQGGPLYVLVEYAAKGNLREFLRARRPPGLDYSFDTCKPPEEQLTFKDLVSCAYQVARGMEYLASQKCIHRDLAARNVLVTEDNVMKIADFGLARDVHNLDYYKKTTNGRLPVKWMAPEALFDRVYTHQSDVWSFGVLLWEIFTLGGSPYPGIPVEELFKLLKEGHRMDKPANCTHDLYMIMRECWHAAPSQRPTFKQLVEDLDRVLTVTSTDEYLDLSAPFEQYSPGGQDTPSSSSSGDDSVFAHDLLPPAPPSSGGSRT

SEQ ID NO: 6221 - protein, 805 aa, Homo sapiens
MAASGVPRGCDILIVYSPDAEEWCQYLQTLFLSSRQVRSQKILTHRLGPEASFSAEDLSLFLSTRCVVVLLSAELVQHFHKPALLPLLQRAFHPPHRVVRLLCGVRDSEEFLDFFPDWAHWQELTCDDEPETYVAAVKKAISEDSGCDSVTDTEPEDEKVVSYSKQQNLPTVTSPGNLMVVQPDRIRCGAETTVYVIVRCKLDDRVATEAEFSPEDSPSVRMEAKVENEYTISVKAPNLSSGNVSLKIYSGDLVVCETVISYYTDMEEIGNLLSNAANPVEFMCQAFKIVPYNTETLDKLLTESLKNNIPASGLHLFGINQLEEEDMMTNQRDEELPTLLHFAAKYGLKNLTALLLTCPGALQAYSVANKHGHYPNTIAEKHGFRDLRQFIDEYVETVDMLKSHIKEELMHGEEADAVYESMAHLSTDLLMKCSLNPGCDEDLYESMAAFVPAATEDLYVEMLQASTSNPIPGDGFSRATKDSMIRKFLEGNSMGMTNLERDQCHLGQEEDVYHTVDDDEAFSVDLASRPPVPVPRPETTAPGAHQLPDNEPYIFKVFAEKSQERPGNFYVSSESIRKGPPVRPWRDRPQSSIYDPFAGMKTPGQRQLITLQEQVKLGIVNVDEAVLHFKEWQLNQKKRSESFRFQQENLKRLRDSITRRQREKQKSGKQTDLEITVPIRHSQHLPAKVEFGVYESGPRKSVIPPRTELRRGDWKTDSTSSTASSTSNRSSTRSLLSVSSGMEGDNEDNEVPEVTRSRSPGPPQVDGTPTMSLERPPRVPPRAASQRPPTRETFHPPPPVPPRGR

SEQ ID NO: 6222 - protein, 1374 aa, Homo sapiens
MMQGNTCHRMSFHPGRGCPRGRGGHGARPSAPSFRPQNLRLLHPQQPPVQYQYEPPSAPSTTFSNSPAPNFLPPRPDFVPFPPPMPPSAQGPLPPCPIRPPFPNHQMRHPFPVPPCFPPMPPPMPCPNNPPVPGAPPGQGTFPFMMPPPSMPHPPPPPVMPQQVNYQYPPGYSHHNFPPPSFNSFQNNPSSFLPSANNSSSPHFRHLPPYPLPKAPSERRSPERLKHYDDHRHRDHSHGRGERHRSLDRRERGRSPDRRRQDSRYRSDYDRGRTPSRHRSYERSRERERERHRHRDNRRSPSLERSYKKEYKRSGRSYGLSVVPEPAGCTPELPGEIIKNTDSWAPPLEIVNHRSPSREKKRARWEEEKDRWSDNQSSGKDKNYTSIKEKEPEETMPDKNEEEEEELLKPVWIRCTHSENYYSSDPMDQVGDSTVVGTSRLRDLYDKFEEELGSRQEKAKAARPPWEPPKTKLDEDLESSSESECESDEDSTCSSSSDSEVFDVIAEIKRKKAHPDRLHDELWYNDPGQMNDGPLCKCSAKARRTGIRHSIYPGEEAIKPCRPMTNNAGRLFHYRITVSPPTNFLTDRPTVIEYDDHEYIFEGFSMFAHAPLTNIPLCKVIRFNIDYTIHFIEEMMPENFCVKGLELFSLFLFRDILELYDWNLKGPLFEDSPPCCPRFHFMPRFVRFLPDGGKEVLSMHQILLYLLRCSKALVPEEEIANMLQWEELEWQKYAEECKGMIVTNPGTKPSSVRIDQLDREQFNPDVITFPIIVHFGIRPAQLSYAGDPQYQKLWKSYVKLRHLLANSPKVKQTDKQKLAQREEALQKIRQKNTMRREVTVELSSQGFWKTGIRSDVCQHAMMLPVLTHHIRYHQCLMHLDKLIGYTFQDRCLLQLAMTHPSHHLNFGMNPDHARNSLSNCGIRQPKYGDRKVHHMHMRKKGINTLINIMSRLGQDDPTPSRINHNERLEFLGDAVVEFLTSVHLYYLFPSLEEGGLATYRTAIVQNQHLAMLAKKLELDRFMLYAHGPDLCRESDLRHAMANCFEALIGAVYLEGSLEEAKQLFGRLLFNDPDLREVWLNYPLHPLQLQEPNTDRQLIETSPVLQKLTEFEEAIGVIFTHVRLLARAFTLRTVGFNHLTLGHNQRMEFLGDSIMQLVATEYLFIHFPDHHEGHLTLLRSSLVNNRTQAKVAEELGMQEYAITNDKTKRPVALRTKTLADLLESFIAALYIDKDLEYVHTFMNVCFFPRLKEFILNQDWNDPKSQLQQCCLTLRTEGKEPDIPLYKTLQTVGPSHARTYTVAVYFKGERIGCGKGPSIQQAEMGAAMDALEKYNFPQMAHQKRFIERKYRQELKEMRWEREHQEREPDETEDIKK

SEQ ID NO: 6223 - protein, 572 aa, Homo sapiens
MSFQGKKSIPRITSDRLLIRGGRIVNDDQSFYADVHVEDGLIKQIGENLIVPGGIKTIDAHGLMVLPGGVDVHTRLQMPVLGMTPADDFCQGTKAALAGGTTMILDHVFPDTGVSLLAAYEQWRERADSAACCDYSLHVDITRWHESIKEELEALVKEKGVNSFLVFMAYKDRCQCSDSQMYEIFSIIRDLGALAQVHAENGDIVEEEQKRLLELGITGPEGHVLSHPEEVEAEAVYRAVTIAKQANCPLYVTKVMSKGAADAIAQAKRRGVVVFGEPITASLGTDGSHYWSKNWAKAAAFVTSPPVNPDPTTADHLTCLLSSGDLQVTGSAHCTFTTAQKAVGKDNFALIPEGTNGIEERMSMVWEKCVASGKMDENEFVAVTSTNAAKIFNFYPRKGRVAVGSDADLVIWNPKATKIISAKTHNLNVEYNIFEGVECRGAPAVVISQGRVALEDGKMFVTPGAGRFVPRKTFPDFVYKRIKARNRLAEIHGVPRGLYDGPVHEVMVPAKPGSGAPARASCPGKISVPPVRNLHQSGFSLSGSQADDHIARRTAQKIMAPPGGRSNITSLS

SEQ ID NO: 6224 - protein, 48 aa, Homo sapiens
MNKDAQMRAAINQKLIETGERERLKELLRAKLIECGWKDQLKAHCKGN

SEQ ID NO: 6225 - protein, 1433 aa, Homo sapiens [sequence omitted]

SEQ ID NO: 6226 - protein, 988 aa, Homo sapiens
MEQSRSQQRGGEQSWWGSDPQYQYMPFEHCTSYGLPSENGGLQHRLRKDAGPRHNVHPTQIYGHHKEQFSDREQDIGMPKKTGSSSTVDSKDEDHYSKCQDCIHRLGQVVRRKLGEDGIFLVLLGLLMALVSWSMDYVSAKSLQAYKWSYAQMQPSLPLQFLVWVTFPLVLILFSALFCHLISPQAVGSGIPEMKTILRGVVLKEYLTMKAFVAKVVALTAGLGSGIPVGKEGPFVHIASICAAVLSKFMSVFCGVYEQPYYYSDILTVGCAVGVGCCFGTPLGGVLFSIEVTSTYFAVRNYWRGFFAATFSAFVFRVLAVWNKDAVTITALFRTNFRMDFPFDLKELPAFAAIGICCGLLGAVFVYLHRQVMLGVRKHKALSQFLAKHRLLYPGIVTFVIASFTFPPGMGQFMAGELMPREAISTLFDNNTWVKHAGDPESLGQSAVWIHPRVNVVIIIFLFFVMKFWMSIVATTMPIPCGGFMPVFVLGAAFGRLVGEIMAMLFPDGILFDDIIYKILPGGYAVIGAAALTGAVSHTVSTAVICFELTGQIAHILPMMVAVILANMVAQSLQPSLYDSIIQVKKLPYLPDLGWNQLSKYTIFVEDIMVRDVKFVSASYTYGELRTLLQTTTVKTLPLVDSKDSMILLGSVERSELQALLQRHLCPERRLRAAQEMARKLSELPYDGKARLAGEGLPGAPPGRPESFAFVDEDEDEDLSGKSELPPSLALHPSTTAPLSPEEPNGPLPGHKQQPEAPEPAGQRPSIFQSLLHCLLGRARPTKKKTTQDSTDLVDNMSPEEIEAWEQEQLSQPVCFDSCCIDQSPFQLVEQTTLHKTHTLFSLLGLHLAYVTSMGKLRGVLALEELQKAIEGHTKSGVQLRPPLASFRNTTSTRKSTGAPPSSAENWNLPEDRPGATGTGDVIAASPETPVPSPSPEPPLSLAPGKVEGELEELELVESPGLEEELADILQGPSLRSTDEEDEDELIL

SEQ ID NO: 6227 - protein, 1671 aa, Homo sapiens
MDGNSLLSVPSNLESSRMYDVLEPQQGRGCGSSGSGPGNSITACKKVLRSNSLLESTDYWLQNQRMPCQIGFVEDKSENCASVCFVNLDVNKDECSTEHLQQKLVNVSPDLPKLISSMNVQQPKENEIVVLSGLASGNLQADFEVSQCPWLPDICLVQCARGNRPNSTNCIIFEINKFLIGLELVQERQLHLETNILKLEDDTNCSLSSIEEDFLTASEHLEEESEVDESRNDYENINVSANVLESKQLKGATQVEWNCNKEKWLYALEDKYINKYPTPLIKTERSPENLTKNTALQSLDPSAKPSQWKREAVGNGRQATHYYHSEAFKGQMEKSQALYIPKDAYFSMMDKDVPSACAVAEQRSNLNPGDHEDTRNALPPRQDGEVTTGKYATNLAESVLQDAFIRLSQSQSTLPQESAVSVSVGSSLLPSCYSTKDTVVSRSWNELPKIVVVQSPDGSDAAPQPGISSWPEMEVSVETSSILSGENSSRQPQSALEVALACAATVIGTISSPQATERLKMEQVVSNFPPGSSGALQTQAPQGLKEPSINEYSFPSALCGMTQVASAVAVCGLGEREEVTCSVAPSGSLPPAAEASEAMPPLCGLASMELGKEAIAKGLLKEAALVLTRPNTYSSIGDFLDSMNRRIMETASKSQTLCSENVVRNELAHTLSNVILRHSIDEVHHKNMIIDPNDNRHSSEILDTLMESTNQLLLDVICFTFKKMSHIVRLGECPAVLSKETIRRRETEPSCQPSDPGASQAWTKATESSSSSPLSNSHNTSLVINNLVDGMYSKQDKGGVRPGLFKNPTLQSQLSRSHRVPDSSTATTSSKEIYLKGIAGEDTKSPHHSENECRASSEGQRSPTVSQSRSGSQEAEESIHPNTQEKYNCATSRINEVQVNLSLLGDDLLLPAQSTLQTKHPDIYCITDFAEELADTVVSMATEIAAICLDNSSGKQPWFCAWKRGSEFLMTPNVPCRSLKRKKESQGSGTAVRKHKPPRLSEIKRKTDEHPELKEKLMNRVVDESMNLEDVPDSVNLFANEVAAKIMNLTEFSMVDGMWQAQGYPRNRLLSGDRWSRLKASSCESIPEEDSEARAYVNSLGLMSTLSQPVSRASSVSKQSSCESITDEFSRFMVNQMENEGRGFELLLDYYAGKNASSILNSAMQQACRKSDHLSVRPSCPSKQSSTESITEEFYRYMLRDIERDSRESASSRRSSQDWTAGLLSPSLRSPVCHRQSSMPDSRSPCSRLTVNVPIKANSLDGFAQNCPQDFLSVQPVSSASSSGLCKSDSCLYRRGGTDHITNMLIHETWASSIEALMRKNKIIVDDAEEADTEPVSGGSPSQAEKCANRLAASRMCSGPTLLVQESLDCPRKDSVTECKQPPVSSLSKTASLTNHSPLDSKKETSSCQDPVPINHKRRSLCSREVPLIQIETDQREACAGEPEPFLSKSSLLEEAEGHSNDKNIPDVVRGGDTAVSACQIHSDSLDTRDVPEAEASTEARAPDEAPNPPSSSEESTGSWTQLANEEDNPDDTSSFLQLSERSMSELVEEKKILKGQSESTEAPASGPPTGTASPQRSLLVINFDLEPECPDAELRATLQWIAASELGIPTIYFKKSQENRIEKFLDVVQLVHRKSWKVGDIFHAVVQYCKMHEEQKDGRLSLFDWLLELG

SEQ ID NO: 6228 - protein, 1839 aa, Homo sapiens
METGSDSDQLERVFLRLGHAETDEQLQNIISKFLPPVLLKLSSTQEGVRKKVMELLVHLNKRIKSRPKIQLPVETLLVQYQDPAAVSFVTNFTIIYVKMGYPRLPVEKQCELAPTLLTAMEGKPQPQQDSLMHLLIPTLFHMKYPVESSKSASPFNLAEKPKTVQLLLDFMLDVLLMPYGYVLNESQSRQNSSSAQGSSSNSGGGSGIPQPPPGMSFYAAKRVIGDNPWTPEQLEQCKLGIVKFIEAEQVPELEAVLHLVIASSDTRHSVATAADLELKSKQSLIDWNNPAIINKMYKVYLGDIPLKTKEGAVLKPELKRDPVSTRVKLKIVPHLLRSRQAAETFPANIQVVYDGLFGTNTNSKLRTLSLQFVHHICITCPEIKIKPLGPMLLNGLTKLINEYKEDPKLLSMAYSAVGKLSSRMPHLFTKDIALVQQLFEALCKEEPETRLAIQEALSMMVGAYSTLEGAQRTLMEALVASYLIKPEVQVRQVAVKFASTVFPSDHIPSRYLLLLAAGDPREEVHGEAQRVLRCLPGRNRKESTSEQMPSFPEMVYYIQEKASHRMKTPVKYMTGTTVLPFNPAAFGEIVLYLRMCLAHSAGVVPTSQSLADMQDHAPAIGRYIRTLMSSGQMAPSSSNKSGETNPVQIYIGLLQQLLAGVGGLPVMYCLLEAVSVYPEKLATKFVDKTEWIKSLMNNSKEEMRELAALFYSVVVSTVSGNELKSMIEQLIKTTKDNHSPEIQHGSLLALGFTVGRYLAKKKMRMSEQQDLERNADTLPDQEELIQSATETIGSFLDSTSPLLAIAACTALGEIGRNGPLPIPSEGSGFTKLHLVESLLSRIPSSKETNKMKERAIQTLGYFPVGDGDFPHQKLLLQGLMDSVEAKQIELQFTIGEAITSAAIGTSSVAARDAWQMTEEEYTPPAGAKVNDVVPWVLDVILNKHIISPNPHVRQAACIWLLSLVRKLSTHKEVKSHLKEIQSAFVSVLSENDELSQDVASKGLGLVYELGNEQDQQELVSTLVETLMTGKRVKHEVSGETVVFQGGALGKTPDGQGLSTYKELCSLASDLSQPDLVYKFMNLANHHAMWNSRKGAAFGFNVIATRAGEQLAPFLPQLVPRLYRYQFDPNLGIRQAMTSIWNALVTDKSMVDKYLKEILQDLVKNLTSNMWRVRESSCLALNDLLRGRPLDDIIDKLPEIWETLFRVQDDIKESVRKAAELALKTLSKVCVKMCDPAKGAAGQRTIAALLPCLLDKGMMSTVTEVRALSINTLVKISKSAGAMLKPHAPKLIPALLESLSVLEPQVLNYLSLRATEQEKAAMDSARLSAAKSSPMMETINMCLQYLDVSVLGELVPRLCELIRSGVGLGTKGGCASVIVSLTTQCPQDLTPYSGKLMSALLSGLTDRNSVIQKSCAFAMGHLVRTSRDSSTEKLLQKLNGWYMEKEEPIYKTSCALTIHAIGRYSPDVLKNHAKEVLPLAFLGMHEIADEEKSEKEECNLWTEVWQENVPGSFGGIRLYLQELITITQKALQSQSWKMKAQGAIAMASIAKQTSSLVPPYLGMILTALLQGLAGRTWAGKEELLKAIACVVTACSAELEKSVPNQPSTNEILQAVLKECSKENVKYKIVAISCAADILKATKEDRFQEFSNIVIPLIKKNSLESSGVRTTKNEEENEKEKELQLEYLLGAFESLGKAWPRNAETQRCYRQELCKLMCERLKLSTWKVQLGVLQSMNAFFQGLMLLEEEHADPEALAEILLETCKSITYSLENKTYSSVRTEALSVIELLLKKLEESKQWECLTSECRVLLIESLATMEPDSRPELQEKAALLKKTLENLE

SEQ ID NO: 6229 - protein, 343 aa, Homo sapiens
MNQLGGLFVNGRPLPLDTRQQIVRLAVSGMRPCDISRILKVSNGCVSKILGRYYRTGVLEPKGIGGSKPRLATPPVVARIAQLKGECPALFAWEIQRQLCAEGLCTQDKTPSVSSINRVLRALQEDQGLPCTRLRSPAVLAPAVLTPHSGSETPRGTHPGTGHRNRTIFSPSQAEALEKEFQRGQYPDSVARGKLATATSLPEDTVRVWFSNRRAKWRRQEKLKWEMQLPGASQGLTVPRVAPGIISAQQSPGSVPTAALPALEPLGPSCYQLCWATAPERCLSDTPPKACLKPCWGHLPPQPNSLDSGLLCLPCPSSHCHLASLSGSQALLWPGCPLLYGLE

SEQ ID NO: 6230 - protein, 649 aa, Homo sapiens
MISAAWSIFLIGTKIGLFLQVAPLSVMAKSCPSVCRCDAGFIYCNDRFLTSIPTGIPEDATTLYLQNNQINNAGIPSDLKNLLKVERIYLYHNSLDEFPTNLPKYVKELHLQENNIRTITYDSLSKIPYLEELHLDDNSVSAVSIEEGAFRDSNYLRLLFLSRNHLSTIPWGLPRTIEELRLDDNRISTISSPSLQGLTSLKRLVLDGNLLNNHGLGDKVFFNLVNLTELSLVRNSLTAAPVNLPGTNLRKLYLQDNHINRVPPNAFSYLRQLYRLDMSNNNLSNLPQGIFDDLDNITQLILRNNPWYCGCKMKWVRDWLQSLPVKVNVRGLMCQAPEKVRGMAIKDLNAELFDCKDSGIVSTIQITTAIPNTVYPAQGQWPAPVTKQPDIKNPKLTKDHQTTGSPSRKTITITVKSVTSDTIHISWKLALPMTALRLSWLKLGHSPAFGSITETIVTGERSEYLVTALEPDSPYKVCMVPMETSNLYLFDETPVCIETETAPLRMYNPTTTLNREQEKEPYKNPNLPLAAIIGGAVALVTIALLALVCWYVHRNGSLFSRNCAYSKGRRRKDDYAEAGTKKDNSILEIRETSFQMLPISNEPISKEEFVIHTIFPPNGMNLYKNNHSESSSNRSYRDSGIPDSDHSHS

SEQ ID NO: 6231 - protein, 708 aa, Homo sapiens
MNPTETKAIPVSQQMEGPHLPNKKKHKKQAVKTEPEKKSQSTKLSVVHEKKSQEGKPKEHTEPKSLPKQASDTGSNDAHNKKAVSRSAEQQPSEKSTEPKTKPQDMISAGGESVAGITAISGKPGDKKKEKKSLTPAVPVESKPDKPSGKSGMDAALDDLIDTLGGPEETEEENTTYTGPEVSDPMSSTYIEELGKREVTIPPKYRELLAKKEGITGPPADSSKPIGPDDAIDALSSDFTCGSPTAAGKKTEKEESTEVLKAQSAGTVRSAAPPQEKKRKVEKDTMSDQALEALSASLGTRQAEPELDLRSIKEVDEAKAKEEKLEKCGEDDETIPSEYRLKPATDKDGKPLLPEPEEKPKPRSESELIDELSEDFDRSECKEKPSKPTEKTEESKAAAPAPVSEAVCRTSMCSIQSAPPEPATLKGTVPDDAVEALADSLGKKEADPEDGKPVMDKVKEKAKEEDREKLGEKEETIPPDYRLEEVKDKDGKPLLPKESKEQLPPMSEDFLLDALSEDFSGPQNASSLKFEDAKLAAAISEVVSQTPASTTQAGAPPRDTSQSDKDLDDALDKLSDSLGQRQPDPDENKPMEDKVKEKAKAEHRDKLGERDDTIPPEYRHLLDDNGQDKPVKPPTKKSEDSKKPADDQDPIDALSGDLDSCPSTTETSQNTAKDKCKKAASSSKAPKNGGKAKDSAKTTEETSKPKDD

SEQ ID NO: 6232 - protein, 1736 aa, Homo sapiens
MERCSRCHRLLLLLPLVLGLSAAPGWAGAPPVDVLRALRFPSLPDGVRRAKGICPADVAYRVARPAQLSAPTRQLFPGGFPKDFSLLTVVRTRPGLQAPLLTLYSAQGVRQLGLELGRPVRFLYEDQTGRPQPPSQPVFRGLSLADGKWHRVAVAVKGQSVTLIVDCKKRVTRPLPRSARPVLDTHGVIIFGARILDEEVFEGDVQELAIVPGVQAAYESCEQKELECEGGQRERPQNQQPHRAQRSPQQQPSRLHRPQNQEPQSQPTESLYYDYEPPYYDVMTTGTTPDYQDPTPGEEEEILESSLLPPLEEEQTDLQVPPTADRFQAEEYGEGGTDPPEGPYDYTYGYGDDYREETELGPALSAETAHSGAAAHGPRGLKGEKGEPAVLEPGMLVEGPPGPEGPAGLIGPPGIQGNPGPVGDPGERGPPGRAGLPGSDGAPGPPGTSLMLPFRFGSGGGDKGPVVAAQEAQAQAILQQARLALRGPPGPMGYTGRPGPLGQPGSPGLKGESGDLGPQGPRGPQGLTGPPGKAGRRGRAGADGARGMPGDPGVKGDRGFDGLPGLPGEKGHRGDTGAQGLPGPPGEDGERGDDGEIGPRGLPGESGPRGLLGPKGPPGIPGPPGVRGMDGPQGPKGSLGPQGEPGPPGQQGTPGTQGLPGPQGAIGPHGEKGPQGKPGLPGMPGSDGPPGHPGKEGPPGTKGNQGPSGPQGPLGYPGPRGVKGVDGIRGLKGHKGEKGEDGFPGFKGDIGVKGDRGEVGVPGSRGEDGPEGPKGRTGPTGDPGPPGLMGEKGKLGVPGLPGYPGRQGPKGSLGFPGFPGASGEKGARGLSGKSGPRGERGPTGPRGQRGPRGATGKSGAKGTSGGDGPHGPPGERGLPGPQGPNGFPGPKGPPGPPGKDGLPGHPGQRGEVGFQGKTGPPGPPGVVGPQGAAGETGPMGERGHPGPPGPPGEQGLPGTAGKEGTKGDPGPPGAPGKDGPAGLRGFPGERGLPGTAGGPGLKGNEGPSGPPGPAGSPGERGAAGSGGPIGPPGRPGPQGPPGAAGEKGVPGEKGPIGPTGRDGVQGPVGLPGPAGPPGVAGEDGDKGEVGDPGQKGTKGNKGEHGPPGPPGPIGPVGQPGAAGADGEPGARGPQGHFGAKGDEGTRGFNGPPGPIGLQGLPGPSGEKGETGDVGPMGPPGPPGPRGPAGPNGADGPQGPPGGVGNLGPPGEKGEPGESGSPGIQGEPGVKGPRGERGEKGESGQPGEPGPPGPKGPTGDDGPKGNPGPVGFPGDPGPPGEGGPRGQDGAKGDRGEDGEPGQPGSPGPTGENGPPGPLGKRGPAGSPGSEGRQGGKGAKGDPGAIGAPGKTGPVGPAGPAGKPGPDGLRGLPGSVGQQGRPGATGQAGPPGPVGPPGLPGLRGDAGAKGEKGHPGLIGLIGPPGEQGEKGDRGLPGPQGSPGQKGEMGIPGASGPIGPGGPPGLPGPAGPKGAKGATGPGGPKGEKGVQGPPGHPGPPGEVIQPLPIQMPKKTRRSVDGSRLMQEDEAIPTGGAPGSPGGLEEIFGSLDSLREEIEQMRRPTGTQDSPARTCQDLKLCHPELPDGEYWVDPNQGCARDAFRVFCNFTAGGETCVTPRDDVTQFSYVDSEGSPVGVVQLTFLRLLSVSAHQDVSYPCSGAARDGPLRLRGANEDELSPETSPYVKEFRDGCQTQQGRTVLEVRTPVLEQLPVLDASFSDLGAPPRRGGVLLGPVCFMG

SEQ ID NO: 6233 - protein, 686 aa, Homo sapiens
MGSYLSVPAYFTSRDLFRCSECQDSLTNWYYEKDGKLYCPKDYWGKFGEFCHGCSLLMTGPFMVAGEFKYHPECFACMSCKVIIEDGDAYALVQHATLYCGKCHNEVVLAPMFERLSTESVQEQLPYSVTLISMPATTEGRRGFSVSVESACSNYATTVQVKEVNRMHISPNNRNAIHPGDRILEINGTPVRTLRVEEVEDAISQTSQTLQLLIEHDPVSQRLDQLRLEARLAPHMQNAGHPHALSTLDTKENLEGTLRRRSLRRSNSISKSPGPSSPKEPLLFSRDISRSESLRCSSSYSQQIFRPCDLIHGEVLGKGFFGQAIKVTHKATGKVMVMKELIRCDEETQKTFLTEVKVMRSLDHPNVLKFIGVLYKDKKLNLLTEYIEGGTLKDFLRSMDPFPWQQKVRFAKGIASGMAYLHSMCIIHRDLNSHNCLIKLDKTVVVADFGLSRLIVEERKRAPMEKATTKKRTLRKNDRKKRYTVVGNPYWMAPEMLNGKSYDETVDIFSFGIVLCEIIGQVYADPDCLPRTLDFGLNVKLFWEKFVPTDCPPAFFPLAAICCRLEPESRAPPGAAGEGPGCADDEGPVRRQGKVTIKYDPKELRKHLNLEEWILEQLTRLYDCQEEEISELEIDVDELLDMESDDAWASRVKELLVDCYKPTEAFISGLLDKIRAMQKLSTPQKK

SEQ ID NO: 6234 - protein, 792 aa, Homo sapiens
MAFSGIYKLDDGKPYLNNCFPARNLLRVPEEGQGHWLVVQKGNLKKKPKGLVGAQAERRESLKATSFEFKGKKESRRENQVDLPGHILDQAFLLKHHCVRKPSDLCTINAKENDFKHFHSVIYINASENLLPLEAFHTFPALKELDLAFNGIKTIYVKYGDFKLLEFLDLSFNSLTVEAICDLGILPHLRVLLLTGNGLTSLPPNLAVAEQEASVTSLTSKRYILRFPALETLMLDDNRLSNPSCFASLAGLRRLKKLSLDENRIIRIPYLQQVQLYDESVDWNGGRGSPHKEPQFMLQSKPRMLEDSDEQLDYTVLPMKKDVDRTEVVFSSYPGFSTSETTKICSLPPIFEILPVKSLKARNQTLAPPFPELRYLSLAYNKIAKEDAVLPVALFPSLCEFVFHNNPLVAHTRGVPPLLKSFLQERLGIHLIRRKIVKPKHHVLMSRKESWKVKSEIPKVPKQPLVLHHPRMTTTKSPSKDMLEPEAELAEDLPTTKSTSVESEMPTENLEGHSPSCRTFVPLPPICSNSTVHSEETLSHLSDTTVRLSPERPSDEDSKSTESIFLTQVSELPSSVIHKDDLELKEKDQKKPPTAPREVKGTRRKLPTAFLPSKYHGYEELLTAKPDPAFIEPKGIQKNAQALQQMLKHPLLCHSSKPKLDTLQKPYVHKEKRAQRIPIPPPKKTRAQLLDDIFIRLRDPRNITEAPLGAVLHQWTERRLVNHKQYLEAKRLLKEFQARYRQLVSGSLRTVFGTTPLPMACPALSESQPKFGHFLEFMDEFCQEPTASDSQG

SEQ ID NO: 6235 - protein, 395 aa, Homo sapiens
MPFITYLSGLLTAQMLSDDQLISGVEIRCEEKGRCPSTCHLCRRPGKEQLSPTPVLLEINRVVPLYTLIQDNGTKEAFKSALMSSYWCSGKGDVIDDWCRCDLSAFDANGLPNCSPLLQPVLRLSPTVEPSSTVVSLEWVDVQPAIGTKVSDYILQHKKVDEYTDTDLYTGEFLSFADDLLSGLGTSCVAAGRSHGEVPEVSIYSVIFKCLEPDGLYKFTLYAVDTRGRHSELSTVTLRTACPLVDDNKAEEIADKIYNLYNGYTSGKEQQMAYNTLMEVSASMLFRVQHHYNSHYEKFGDFVWRSEDELGPRKAHLILRRLERVSSHCSSLLRSAYIQSRVETVPYLFCRSEEVRPAGMVWYSILKDTKITCEEKMVSMARNTYYLTLSKVSPF

SEQ ID NO: 6236 - protein, 290 aa, Homo sapiens
MYHGMNPSNGDGFLEQQQQQQQPQSPQRLLAVILWFQLALCFGPAQLTGGFDDLQVCADPGIPENGFRTPSGGVFFEGSVARFHCQDGFKLKGATKRLCLKHFNGTLGWIPSDNSICVQEDCRIPQIEDAEIHNKTYRHGEKLIITCHEGFKIRYPDLHNMVSLCRDDGTWNNLPICQGCLRPLASSNGYVNISELQTSFPVGTVISYRCFPGFKLDGSAYLECLQNLIWSSSPPRCLALEGGRPEHLFPVLYFPHIRLAAAVLYFCPVLKSSPTPAPTCSSTSTTTSLF

SEQ ID NO: 6237 - protein, 574 aa, Homo sapiens
MSIQENISSLQLRSWVSKSQRDLAKSILIGAPGGPAGYLRRASVAQLTQELGTAFFQQQQLPAAMADTFLEHLCLLDIDSEPVAARSTSIIATIGPASRSVERLKEMIKAGMNIARLNFSHGSHEYHAESIANVREAVESFAGSPLSYRPVAIALDTKGPEIRTGILQGGPESEVELVKGSQVLVTVDPAFRTRGNANTVWVDYPNIVRVVPVGGRIYIDDGLISLVVQKIGPEGLVTQVENGGVLGSRKGVNLPGAQVDLPGLSEQDVRDLRFGVEHGVDIVFASFVRKASDVAAVRAALGPEGHGIKIISKIENHEGVKRFDEILEVSDGIMVARGDLGIEIPAEKVFLAQKMMIGRCNLAGKPVVCATQMLESMITKPRPTRAETSDVANAVLDGADCIMLSGETAKGNFPVEAVKMQHAIAREAEAAVYHRQLFEELRRAAPLSRDPTEVTAIGAVEAAFKCCAAAIIVLTTTGRSAQLLSRYRPRAAVIAVTRSAQAARQVHLCRGVFPLLYREPPEAIWADDVDRRVQFGIESGKLRGFLRVGDLVIVVTGWRPGSGYTNIMRVLSIS

SEQ ID NO: 6238 - protein, 663 aa, Homo sapiens
MAGMKTASGDYIDSSWELRVFVGEEDPEAESVTLRVTGESHIGGVLLKIVEQINRKQDWSDHAIWWEQKRQWLLQTHWTLDKYGILADARLFFGPQHRPVILRLPNRRALRLRASFSQPLFQAVAAICRLLSIRHPEELSLLRAPEKKEKKKKEKEPEEELYDLSKVVLAGGVAPALFRGMPAHFSDSAQTEACYHMLSRPQPPPDPLLLQRLPRPSSLSDKTQLHSRWLDSSRCLMQQGIKAGDALWLRFKYYSFFDLDPKTDPVRLTQLYEQARWDLLLEEIDCTEEEMMVFAALQYHINKLSQSGEVGEPAGTDPGLDDLDVALSNLEVKLEGSAPTDVLDSLTTIPELKDHLRIFRPRKLTLKGYRQHWVVFKETTLSYYKSQDEAPGDPIQQLNLKGCEVVPDVNVSGQKFCIKLLVPSPEGMSEIYLRCQDEQQYARWMAGCRLASKGRTMADSSYTSEVQAILAFLSLQRTGSGGPGNHPHGPDASAEGLNPYGLVAPRFQRKFKAKQLTPRILEAHQNVAQLSLAEAQLRFIQAWQSLPDFGISYVMVRFKGSRKDEILGIANNRLIRIDLAVGDVVKTWRFSNMRQWNVNWDIRQVAIEFDEHINVAFSCVSASCRIVHEYIGGYIFLSTRERARGEELDEDLFLQLTGGHEAF

SEQ ID NO: 6239 - protein, 950 aa, Homo sapiens [sequence omitted]

SEQ ID NO: 6240 - protein, 1287 aa, Homo sapiens
MVPGEENQLVPKEAPLDHTSDKSLLDANFEPGKKNFLHLTDKDGEQPQILLEDSSAGEDSVHDRFIGPLPREGSGGSTSDYVSQSYSYSSILNKSETGYVGLVNQAMTCYLNSLLQTLFMTPEFRNALYKWEFEESEEDPVTSIPYQLQRLFVLLQTSKKRAIETTDVTRSFGWDSSEAWQQHDVQELCRVMFDALEQKWKQTEQADLINELYQGKLKDYVRCLECGYEGWRIDTYLDIPLVIRPYGSSQAFASVEEALHAFIQPEILDGPNQYFCERCKKKCDARKGLRFLHFPYLLTLQLKRFDFDYTTMHRIKLNDRMTFPEELDMSTFIDVEDEKSPQTESCTDSGAENEGSCHSDQMSNDFSNDDGVDEGICLETNSGTEKISKSGLEKNSLIYELFSVMVHSGSAAGGHYYACIKSFSDEQWYSFNDQHVSRITQEDIKKTHGGSSGSRGYYSSAFASSTNAYMLIYRLKDPARNAKFLEVDEYPEHIKNLVQKERELEEQEKRQREIERNTCKIKLFCLHPTKQVMMENKLEVHKDKTLKEAVEMAYKMMDLEEVIPLDCCRLVKYDEFHDYLERSYEGEEDTPMGLLLGGVKSTYMFDLLLETRKPDQVFQSYKPGEVMVKVHVVDLKAESVAAPITVRAYLNQTVTEFKQLISKAIHLPAETMRIVLERCYNDLRLLSVSSKTLKAEGFFRSNKVFVESSETLDYQMAFADSHLWKLLDRHANTIRLFVLLPEQSPVSYSKRTAYQKAGGDSGNVDDDCERVKGPVGSLKSVEAILEESTEKLKSLSLQQQQDGDNGDSSKSTETSDFENIESPLNERDSSASVDNRELEQHIQTSDPENFQSEERSDSDVNNDRSTSSVDSDILSSSHSSDTLCNADNAQIPLANGLDSHSITSSRRTKANEGKKETWDTAEEDSGTDSEYDESGKSRGEMQYMYFKAEPYAADEGSGEGHKWLMVHVDKRITLAAFKQHLEPFVGVLSSHFKVFRVYASNQEFESVRLNETLSSFSDDNKITIRLGRALKKGEYRVKVYQLLVNEQEPCKFLLDAVFAKGMTVRQSKEELIPQLREQCGLELSIDRFRLRKKTWKNPGTVFLDYHIYEEDINISSNWEVFLEVLDGVEKMKSMSQLAVLSRRWKPSEMKLDPFQEVVLESSSVDELREKLSEISGIPLDDIEFAKGRGTFPCDISVLDIHQDLDWNPKVSTLNVWPLYICDDGAVIFYRDKTEELMELTDEQRNELMKKESSRLQKTGHRVTYSPRKEKALKIYLDGAPNKDLTQD

SEQ ID NO: 6241 - protein, 1504 aa, Homo sapiens
MATARTFGPEREAEPAKEARVVGSELVDTYTVYIIQVTDGSHEWTVKHRYSDFHDLHEKLVAERKIDKNLLPPKKIIGKNSRSLVEKREKDLEVYLQKLLAAFPGVTPRVLAHFLHFHFYEINGITAALAEELFEKGEQLLGAGEVFAIGPLQLYAVTEQLQQGKPTCASGDAKTDLGHILDFTCRLKYLKVSGTEGPFGTSNIQEQLLPFDLSIFKSLHQVEISHCDAKHIRGLVASKPTLATLSVRFSATSMKEVLVPEASEFDEWEPEGTTLEGPVTAVIPTWQALTTLDLSHNSVSEIDESVKLIPKIEFLDLSHNGLLVVDNLQHLYNLVHLDLSYNKLSSLEGLHTKLGNIKTLNLAGNLLESLSGLHKLYSLVNLDLRDNRIEQMEEVRSIGSLPCLEHVSLLNNPLSIIPDYRTKVLAQFGERASEVCLDDTVTTEKELDTVEVLKAIQKAKEVKSKLSNPEKKGGEDSRLSAAPCIRPSSSPPTVAPASASLPQPILSNQGIMFVQEEALASSLSSTDSLTPEHQPIAQGCSDSLESIPAGQAASDDLRDVPGAVGGASPEHAEPEVQVVPGSGQIIFLPFTCIGYTATNQDFIQRLSTLIRQAIERQLPAWIEAANQREEGQGEQGEEEDEEEEEEEDVAENRYFEMGPPDVEEEEGGGQGEEEEEEEEDEEAEEERLALEWALGADEDFLLEHIRILKVLWCFLIHVQGSIRQFAACLVLTDFGIAVFEIPHQESRGSSQHILSSLRFVFCFPHGDLTEFGFLMPELCLVLKVRHSENTLFIISDAANLHEFHADLRSCFAPQHMAMLCSPILYGSHTSLQEFLRQLLTFYKVAGGCQERSQGCFPVYLVYSDKRMVQTAAGDYSGNIEWASCTLCSAVRRSCCAPSEAVKSAAIPYWLLLTPQHLNVIKADFNPMPNRGTHNCRNRNSFKLSRVPLSTVLLDPTRSCTQPRGAFADGHVLELLVGYRFVTAIFVLPHEKFHFLRVYNQLRASLQDLKTVVIAKTPGTGGSPQGSFADGQPAERRASNDQRPQEVPAEALAPAPAEVPAPAPAAASASGPAKTPAPAEASTSALVPEETPVEAPAPPPAEAPAQYPSEHLIQATSEENQIPSHLPACPSLRHVASLRGSAIIELFHSSIAEVENEELRHLMWSSVVFYQTPGLEVTACVLLSTKAVYFVLHDGLRRYFSEPLQDFWHQKNTDYNNSPFHISQCFVLKLSDLQSVNVGLFDQHFRLTGSTPMQVVTCLTRDSYLTHCFLQHLMVVLSSLERTPSPEPVDKDFYSEFGNKTTGKMENYELIHSSRVKFTYPSEEEIGDLTFTVAQKMAEPEKAPALSILLYVQAFQVGMPPPGCCRGPLRPKTLLLTSSEIFLLDEDCVHYPLPEFAKEPPQRDRYRLDDGRRVRDLDRVLMGYQTYPQALTLVFDDVQGHDLMGSVTLDHFGEVPGGPARASQGREVQWQVFVPSAESREKLISLLARQWEALCGRELPVELTG

SEQ ID NO: 6242 - protein, 419 aa, Homo sapiens
MAGDSRNAMNQDMEIGVTPWDPKKIPKQARDYVPIATDRTRLLAEGKKPRQRYMEKSGKCNVHHGNVQETYRYLSDLFTTLVDLKWRFNLLVFTMVYTVTWLFFGFIWWLIAYIRGDLDHVGDQEWIPCVENLSGFVSAFLFSIETETTIGYGFRVITEKCPEGIILLLVQAILGSIVNAFMVGCMFVKISQPKKRAETLMFSNNAVISMRDEKLCLMFRVGDLRNSHIVEASIRAKLIKSRQTKEGEFIPLNQTDINVGFDTGDDRLFLVSPLIISHEINQKSPFWEMSQAQLHQEEFEVVVILEGMVEATGMTCQARSSYMDTEVLWGHRFTPVLTLEKGFYEVDYNTFHDTYETNTPSCCAKELAEMKREGRLLQYLPSPPLLGGCAEAGLDAEAEQNEEDEPKGLGGSREARGSV

SEQ ID NO: 6243 - protein, 1068 aa, Homo sapiens
VAGTPTSSQPSFGPSIRERPSQSLCPCPCPAGEGDPAWPALERRLVTSRGRQPSPQSHAQLLTRRRHSSEQVPPESEPRADFRSGKWLQEPATGDARDSRQALRARMSSKHRICSQEEVVIPCAYDSDSESVDLELSNLEIIKKGSSSIELTDLDIPDIPGLHCEPLSHSPRHLTQQDPLSEAIVEKLIQSIQKVFNGELKGELEKLKFLGDLSSLSQALPYDETAKSFIHSHIADIVHTLNVLVQEERPHSLSSSMRQEVFVTIADLSYQDVHLLLGSEDRAELFSLTIKSIITLPSVRTLTQIQEIMPNGTCNTECLYRQTFQAFSEMLQSLVVKDPHLENLDTIIKHLVPWLQSVKDHERERATASMAQVLKCLSKHLNLKLPLRFQRLGHLVALMALLCGDPQEKVAEEAAEGIHSLLHITLRLKYITHDKKDQQNLKRALTKCREFLELHSSAAKCFYNCPFRIAQVFEGFLDSNELCQFIMTTFDTLKTLKHPCIQRSAGELLLTLAKNTESQFEKVPEIMGVICAQLSIISQPRVRQQIINTVSLFISRPKYTDIVLSFLLCHPVPYNRHLAEVWRMLSVELPSTTWILWRLLRKLQKCHNEPAQEKMAYVAVAATDALYEVFLGNRLRAATFRLFPQLLMTLLIQIHHSIGLTMSDVDIPSGLYTEQEVPSEVTPLCFAMQATKTLLLRTCCLQEFNIMEKNKGWALLGGKDGHLQGLFLLANALLERNQLLAQKVMYLLVPLLNRGNDKHKLTSAGFFVELLRSPVAKRLPSIYSVARFKDWLQDGNHLFRILGLRGLYNLVGHQEMREDIKSLLPYIVDSLRETDEKIVLSAIQILLQLVRTMDFTTLAAMMRTLFSLFGDVRSDVHRFSVTLFGAAIKSVKNPDKKSIENQVLDSLVPLLLYSQDENDAVAEESRQVLTICAQFLKWKLPQEVYSKDPWHIKPTEAGTICRFFEKKCKGKINILEQTLMYSKNPKLPIRRSAVLFVGLLSKYMDHNELRRMGTDWIEDDLRDLLCDPEPSLCIIASQTLLLVQMARAEPKPKQRVNWLQKLMGRSSA

SEQ ID NO: 6244 - protein, 236 aa, Homo sapiens
MAYFHELSSRVSFQEARLACESEGGVLLSLENEAEQKLIESMLQNLTKPGTGISDGDFWIGLWRNGDGQTSGACPDLYQWSDGSNSQYRNWYTDEPSCGSEKCVVMYHQPTANPGLGGPYLYQWNDDRCNMKHNYICKYEPEINPTAPVEKPYLTNQPGDTHQNVVVTEAVKEEQKLVQTSLHCGFQRVPEKKVAWKYNNSLTWFQNFVILDLYKEWHQNNSLEWLEITKDLQDEL

SEQ ID NO: 6245 - protein, 761 aa, Homo sapiens
MARRPRHSIYSSDEDDEDFEMCDHDYDGLLPKSGKRHLGKTRWTREEDEKLKKLVEQNGTDDWKVIANYLPNRTDVQCQHRWQKVLNPELIKGPWTKEEDQRVIELVQKYGPKRWSVIAKHLKGRIGKQCRERWHNHLNPEVKKTSWTEEEDRIIYQAHKRLGNRWAEIAKLLPGRTDNAIKNHWNSTMRRKVEQEGYLQESSKASQPAVATSFQKNSHLMGFAQAPPTAQLPATGQPTVNNDYSYYHISEAQNVSSHVPYPVALHVNIVNVPQPAAAAIQRHYNDEDPEKEKRIKELELLLMSTENELKGQQVLPTQNHTCSYPGWHSTTIADHTRPHGDSAPVSCLGEHHSTPSLPADPGSLPEESASPARCMIVHQGTILDNVKNLLEFAETLQFIDSDSSSWCDLSSFEFFEEADFSPSQHHTGKALQLQQREGNGTKPAGEPSPRVNKRMLSESSLDPPKVLPPARHSTIPLVILRKKRGQASPLATGDCSSFIFADVSSSTPKRSPVKSLPFSPSQFLNTSSNHENSDLEMPSLTSTPLIGHKLTVTTPFHRDQTVKTQKENTVFRTPAIKRSILESSPRTPTPFKHALAAQEIKYGPLKMLPQTPSHLVEDLQDVIKQESDESGIVAEFQENGPPLLKKIKQEVESPTDKSGNFFCSHHWEGDSLNTQLFTQTSPVADAPNILTSSVLMAPASEDEDNVLKAFTVPKNRSLASPLQPCSSTWEPASCGKMEEQMTSSSQARKYVNAFSARTLVM

SEQ ID NO: 6246 - protein, 553 aa, Homo sapiens
MDSVASEDVAVNFTLEEWALLDPSQKKLYRDVMRETFRNLACVGKKWEDQSIEDWYKNQGRILRNHMEEGLSESKEYDQCGEAFSQILNLNLNKKIPTIVRPCECSLCGKVFMHHSSLSRHIRSHLGHKPYDYQEYGEKPYKCKQCGKAFSSCQSFRRHERTHTGEKPYACPECGKAFISLPSVRRHMIKHTGDGPYKCQECGKAFDRPSLFQIHERTHTGEKPYECQECAKAFISLPSFQRHMIRHTGDGPYKCQECGKAFDRPSLFRIHERTHTGEKPHECKQCGKAFISFTNFQSHMIRHTGDGPYKCKVCGRAFIFPSYVRKHERTHTGEKPYECNKCGKTFSSSSNVRTHERTHTGEKPYECKECGKAFISLPSVRRHMIKHTGDGPYKCQVCGRAFDCPSSFQIHERTHTGEKPYECQVCGKAFISLKRIRKHMILHTGDGPYKCQVCGKAFDCPSSVRTHERTHTGEKPYECKECGKAFNYASSIRIHERTHTGEKPYECKQCGKTFSYSSSFQRHERAHNGDKPYVKNVGKLSFITQPSNTCENE

SEQ ID NO: 6247 - protein, 400 aa, Homo sapiens
MRGRRGDRMTINIQEHMAINVCPGPIRPIRQISDYFPRGPGPEGGGGGGGEAPAHLVPLALAPPAALLGATTPEDGAEVDSYDSDDATALGTLEFDLLYDRASCTLHCSILRAKGLKPMDFNGLADPYVKLHLLPGACKANKLKTKTQRNTLNPVWNEDLTYSGITDDDITHKVLRIAVCDEDKLSHNEFIGEIRVPLRRLKPSQKKHFNICLERQVPLASPSSMSAALRGISCYLKELEQAEQGQGLLEERGRILLSLSYSSRRRGLLVGILRCAHLAAMDVNGYSDPYVKTYLRPDVDKKSKHKTCVKKKTLNPEFNEEFFYEIELSTLATKTLEVTVWDYDIGKSNDFIGGVSLGPGARGEARKHWSDCLQQPDAALERWHTLTSELPPAAGALSSA

SEQ ID NO: 6248 - protein, 573 aa, Homo sapiens
MLRLPTVFRQMRPVSRVLAPHLTRAYAKDVKFGADARALMLQGVDLLADAVAVTMGPKGRTVIIEQSWGSPKVTKDGVTVAKSIDLKDKYKNIGAKLVQDVANNTNEEAGDGTTTATVLARSIAKEGFEKISKGANPVEIRRGVMLAVDAVIAELKKQSKPVTTPEEIAQVATISANGDKEIGNIISDAMKKVGRKGVITVKDGKTLNDELEIIEGMKFDRGYISPYFINTSKGQKCEFQDAYVLLSEKKISSIQSIVPALEIANAHRKPLVIIAEDVDGEALSTLVLNRLKVGLQVVAVKAPGFGDNRKNQLKDMAIATGGAVFGEEGLTLNLEDVQPHDLGKVGEVIVTKDDAMLLKGKGDKAQIEKRIQEIIEQLDVTTSEYEKEKLNERLAKLSDGVAVLKVGGTSDVEVNEKKDRVTDALNATRAAVEEGIVLGGGCALLRCIPALDSLTPANEDQKIGIEIIKRTLKIPAMTIAKNAGVEGSLIVEKIMQSSSEVGYDAMAGDFVNMVEKGIIDPTKVVRTALLDAAGVASLLTTAEVVVTEIPKEEKDPGMGAMGGMGGGMGGGMF

SEQ ID NO: 6249 - protein, 497 aa, Homo sapiens
MAMSSLGCLCALTVLIRYCNRDFDDEKILIQHQKAKHFKCHICHKKLYTGPGLAIHCMQVHKETIDAVPNAIPGRTDIELEIYGMEGIPEKDMDERRRLLEQKTQESQKKKQQDDSDEYDDDDSAASTSFQPQPVQPQQGYIPPMAQPGLPPVPGAPGMPPGIPPLMPGVPPLMPGMPPVMPGMPPGLHHQRKYTQSFCGENIMMPMGGMMPPGPGIPPLMPGMPPGMPPPVPRPGIPPMTQAQAVSAPGILNRPPAPTATVPAPQPPVTKPLFPSAGQMGTPVTSSSTASSNSESLSASSKALFPSTAQAQAAVQGPVGTDFKPLNSTPATTTEPPKPTFPAYTQSTASTTSTTNSTAAKPAASITSKPATLTTTSATSKLIHPDEDISLEERRAQLPKYQRNLPRPGQAPIGNPPVGPIGGMMPPQPGIPQQQGMRPPMPPHGQYGGHHQGMPGYLPGAMPPYGQGPPMVPPYQGGPPRPPMGMRPPVMSQGGRY

SEQ ID NO: 6250 - protein, 948 aa, Homo sapiens
MASVPVYCLCRLPYDVTRFMIECDMCQDWFHGSCVGVEEEKAADIDLYHCPNCEVLHGPSIMKKRRGSSKGHDTHKGKPVKTGSPTFVRELRSRTFDSSDEVILKPTGNQLTVEFLEENSFSVPILVLKKDGLGMTLPSPSFTVRDVEHYVGSDKEIDVIDVTRQADCKMKLGDFVKYYYSGKREKVLNVISLEFSDTRLSNLVETPKIVRKLSWVENLWPEECVFERPNVQKYCLMSVRDSYTDFHIDFGGTSVWYHVLKGEKIFYLIRPTNANLTLFECWSSSSNQNEMFFGDQVDKCYKCSVKQGQTLFIPTGWIHAVLTPVDCLAFGGNFLHSLNIEMQLKAYEIEKRLSTADLFRFPNFETICWYVGKHILDIFRGLRENRRHPASYLVHGGKALNLAFRAWTRKEALPDHEDEIPETVRTVQLIKDLAREIRLVEFNITGACLNDSDDDSPDLDLDGNESPLALLMSNGSTKRVKSLSKSRRTKIAKKVDKARLMAEQVMEDEFDLDSDDELQIDERLGKEKATLIIRPKFPRKLPRAKPCSDPNRVREPGEVEFDIEEDYTTDEDMVEGVEGKLGNGSGAGGILDLLKASRQVGGPDYAALTEAPASPSTQEAIQGMLCMANLQSSSSSPATSSLQAWWTGGQDRSSGSSSSGLGTVSNSPASQRTPGKRPIKRPAYWRTESEEEEENASLDEQDSLGACFKDAEYIYPSLESDDDDPALKSRPKKKKNSDDAPWSPKARVTPTLPKQDRPVREGTRVASIETGLAAAAAKLAQQELQKAQKKKYIKKKPLLKEVEQPRPQDSNLSLTVPAPTVAATPQLVTSSSPLPPPEPKQEALSGSLADHEYTARPNAFGMAQANRSTTPMAPGVFLTQRRPSVGSQSNQAGQGKRPKKGLATAKQRLGRILKIHRNGKLLLRQVIVQAECRQAIHEPKLKRRDAHP

SEQ ID NO: 6251 - protein, 956 aa, Homo sapiens
MLHRKTYHVKDLQGEIEAHTDVYHNLDENSQKILRSLEGSDDAVLLQRRLDNMNFKWSELRKKSLNIRSHLEASSDQWKRLHLSLQELLVWLQLKDDELSRQAPIGGDFPAVQKQNDVHRAFKRELKTKEPVIMSTLETVRIFLTEQPLEGLEKLYQEPRELPPEERAQNVTRLLRKQAEEVNTEWEKLNLHSADWQRKIDETLERLRELQEATDELDLKLRQAEVIKGSWQPVGDLLIDSLQDHLEKVKALRGEIAPLKENVSHVNDLARQLTTLGIQLSPYNLSTLEDLNTRWKLLQVAVEDRVRQLHEAHRDFGPASQHFLSTSVQGPWERAISPNKVPYYINHETQTTCWDHPKMTELYQSLADLNNVRFSAYRTAMKLRRLQKALCLDLLSLSAACDALDQHNLKQNDQPMDILQIINCLTTIYDRLEQEHNNLVNVPLCVDMCLNWLLNVYDTGRTGRIRVLSFKTGIISLCKAHLEDKYRYLFKQVASSTGFCDQRRLGLLLHDSIQIPRQLGEVASFGGSNIEPSVRSCFQFANNKPEIEAALFLDWMRLEPQSMVWLPVLHRVAAAETAKHQAKCNICKECPIIGFRYRSLKHFNYDICQSCFFSGRVAKGHKMHYPMVEYCTPTTSGEDVRDFAKVLKNKFRTKRYFAKHPRMGYLPVQTVLEGDNMETPVTLINFWPVDSAPASSPQLSHDDTHSRIEHYASRLAEMENSNGSYLNDSISPNESIDDEHLLIQHYCQSLNQDSPLSQPRSPAQILISLESEERGELERILADLEEENRNLQAEYDRLKQQHEHKGLSPLPSPPEMMPTSPQSPRDAELIAEAKLLRQHKGRLEARMQILEDHNKQLESQLHRLRQLLEQPQAEAKVNGTTVSSPSTSLQRSDSSQPMLLRVVGSQTSDSMGEEDLLSPPQDTSTGLEEVMEQLNNSFPSSRGRNTPGKPMREDTM

SEQ ID NO: 6252 - protein, 2409 aa, Homo sapiens
MFINIKSILWMCSTLIVTHALHKVKVGKSPPVRGSLSGKVSLPCHFSTMPTLPPSYNTSEFLRIKWSKIEVDKNGKDLKETTVLVAQNGNIKIGQDYKGRVSVPTHPEAVGDASLTVVKLLASDAGLYRCDVMYGIEDTQDTVSLTVDGVVFHYRAATSRYTLNFEAAQKACLDVGAVIATPEQLFAAYEDGFEQCDAGWLADQTVRYPIRAPRVGCYGDKMGKAGVRTYGFRSPQETYDVYCYVDHLDGDVFHLTVPSKFTFEEAAKECENQDARLATVGELQAAWRNGFDQCDYGWLSDASVRHPVTVARAQCGGGLLGVRTLYRFENQTGFPPPDSRFDAYCFKRRMSDLSVIGHPIDSESKEDEPCSEETDPVHDLMAEILPEFPDIIEIDLYHSEENEEEEEECANATDVTTTPSVQYINGKHLVTTVPKDPEAAEARRGQFESVAPSQNFSDSSESDTHPFVIAKTELSTAVQPNESTETTESLEVTWKPETYPETSEHFSGGEPDVFPTVPFHEEFESGTAKKGAESVTERDTEVGHQAHEHTEPVSLFPEESSGEIAIDQESQKIAFARATEVTFGEEVEKSTSVTYTPTIVPSSASAYVSEEEAVTLIGNPWPDDLLSTKESWVEATPRQVVELSGSSSIPITEGSGEAEEDEDTMFTMVTDLSQRNTTDTLITLDTSRIITESFFEVPATTIYPVSEQPSAKVVPTKFVSETDTSEWISSTTVEEKKRKEEEGTTGTASTFEVYSSTQRSDQLILPFELESPNVATSSDSGTRKSFMSLTTPTQSEREMTDSTPVFTETNTLENLGAQTTEHSSIHQPGVQEGLTTLPRSPASVFMEQGSGEAAADPETTTVSSFSLNVEYAIQAEKEVAGTLSPHVETTFSTEPTGLVLSTVMDRVVAENITQTSREIVISERLGEPNYGAEIRGFSTGFPLEEDFSGDFREYSTVSHPIAKEETVMMEGSGDAAFRDTQTSPSTVPTSVHISHISDSEGPSSTMVSTSAFPWEEFTSSAEGSGEQLVTVSSSVVPVLPSAVQKFSGTASSIIDEGLGEVGTVNEIDRRSTILPTAEVEGTKAPVEKEEVKVSGTVSTNFPQTIEPAKLWSRQEVNPVRQEIESETTSEEQIQEEKSFESPQNSPATEQTIFDSQTFTETELKTTDYSVLTTKKTYSDDKEMKEEDTSLVNMSTPDPDANGLESYTTLPEATEKSHFFLATALVTESIPAEHVVTDSPIKKEESTKHFPKGMRPTIQESDTELLFSGLGSGEEVLPTLPTESVNFTEVEQINNTLYPHTSQVESTSSDKIEDFNRMENVAKEVGPLVSQTDIFEGSGSVTSTTLIEILSDTGAEGPTVAPLPFSTDIGHPQNQTVRWAEEIQTSRPQTITEQDSNKNSSTAEINETTTSSTDFLARAYGFEMAKEFVTSAPKPSDLYYEPSGEGSGEVDIVDSFHTSATTQATRQESSTTFVSDGSLEKHPEVPSAKAVTADGFPTVSVMLPLHSEQNKSSPDPTSTLSNTVSYERSTDGSFQDRFREFEDSTLKPNRKKPTENIIIDLDKEDKDLILTITESTILEILPELTSDKNTIIDIDHTKPVYEDILGMQTDIDTEVPSEPHDSNDESNDDSTQVQEIYEAAVNLSLTEETFEGSADVLASYTQATHDESMTYEDRSQLDHMGFHFTTGIPAPSTETELDVLLPTATSLPIPRKSATVIPEIEGIKAEAKALDDMFESSTLSDGQAIADQSEIIPTLGQFERTQEEYEDKKHAGPSFQPEFSSGAEEALVDHTPYLSIATTHLMDQSVTEVPDVMEGSNPPYYTDTTLAVSTFAKLSSQTPSSPLTIYSGSEASGHTEIPQPSALPGIDVGSSVMSPQDSFKEIHVNIEATFKPSSEEYLHITEPPSLSPDTKLEPSEDDGKPELLEEMEASPTELIAVEGTEILQDFQNKTDGQVSGEAIKMFPTIKTPEAGTVITTADEIELEGATQWPHSTSASATYGVEAGVVPWLSPQTSERPTLSSSPEINPETQAALIRGQDSTIAASEQQVAARILDSNDQATVNPVEFNTEVATPPFSLLETSNETDFLIGINEESVEGTAIYLPGPDRCKMNPCLNGGTCYPTETSYVCTCVPGYSGDQCELDFDECHSNPCRNGATCVDGFNTFRCLCLPSYVGALCEQDTETCDYGWHKFQGQCYKYFAHRRTWDAAERECRLQGAHLTSILSHEEQMFVNRVGHDYQWIGLNDKMFEHDFRWTDGSTLQYENWRPNQPDSFFSAGEDCVVIIWHENGQWNDVPCNYHLTYTCKKGTVACGQPPVVENAKTFGKMKPRYEINSLIRYHCKDGFIQRHLPTIRCLGNGRWAIPKITCMNPSAYQRTYSMKYFKNSSSAKDNSINTSKHDHRWSRRWQESRR

SEQ ID NO: 6253 - protein, 393 aa, Homo sapiens
MDENESNQSLMTSSQYPKEAVRKRQNSARNSGASDSSRFSRKSFKLDYRLEEDVTKSKKGKDGRFVNPWPTWKNPSIPNVLRWLIMEKDHSSVPSSKEELDKELPVLKPYFITNPEEAGVREAGLRVTWLGHATVMVEMDELIFLTDPIFSSRASPSQYMGPKRFRRSPCTISELPPIDAVLISHNHYDHLDYNSVIALNERFGNELRWFVPLGLLDWMQKCGCENVIELDWWEENCVPGHDKVTFVFTPSQHWCKRTLMDDNKVLWGSWSVLGPWNRFFFAGDTGYCPAFEEIGKRFGPFDLAAIPIGAYEPRWFMKYQHVDPEEAVRIHTDVQTKKSMAIHWGTFALANEHYLEPPVKLNEALERYGLNAEDFFVLKHGESRYLNNDDENF

SEQ ID NO: 6254 - protein, 230 aa, Homo sapiens
MGRPLLLPLLPLLLPPAFLQPSGSTGSGPSYLYGVTQPKHLSASMGGSVEIPFSFYYPWELATAPDVRISWRRGHFHRQSFYSTRPPSIHKDYVNRLFLNWTEGQKSGFLRISNLQKQDQSVYFCRVELDTRSSGRQQWQSIEGTKLSITQGQQRTKATTPAREPFQNTEEPYENIRNEGQNTDPKLNPKDDGIVYASLALSSSTSPRAPPSHRPLKSPQNETLYSVLKA

SEQ ID NO: 6255 - protein, 205 aa, Homo sapiens
MMRTLITTHPLPLLLLPQQLLQLVQFQEVDTDFDFPEEDKKEEFEECLEKFFSTGPARPPTKEKVKRRVLIEPGMPLNHIEYCNHEIMGKNVYYKHRWVAEHYFLLMQYDELQKICYNRFVPCKNGIRKCNRSKGLVEGVYCNLTEAFEIPACKYESLYRKGYVLITCSWQNEMQKRIPHTINDLVEPPEHRSFLSEDGVFVISP

SEQ ID NO: 6256 - protein, 607 aa, Homo sapiens
MESCSVAQAGVQWPDLSSLQPPPPRFKQFSCHSLQVAGITDLDLQCEIISYIEVPTYETDISSTQLQSIYKREKLYECKKCQKKFSSGYQLILHHRFHVIERPYECKECGKNFRSGYQLTLHQRFHTGEKPYECTECGKNFRSGYQLTVHQRFHTGEKTYECRQCGKAFIYASHIVQHERIHTGGKPYECQECGRAFSQGGHLRIHQRVHTGEKPYKCKECGKTFSRRSNLVEHGQFHTDEKPYICEKCGKAFRRGHQLTVHQRVHTGKKPYECKECGKGYTTASYFLLHQRIHKGGKPYECKECKKTFTLYRNLTRHQNIHTGEKLFECKQCGKTYTTGSKLFQHQKTHTGEKPYECKECGKAFSLYGYLKQHQKIHTGMKHFECKECKKTFTLYRNLTRHQNIHTGKKLFECQECGKAYSTGSNLIQHRKTHTGEKPYKCKECGKTFSLHGYLNQHQKIHTGMKPYECKVCRKTFTFYRNLTLHQSIHTDEKPFECKECGKTFRRSSHLTAHQSIHADKKPYECKECGKAFKMYGYLTQHQKIHTGGKPYECKECGKAFSRASNLVQHERIHTGEKPYVCKQCGKTFRYGSALKAHQRIHRSIKV

SEQ ID NO: 6257 - protein, 759 aa, Homo sapiens
MESSPFNRRQWTSLSLRVTAKELSLVNKNKSSAIVEIFSKYQKAAEETNMEKKRSNTENLSQHFRKGTLTVLKKKWENPGLGAESHTDSLRNSSTEIRHRADHPPAEVTSHAASGAKADQEEQIHPRSRLRSPPEALVQGRYPHIKDGEDLKDHSTESKKMENCLGESRHEVEKSEISENTDASGKIEKYNVPLNRLKMMFEKGEPTQTKILRAQSRSASGRKISENSYSLDDLEIGPGQLSSSTFDSEKNESRRNLELPRLSETSIKDRMAKYQAAVSKQSSSTNYTNELKASGGEIKIHKMEQKENVPPGPEVCITHQEGEKISANENSLAVRSTPAEDDSRDSQVKSEVQQPVHPKPLSPDSRASSLSESSPPKAMKKFQAPARETCVECQKTVYPMERLLANQQVFHISCFRCSYCNNKLSLGTYASLHGRIYCKPHFNQLFKSKGNYDEGFGHRPHKDLWASKNENEEILERPAQLANARETPHSPGVEDAPIAKVGVLAASMEAKASSQQEKEDKPAETKKLRIAWPPPTELGSSGSALEEGIKMSKPKWPPEDEISKPEVPEDVDLDLKKLRRSSSLKERSRPFTVAASFQSTSVKSPKTVSPPIRKGWSMSEQSEESVGGRVAERKQVENAKASKKNGNVGKTTWQNKESKGETGKRSKEGHSLEMENENLVENGADSDEDDNSFLKQQSPQEPKSLNWSSFVDNTFAEEFTTQNQKSQDVELWEGEVVKELSVEEQIKRNRYYDEDEDEE

SEQ ID NO: 6258 - protein, 351 aa, Homo sapiens
METNFSTPLNEYEEVSYESAGYTVLRILPLVVLGVTFVLGVLGNGLVIWVAGFRMTRTVTTICYLNLALADFSFTATLPFLIVSMAMGEKWPFGWFLCKLIHIVVDINLFGSVFLIGFIALDRCICVLHPVWAQNHRTVSLAMKVIVGPWILALVLTLPVFLFLTTVTIPNGDTYCTFNFASWGGTPEERLKVAITMLTARGIIRFVIGFSLPMSIVAICYGLIAAKIHKKGMIKSSRPLRVLTAVVASFFICWFPFQLVALLGTVWLKEMLFYGKYKIIDILVNPTSSLAFFNSCLNPMLYVFVGQDFRERLIHSLPTSLERALSEDSAPTNDTAANSASPPAETELQAM

SEQ ID NO: 6259 - protein, 296 aa, Homo sapiens
MMLPLQGAQMLQMLEKSLRKSLPASLKVYGTVFHINHGNPFNLKAVVDKWPDFNTVVVCPQEQDMTDDLDHYTNTYQIYSKDPQNCQEFLGSPELINWKQHLQIQSSQPSLNEAIQNLAAIKSFKVKQTQRILYMAAETAKELTPFLLKSKILSPNGGKPKAINQEMFKLSSMDVTHAHLVNKFWHFGGNERSQRFIERCIQTFPTCCLLGPEGTPVCWDLMDQTGEMRMAGTLPEYRLHGLVTYVIYSHAQKLGKLGFPVYSHVDYSNEAMQKMSYTLQHVPIPRSWNQWNCVPL

SEQ ID NO: 6260 - protein, 273 aa, Homo sapiens
MERREHLTLTFHSPEVPKIKGNRKYQRPTVPAKKHPSASMSCQRQQQLMDQAHIYIRTLCGSLCSFSLLMLIAMSPLNWVQFLVIKNGLELYAGLWTLCNHELCWSHTPKPPYYLQYSRAFFLISVFTILTGLGWLFSSWILNRGSMTTNLDLKVSMLSFISATCLLLCLNLFVAQVHWHTRDAMESDLLWTYYLNWCSDIFYMFAGIISLLNYLTSRSPACDENVTVIPTERSRLGVGPVTTVSPAKDEGPRSEMESLSVREKNLPKSGLWW

SEQ ID NO: 6261 - protein, 619 aa, Homo sapiens
MSGLVLGQRDEPAGHRLSQEEILGSTRLVSQGLEALRSEHQAVLQSLSQTIECLQQGGHEEGLVHEKARQLRRSMENIELGLSEAQVMLALASHLSTVESEKQKLRAQVRRLCQENQWLRDELAGTQQRLQRSEQAVAQLEEEKKHLEFLGQLRQYDEDGHTSEEKEGDATKDSLDDLFPNEEEEDPSNGLSRGQGATAAQQGGYEIPARLRTLHNLVIQYAAQGRYEVAVPLCKQALEDLERTSGRGHPDVATMLNILALVYRDQNKYKEAAHLLNDALSIRESTLGPDHPAVAATLNNLAVLYGKRGKYKEAEPLCQRALEIREKVLGTNHPDVAKQLNNLALLCQNQGKYEAVERYYQRALAIYEGQLGPDNPNVARTKNNLASCYLKQGKYAEAETLYKEILTRAHVQEFGSVDDDHKPIWMHAEEREEMSKSRHHEGGTPYAEYGGWYKACKVSSPTVNTTLRNLGALYRRQGKLEAAETLEECALRSRRQGTDPISQTKVAELLGESDGRRTSQEGPGDSVKFEGGEDASVAVEWSGDGSGTLQRSGSLGKIRDVLRRSSELLVRKLQGTEPRPSSSNMKRAASLNYLNQPSAAPLQVSRGLSASTMDLSSSS

SEQ ID NO: 6262 - protein, 963 aa, Homo sapiens
MAAQRIRAANSNGLPRCKSEGTLIDLSEGFSETSFNDIKVPSPSALLVDNPTPFGNAKEVIAIKDYCPTNFTTLKFSKGDHLYVLDTSGGEWWYAHNTTEMGYIPSSYVQPLNYRNSTLSDSGMIDNLPDSPDEVAKELELLGGWTDDKKVPGRMYSNNPFWNGVQTNPFLNGNVPVMPSLDELNPKSTVDLLLFDAGTSSFTESSSATTNSTGNIFDELPVTNGLHAEPPVRRDNPFFRSKRSYSLSELSVLQAKSDAPTSSSFFTGLKSPAPEQFQSREDFRTAWLNHRKLARSCHDLDLLGQSPGWGQTQAVETNIVCKLDSSGGAVQLPDTSISIHVPEGHVAPGETQQISMKALLDPPLELNSDRSCSISPVLEVKLSNLEVKTSIILEMKVSAEIKNDLFSKSTVGLQCLRSDSKEGPYVSVPLNCSCGDTVQAQLHNLEPCMYVAVVAHGPSILYPSTVWDFINKKVTVGLYGPKHIHPSFKTVVTIFGHDCAPKTLLVSEVTRQAPNPAPVALQLWGKHQFVLSRPQDLKVCMFSNMTNYEVKASEQAKVVRGFQLKLGKVSRLIFPITSQNPNELSDFTLRVQVKDDQEAILTQFCVQTPQPPPKSAIKPSGQRRFLKKNEVGKIILSPFATTTKYPTFQDRPVSSLKFGKLLKTVVRQNKNHYLLEYKKGDGIALLSEERVRLRGQLWTKEWYIGYYQGRVGLVHTKNVLVVGRARPSLCSGPELSTSVLLEQILRPCKFLTYIYASVRTLLMENISSWRSFADALGYVNLPLTFFCRAELDSEPERVASVLEKLKEDCNNTENKERKSFQKELVMALLKMDCQGLVVRLIQDFVLLTTAVEVAQRWRELAEKLAKVSKQQMDAYESPHRDRNGVVDSEAMWKPAYDFLLTWSHQIGDSYRDVIQELHLGLDKMKNPITKRWKHLTGTLILVNSLDVLRAAAFSPADQDDFVI

SEQ ID NO: 6263 - protein, 428 aa, Homo sapiens
MALAVAPWGRQWEEARALGRAVRMLQRLEEQCVDPRLSVSPPSLRDLLPRTAQLLREVAHSRRAAGGGGPGGPGGSGDFLLIYLANLEAKSRQVAALLPPRGRRSANDELFRAGSRLRRQLAKLAIIFSHMHAELHALFPGGKYCGHMYQLTKAPAHTFWRESCGARCVLPWAEFESLLGTCHPVEPGCTALALRTTIDLTCSGHVSIFEFDVFTRLFQPWPTLLKNWQLLAVNHPGYMAFLTYDEVQERLQACRDKPGSYLYPDGKTHNPDLTELGQAEPQQRIHVSEEQLQLYWAMDSTFELCKICAESNKDVKIEPCGHLLCSCCLAAWQHSDSQTCPFCRCEIKGWEAVSIYQFHGQATAEDSGNSSDQEGRELELGQVPLSAPPLPPRPDLPPRKPRNAQPKVRLLKGNSPPAALGPQDPAPA

SEQ ID NO: 6264 - protein, 414 aa, Homo sapiens
MPEFLEDPSVLTKDKLKSELVANNVTLPAGEQRKDVYVQLYLQHLTARNRPPLPAGTNSKGPPDFSSDEEREPTPVLGSGAAAAGRSRAAVGRKATKKTDKPRQEDKDDLDVTELTNEDLLDQLVKYGVNPGPIVGTTRKLYEKKLLKLREQGTESRSSTPLPTISSSAENTRQNGSNDSDRYSDNEEDSKIELKLEKREPLKGRAKTPVTLKQRRVEHNQVETSEHFRIDGPVISESTPIAETIMASSNESLVVNRVTGNFKHASPILPITEFSDIPRRAPKKPLTRAEVGEKTEERRVERDILKEMFPYEASTPTGISASCRRPIKGAAGRPLELSDFRMEESFSSKYVPKYVPLADVKSEKTKKGRSIPVWIKILLFVVVAVFLFLVYQAMETNQVNPFSNFLHVDPRKSN

SEQ ID NO: 6265 - protein, 594 aa, Homo sapiens
MIQNVGNHLRRGLASVFSNRTSRKSALRAGNDSAMADGEGYRNPTEVQMSQLVLPCHTNQRGELSVGQLLKWIDTTACLSAERHAGCPCVTASMDDIYFEHTISVGQVVNIKAKVNRAFNSSMEVGIQVASEDLCSEKQWNVCKALATFVARREITKVKLKQITPRTEEEKMEHSVAAERRRMRLVYADTIKDLLANCAIQGDLESRDCSRMVPAEKTRVESVELVLPPHANHQGNTFGGQIMAWMENVATIAASRLCRAHPTLKAIEMFHFRGPSQVGDRLVLKAIVNNAFKHSMEVGVCVEAYRQEAETHRRHINSAFMTFVVLDADDQPQLLPWIRPQPGDGERRYREASARKKIRLDRKYIVSCKQTEVPLSVPWDPSNQVYLSYNNVSSLKMLVAKDNWVLSSEISQVRLYTLEDDKFLSFHMEMVVHVDAAQAFLLLSDLRQRPEWDKHYRSVELVQQVDEDDAIYHVTSPALGGHTKPQDFVILASRRKPCDNGDPYVIALRSVTLPTHRETPEYRRGETLCSGFCLWREGDQLTKVSYYNQATPGVLNYVTTNVAGLSSEFYTTFKACEQFLLDNRNDLAPSLQTL

SEQ ID NO: 6266 - protein, 929 aa, Homo sapiens
MCESYSRSLLRVSVAQICQALGWDSVQLSACHLLTDVLQRYLQQLGRGCHRYSELYGRTDPILDDVGEAFQLMGVSLHELEDYIHNIEPVTFPHQIPSFPVSKNNVLQFPQPGSKDAEERKEYIPDYLPPIVSSQEEEEEEQVPTDGGTSAEAMQVPLEEDDELEEEEIINDENFLGKRPLDSPEAEELPAMKRPRLLSTKGDTLDVVLLEAREPLSSINTQKIPPMLSPVHVQDSTDLAPPSPEPPMLAPVAKSQMPTAKPLETKSFTPKTKTKTSSPGQKTKSPKTAQSPAMVGSPIRSPKTVSKEKKSPGRSKSPKSPKSPKVTTHIPQTPVRPETPNRTPSATLSEKISKETIQVKQIQTPPDAGKLNSENQPKKAVVADKTIEASIDAVIARACAEREPDPFEFSSGSESEGDIFTSPKRISGPECTTPKASTSANNFTKSGSTPLPLSGGTSSSDNSWTMDASIDEVVRKAKLGTPSNMPPNFPYISSPSVSPPTPEPLHKVYEEKTKLPSSVEVKKKLKKELKTKMKKKEKQRDREREKDKNKDKSKEKDKVKEKEKDKETGRETKYPWKEFLKEEEADPYKFKIKEFEDVDPKVKLKDGLVRKEKEKHKDKKKDREKGKKDKDKREKEKVKDKGREDKMKAPAPPLVLPPKELALPLFSPATASRVPAMLPSLLPVLPEKLFEEKEKVKEKEKKKDKKEKKKKKEKEKEKKEKEREKEKREREKREKEKEKHKHEKIKVEPVALAPSPVIPRLTLRVGAGQDKIVISKVVPAPEAKPAPSQNRPKTPPPAPAPAPGPMLVSPAPVPLPLLAQAAAGPALLPSPGPAASGASAKAPVRSVVTETVSTYVIRDEWGNQIWICPGCNKPDDGSPMIGCDDCDDWYHWPCVGIMTAPPEEMQWFCPKCANKKKDKKHKKRKHRAH

SEQ ID NO: 6267 - protein, 1104 aa, Homo sapiens
MKVTVCFGRTGIVVPCKEGQLRVGELTQQALQRYLKTREKGPGYWVKIHHLEYTDGGILDPDDVLADVVEDKDKLIAVFEEQEPLHKIESPSGNPADRQSPDAFETEVAAQLAAFKPIGGEIEVTPSALKLGTPLLVRRSSDPVPGPPADTQPSASHPGGQSLKLVVPDSTQNLEDREVLNGVQTELLTSPRTKDTLSDMTRTVEISGEGGPLGIHVVPFFSSLSGRILGLFIRGIEDNSRSKREGLFHENECIVKINNVDLVDKTFAQAQDVFRQAMKSPSVLLHVLPPQNREQYEKSVIGSLNIFGNNDGVLKTKVPPPVHGKSGLKTANLTGTDSPETDASASLQQNKSPRVPRLGGKPSSPSLSPLMGFGSNKNAKKIKIDLKKGPEGLGFTVVTRDSSIHGPGPIFVKNILPKGAAIKDGRLQSGDRILEVNGRDVTGRTQEELVAMLRSTKQGETASLVIARQEGHFLPRELKGEPDCCALSLETSEQLTFEIPLNDSGSAGLGVSLKGNKSRETGTDLGIFIKSIIHGGAAFKDGRLRMNDQLIAVNGESLLGKSNHEAMETLRRSMSMEGNIRGMIQLVILRRPERPMEDPAECGAFSKPCFENCQNAVTTSRRNDNSILHPLGTCSPQDKQKGLLLPNDGWAESEVPPSPTPHSALGLGLEDYSHSSGVDSAVYFPDQHINFRSVTPARQPESINLKASKSMDLVPDESKVHSLAGQKSESPSKDFGPTLGLKKSSSLESLQTAVAEVRKNDLPFHRPRPHMVRGRGCNESFRAAIDKSYDGPEEIEADGLSDKSSHSGQGALNCESAPQGNSELEDMENKARKVKKTKEKEKKKEKGKLKVKEKKRKEENEDPERKIKKKGFGAMLRFGKKKEDKGGKAEQKGTLKHGGLREEELEKMKEERESGRPTGGSTDRIQKLRKEYYQARREGFPLYEDDEGRARPSEYDLLWVPGRGPDGNAHNLRFEGMERQYASLPRGGPADPVDYLPAAPRGLYKERELPYYPGAHPMHPPKGSYPRPTELRVADLRYPQHYPPPPAPQHKGPFRQDVPPSPPQHQRMPAYQETGRPGPRGGSPDQYPYRTQDSRQKNPMTAAV

SEQ ID NO: 6268 - protein, 917 aa, Homo sapiens
MNRFNGLCKVCSERRYRQITIPRGKDGFGFTICCDSPVRVQAVDSGGPAERAGLQQLDTVLQLNERPVEHWKCVELAHEIRSCPSEIILLVWRMVPQVKPGPDGGVLRRASCKSTHDLQSPPNKREKNCTHGVQARPEQRHSCHLVCDSSDGLLLGGWERYTEVAKRGGQHTLPALSRATAPTDPNYIILAPLNPGSQLLRPVYQEDTIPEESGSPSKGKSYTGLGKKSRLMKTVQTMKGHGNYQNCPVVRPHATHSSYGTYVTLAPKVLVFPVFVQPLDLCNPARTLLLSEELLLYEGRNKAAEVTLFAYSDLLLFTKEDEPGRCDVLRNPLYLQSVKLQEGSSEDLKFCVLYLAEKAECLFTLEAHSQEQKKRVCWCLSENIAKQQQLAASPPDSKMFETEADEKREMALEEGKGPGAEDSPPSKEPSPGQELPPGQDLPPNKDSPSGQEPAPSQEPLSSKDSATSEGSPPGPDAPPSKDVPPCQEPPPAQDLSPCQDLPAGQEPLPHQDPLLTKDLPAIQESPTRDLPPCQDLPPSQVSLPAKALTEDTMSSGDLLAATGDPPAAPRPAFVIPEVRLDSTYSQKAGAEQGCSGDEEDAEEAEEVEEGEEGEEDEDEDTSDDNYGERSEAKRSSMIETGQGAEGGLSLRVQNSLRRRTHSEGSLLQEPRGPCFASDTTLHCSDGEGAASTWGMPSPSTLKKELGRNGGSMHHLSLFFTGHRKMSGADTVGDDDEASRKRKSKNLAKDMKNKLGIFRRRNESPGAPPAGKADKMMKSFKPTSEEALKWGESLEKLLVHKYGLAVFQAFLRTEFSEENLEFWLACEDFKKVKSQSKMASKAKKIFAEYIAIQACKEVNLDSYTREHTKDNLQSVTRGCFDLAQKRIFGLMEKDSYPRFLRSDLYLDLINQKKMSPPL

SEQ ID NO: 6269 - protein, 383 aa, Homo sapiens
MTATEALLRVLLLLLAFGHSTYGAECFPACNPQNGFCEDDNVCRCQPGWQGPLCDQCVTSPGCLHGLCGEPGQCICTDGWDGELCDRDVRACSSAPCANNRTCVSLDDGLYECSCAPGYSGKDCQKKDGPCVINGSPCQHGGTCVDDEGRASHASCLCPPGFSGNFCEIVANSCTPNPCENDGVCTDIGGDFRCRCPAGFIDKTCSRPVTNCASSPCQNGGTCLQHTQVSYECLCKPEFTGLTCVKKRALSPQQVTRLPSGYGLAYRLTPGVHELPVQQPEHRILKVSMKELNKKTPLLTEGQAICFTILGVLTSLVVLGTVGIVFLNKCETWVSNLRYNHMLRKKKNLLLQYNSGEDLAVNIIFPEKIDMTTFSKEAGDEEI

SEQ ID NO: 6270 - protein, 1344 aa, Homo sapiens
MDQREPLPPAPAENEMKYDTNNNEEEEGEQFDFDSGDEIPEADRQAPSAPETGGAGASEAPAPTGGEDGAGAETTPVAEPTKLVLPMKVNPYSVIDITPFQEDQPPTPVPSAEEENVGLHVPCGYLVPVPCGYAVPSNLPLLLPAYSSPVIICATSLDEEETPEVTEDRQPNSLSSEEPPTSEDQVGREDSALARWAADPANTAWMENPEEAIYDDVPRENSDSEPDEMIYDDVENGDEGGNSSLEYGWSSSEFESYEEQSDSECKNGIPRSFLRSNHKKQLSHDLTRLKEHYEKKMRDLMASTVGVVEIQQLRQKHELKMQKLVKAAKDGTKDGLERTRAAVKRGRSFIRTKSLIAQDHRSSLEEEQNLFIDVDCKHPEAILTPMPEGLSQQQVVRRYILGSVVDSEKNYVDALKRILEQYEKPLSEMEPKVLSERKLKTVFYRVKEILQCHSLFQIALASRVSEWDSVEMIGDVFVASFSKSMVLDAYSEYVNNFSTAVAVLKKTCATKPAFLEFLKQEQEASPDRTTLYSLMMKPIQRFPQFILLLQDMLKNTSKGHPDRLPLQMALTELETLAEKLNERKRDADQRCEVKQIAKAINERYLNKLLSSGSRYLIRSDDMIETVYNDRGEIVKTKERRVFMLNDVLMCATVSSRPSHDSRVMSSQRYLLKWSVPLGHVDAIEYGSSAGTGEHSRHLAVHPPESLAVVANAKPNKVYMGPGQLYQDLQNLLHDLNVIGQITQLIGNLKGNYQNLNQSVAHDWTSGLQRLILKKEDEIRAADCCRIQLQLPGKQDKSGRPTFFTAVFNTFTPAIKESWVNSLQMAKLALEEENHMGWFCVEDDGNHIKKEKHPLLVGHMPVMVAKQQEFKIECAAYNPEPYLNNESQPDSFSTAHGFLWIGSCTHQMGQIAIVSFQNSTPKVIECFNVESRILCMLYVPVEEKRREPGAPPDPETPAVRASDVPTICVGTEEGSISIYKSSQGSKKVRLQHFFTPEKSTVMSLACTSQSLYAGLVNGAVASYARAPDGSWDSEPQKVIKLGVLPVRSLLMMEDTLWAASGGQVFIISVETHAVEGQLEAHQEEGMVISHMAVSGVGIWIAFTSGSTLRLFHTETLKHLQDINIATPVHNMLPGHQRLSVTSLLVCHGLLMVGTSLGVLVALPVPRLQGIPKVTGRGMVSYHAHNSPVKFIVLATALHEKDKDKSRDSLAPGPEPQDEDQKDALPSGGAGSSLSQGDPDAAIWLGDSLGSMTQKSDLSSSSGSLSLSHGSSSLEHRSEDSTIYDLLKDPVSLRSKARRAKKAKASSALVVCGGQGHRRVHRKARQPHQEELAPTVMVWQIPLLNI

SEQ ID NO: 6271 - protein, 1189 aa, Homo sapiens
MTDSEHAGHDREDGELEDGEIDDAGFEEIQEKEAKENEKQKSEKAYRKSRKKHKKEREKKKSKRRKREKHKHNSPSSDDSSDYSLDSDVEHTESSHKKRTGFYRDYDIPFTQRGHISGSYITSKKGQHNKKFKSKEYDEYSTYSDDNFGNYSDDNFGNYGQETEEDFANQLKQYRQAKETSNIALGSSFSKESGKKQRMKGVQQGIEQRVKSFNVGRGRGLPKKIKRKERGGRTNKGPNVFSVSDDFQEYNKPGKKWKVMTQEFINQHTVEHKGKQICKYFLEGRCIKGDQCKFDHDAELEKRKEICKFYLQGYCTKGENCIYMHNEFPCKFYHSGAKCYQGDNCKFSHDDLTKETKKLLDKVLNTDEELINEDERELEELRKRGITPLPKPPPGVGLLPTPPEHFPFSDPEDDFQTDFSDDFRKIPSLFEIVVKPTVDLAHKIGRKPPAFYTSASPPGPQFQGSSPHPQHIYSSGSSPGPGPNMSQGHSSPVMHPGSPGHHPCAGPPGLPVPQSPPLPPGPPEIVGPQNQAGVLVQPDTSLTPPSMGGAYHSPGFPGHVMKVPRENHCSPGSSYQQSPGEMQLNTNYESLQNPAEFYDNYYAQHSIHNFQPPNNSGDGMWHGEFAQQQPPVVQDSPNHGSGSDGSSTRTGHGPLPVPGLLPAVQRALFVRLTQRYQEDEEQTSTQPHRAPSKEEDDTVNWYSSSEEEEGSSVKSILKTLQKQTETLRNQQQPSTELSTPTDPRLAKEKSKGNQVVDPRLRTIPRQDIRKPSESAPLDLRLAWDPRKLRGNGSGHIGSSVGGAKFDLHHANAGTNVKHKRGDDDDEDTERELREKAFLIPLDASPGIMLQDPRSQLRQFSHIKMDITLTKPNFAKHIVWAPEDLLPVPLPKPDPVSSINLPLPPLIADQRLNRLWNTKSDLHQNTVSIDPKLAAKAKINTTNREGYLEQFGDSHGSGAKLGDPRLQKNFDPRLHRLPNTESHQVVMKDSHASKGAPHLPRSNPGSSQPSGAGTSNSGSGALPPYAPKLSSSAGLPLGTSTSVLSGISLYDPRDHGSSSTSELATASSGENSKNQKKSGGLKSSDKTEPSPGEAILPQKPSPNVGVTLEGPADPQADVPRSSGKVQVPAVHSLPVQALTGLIRPQYSDPRQARQPGQGSPTPDNDPGRETDDKSLKEVFKTFDPTASPFC

SEQ ID NO: 6272 - protein, 485 aa, Homo sapiens
MYKMNICNKPSNKTAPEKSVWTAPAQPSGPSPELQGQRSRRNGWSWPPHPLQIVAWLLYLFFAVIGFGILVPLLPHHWVPAGYACMGAIFAGHLVVHLTAVSIDPADANVRDKSYAGPLPIFNRSQHAHVIEDLHCNLCNVDVSARSKHCSACNKCVCGFDHHCKWLNNCVGERNYRLFLHSVASALLGVLLLVLVATYVFVEFFVNPMRLRTNRHFEVLKNHTDVWFVFLPAAPVETQAPAILALAALLILLGLLSTALLGHLLCFHIYLMWHKLTTYEYIVQHRPPQEAKGVHRELESCPPKMRPIQEMEFYMRTFRHMRPEPPGQAGPAAVNAKHSRPASPDPTPGRRDCAGPPVQVEWDRKKPLPWRSPLLLLAMWGPQAPPCLCRKRGRGACIKCERLRPRIRRRGLGPPAAAPARRRIPRTPALCTPLALPAPTTRRRQSPWTRFQWRRRAWAAPLWPPRGAGADSPRWRGRRVRPPFS

SEQ ID NO: 6273 - protein, 443 aa, Homo sapiens
MPCVQAQYSPSPPGSSYAAQTYSSEYTTEIMNPDYTKLTMDLGSTEITATATTSLPSISTFVEGYSSNYELKPSCVYQMQRPLIKVEEGRAPSYHHHHHHHHHHHHHHQQQHQQPSIPPASSPEDEVLPSTSMYFKQSPPSTPTTPAFPPQAGALWDEALPSAPGCIAPGPLLDPPMKAVPTVAGARFPLFHFKPSPPHPPAPSPAGGHHLGYDPTAAAALSLPLGAAAAAGSQAAALESHPYGLPLAKRAAPLAFPPLGLTPSPTASSLLGESPSLPSPPSRSSSSGEGTCAVCGDNAACQHYGVRTCEGCKGFFKRTVQKNAKYVCLANKNCPVDKRRRNRCQYCRFQKCLSVGMVKEVVRTDSLKGRRGRLPSKPKSPLQQEPSQPSPPSPPICMMNALVRALTDSTPRDLDYSRVSFMISCFQMNDQGLYLWLLVIRVD

SEQ ID NO: 6274 - protein, 291 aa, Homo sapiens
MQAKNKDALQPIKEDRTGKAQDDAFWLQSLITDAFHDKGFQKIKEYFQQKESHFPQKYNRLLLYRLDRSINKELDKNEFQSVSLLLKCIQRFLVDGLKEDEPLLIRQGLIPKLVSWFERTTGILTSEGLASDTSLICVIEDFFDTALIISRSSSEGKIQMLDSFLLSLGFLVTEKTVNHLLQQEGLKTFNCILHAVPREERKKFPLSEGMCHLMKDLARTLLTVGDYDQQVAISEALCRLTIKKSRDELVHKWFDDEVIAEAFKEIKDREFETDSRRFLNHLNNRLGDQRR

SEQ ID NO: 6275 - protein, 481 aa, Homo sapiens
MKGRGMLVLLLHAVVLGLPSAWAVGACARACPAACACSTVERGCSVRCDRAGLLRVPAELPCEAVSIDLDRNGLRFLGERAFGTLPSLRRLSLRHNNLSFITPGAFKGLPRLAELRLAHNGDLRYLHARTFAALSRLRRLDLAACRLFSVPERLLAELPALRELAAFDNLFRRVPGALRGLANLTHAHLERGRIEAVASSSLQGLRRLRSLSLQANRVRAVHAGAFGDCGVLEHLLLNDNLLAELPADAFRGLRRLRTLNLGGNALDRVARAWFADLAELELLYLDRNSIAFVEEGAFQNLSGLLALHLNGNRLTVLAWVAFQPGFFLGRLFLFRNPWCCDCRLEWLRDWMEGSGRVTDVPCASPGSVAGLDLSQVTFGRSSDGLCVDPEELNLTTSSPGPSPEPAATTVSRFSSLLSKLLAPRVPVEEAANTTGGLANASLSDSLSSRGVGGAGRQPWFLLASCLLPSVAQHVVFGLQMD

SEQ ID NO: 6276 - protein, 709 aa, Homo sapiens
MPSATSHSGSGSKSSGPPPPSGSSGSEAAAGAGAAAPASQHPATGTGAVQTEAMKQILGVIDKKLRNLEKKKGKLDDYQERMNKGERLNQDQLDAVSKYQEVTNNLEFAKELQRSFMALSQDIQKTIKKTARREQLMREEAEQKRLKTVLELQYVLDKLGDDEVRTDLKQGLNGVPILSEEELSLLDEFYKLVDPERDMSLRLNEQYEHASIHLWDLLEGKEKPVCGTTYKVLKEIVERVFQSNYFDSTHNHQNGLCEEEEAASAPAVEDQVPEAEPEPAEEYTEQSEVESTEYVNRQFMAETQFTSGEKEQVDEWTVETVEVVNSLQQQPQAASPSVPEPHSLTPVAQADPLVRRQRVQDLMAQMQGPYNFIQDSMLDFENQTLDPAIVSAQPMNPTQNMDMPQLVCPPVHSESRLAQPNQVPVQPEATQVPLVSSTSEGYTASQPLYQPSHATEQRPQKEPIDQIQATISLNTDQTTASSSLPAASQPQVFQAGTSKPLHSSGINVNAAPFQSMQTVFNMNAPVPPVNEPETLKQQNQYQASYNQSFSSQPHQVEQTELQQEQLQTVVGTYHGSPDQSHQVTGNHQQPPQQNTGFPRSNQPYYNSRGVSRGGSRGARGLMNGYRGPANGFRGGYDGYRPSFSNTPNSGYTQSQFSAPRDYSGYQRDGYQQNFKRGSGQSGPRGAPRGRGGPPRPNRGMPQMNTQQVN

SEQ ID NO: 6277 - protein, 468 aa, Homo sapiens
MWLFFGITGLLTAALSGHPSPAPPDQLNTSSAESELWEPGERLPVRLTNGSSSCSGTVEVRLEASWEPACGALWDSRAAEAVCRALGCGGAEAASQLAPPTPELPPPPAAGNTSVAANATLAGAPALLCSGAEWRLCEVVEHACRSDGRRARVTCAENRALRLVDGGGACAGRVEMLEHGEWGSVCDDTWDLEDAHVVCRQLGCGWAVQALPGLHFTPGRGPIHRDQVNCSGAEAYLWDCPGLPGQHYCGHKEDAGAVCSEHQSWRLTGGADRCEGQVEVHFRGVWNTVCDSEWYPSEAKVLCQSLGCGTAVERPKGLPHSLSGRMYYSCNGEELTLSNCSWRFNNSNLCSQSLAARVLCSASRSLHNLSTPEVPASVQTVTIESSVTVKIENKESRELMLLIPSIVLGILLLGSLIFIAFILLRIKGKYALPVMVNHQHLPTTIPAGSNSYQPVPITIPKEGPGPAP

SEQ ID NO: 6278 - protein, 2564 aa, Homo sapiens
MAQVPGEVDNMEGLPAPNNNPAARWESPDRGWEREQPAASTAAASLFECSRIKALADEREAVQKKTFTKWVNSHLARVGCHIGDLYVDLRDGFVLTRLLEVLSGEQLPRPTRGRMRIHSLENVDKALQFLKEQRVHLENVGSHDIVDGNHRLTLGLVWTIILRFQIQVIKIETEDNRETRSAKDALLLWCQMKTAGYPEVNIQNFTTSWRDGLAFNALIHRHRPDLVDFSKLTKSNANYNLQRAFRTAEQHLGLARLLDPEDVNMEAPDEKSIITYVVSFYHYFSKMKALAVEGKRIGKVLDQVLEVGKIIERYEELAAELLAWIHRTVGLISNQKFANSLSGVQQQLQAFTAYCTLEKPVKFQEKGNLEVLLFSIQSKLRACNRRLFVPREGCGIWDIDKAWGELEKAEHEREAALRAELIRQEKLELLAQRFDHKVAMRESWLNENQRLVSQDNFGYELPAVEAAMKKHEAIEADIAAYEERVQGVAELAQALAAEGYYDIRRVAAQRDSVLRQWALLTGLVGARRTRLEQNLALQKVFQEMVYMVDWMEEMQAQLLSRECGQHLVEADDLLQKHGLLEGDIAAQSERVEALNAAALRFSQLQGYQPCDPQVICNRVNHVHGCLAELQEQAARRRAELEASRSLWALLQELEEAESWARDKERLLEAAGGGGAAGAAGAAGTAGGAHDLSSTARLLAQHKILQGELGGRRALLQQALRCGEELVAAGGAVGPGADTVHLVGLAERAASARRRWQRLEEAAARRERRLQEARALHQFGADLDGLLDWLRDAYRLAAAGDFGHDEASSRRLARQHRALTGEVEAHRGPVSGLRRQLATLGGASGAGPLVVALQVRVVEAEQLFAEVTEVAALRRQWLRDALAVYRMFGEVHACELWIGEKEQWLLSMRVPDSLDDVEVVQHRFESLDQEMNSLMGRVLDVNHTVQELVEGGHPSSDEVRSCQDHLNSRWNRIVELVEQRKEEMSAVLLVENHVLEVAEVRAQVREKRRAVESAPRAGGALQWRLSGLEAALQALEPRQAALLEEAALLAERFPAQAARLHQGAEELGAEWGALASAAQACGEAVAAAGRLQRFLHDLDAFLDWLVRAQEAAGGSEGPLPNSLEEADALLARHAALKEEVDQREEDYARIVAASEALLAADGAELGPGLALDEWLPHLELGWHKLLGLWEARREALVQAHIYQLFLRDLRQALVVLRNQEMALSGAELPGTVESVEEALKQHRDFLTTMELSQQKMQVAVQAAEGLLRQGNIYGEQAQEAVTRLLEKNQENQLRAQQWMQKLHDQLELQHFLRDCHELDGWIHEKMLMARDGTREDNHKLHKRWLRHQAFMAELAQNKEWLEKIEREGQQLMQEKPELAASVRKKLGEIRQCWAELESTTQAKARQLFEASKADQLVQSFAELDKKLLHMESQLQDVDPGGDLATVNSQLKKLQSMESQVEEWYREVGELQAQTAALPLEPASKELVGERQNAVGERLVRLLEPLQERRRLLLASKELHQVAHDWTTSWAWVQERLPLAMQTERGNGLQAVQQHIKKNQGLRREIQAHGPRLEEVLERAGALASLRSPEAEAVRRGLEQLQSAWAGLREAAERRQQVLDAAFQVEQYYFDVAEVEAWLGEQELLMMSEDKGKDEQSTLQLLKKHLQLEQGVENYEESIAQLSRQCRALLEMGHPDSEQISRRQSQVDRLYVALKELGEERRVALEQQYWLYQLSRQVSELEHWIAEKEVVAGSPELGQDFEHVSVLQEKFSEFASETGMAGRERLAAVNQMVDELIECGHTAAATMAEWKDGLNEAWAELLELMGTRAQLLAASRELHKFFSDARELQGQIEEKRRRLPRLTTPPEPRPSASSMQRTLRAFEHDLQLLVSQVRQLQEGAAQLRTVYAGEHAEAIASREQEVLQGWKELLSACEDARLHVSSTADALRFHSQVRDLLSWMDGIASQIGAADKPRDVSSVEVLMNYHQGLKTELEARVPELTTCQELGRSLLLNKSAMADEIQAQLDKLGTRKEEVSEKWDRHWEWLQQMLEVHQFAQEAVVADAWLTAQEPLLQSRELGSSVDEVEQLIRRHEAFRKAAAAWEERFSSLRRLTTIEKIKAEQSKQPPTPLLGRKFFGDPTELAAKAAPLLRPGGYERGLEPLARRASDTLSAEVRTRVGYVRQELKPERLQPRIDRLPEIPGRVEPAALPAAPEDAAETPATPAAAEQVRPRPERQESADRAEELPRRRRPERQESVDQSEEAARRRRPERQESAEHEAAHSLTLGRYEQMERRRERRERRLERQESSEQEMPIRGDLVKGKATLADIVEQLQEKEAGPGLPAGPSLPQPRELPPGRLPNGLELPERTPRPDRPRARDRPKPRRRPRPREGGEGGGSRRSRSAPAQGGSAPAPPPPPTHTVQHEGFLLRKRELDANRKSSNRSWVSLYCVLSKGELGFYKDSKGPASGSTHGGEPLLSLHKATSEVASDYKKKKHVFKLQTQDGSEFLLQAKDEEEMNGWLEAVASSVAEHAEIARWGQTLPTTSSTDEGNPKREGGDRRASGRRK

SEQ ID NO: 6279 - protein, 512 aa, Homo sapiens
MTAPWVALALLWGSLCAGSGRGEAETRECIYYNANWELERTNQSGLERCEGEQDKRLHCYASWRNSSGTIELVKKGCWLDDFNCYDRQECVATEENPQVYFCCCEGNFCNERFTHLPEAGGPEVTYEPPPTAPTLLTVLAYSLLPIGGLSLIVLLAFWMYRHRKPPYGHVDIHEDPGPPPPSPLVGLKPLQLLEIKARGRFGCVWKAQLMNDFVAVKIFPLQDKQSWQSEREIFSTPGMKHENLLQFIAAEKRGSNLEVELWLITAFHDKGSLTDYLKGNIITWNELCHVAETMSRGLSYLHEDVPWCRGEGHKPSIAHRDFKSKNVLLKSDLTAVLADFGLAVRFEPGKPPGDTHGQVGTRRYMAPEVLEGAINFQRDAFLRIDMYAMGLVLWELVSRCKAADGPVDEYMLPFEEEIGQHPSLEELQEVVVHKKMRPTIKDHWLKHPGLAQLCVTIEECWDHDAEARLSAGCVEERVSLIRRSVNGTTSDCLVSLVTSVTNVDLPPKESSI

SEQ ID NO: 6280 - protein, 763 aa, Homo sapiens
MHTGGETSACKPSSVRLAPSFSFHAAGLQMAGQMPHSHQYSDRRQPNISDQQVSALSYSDQIQQPLTNQVMPDIVMLQRRMPQTFRDPATAPLRKLSVDLIKTYKHINEVYYAKKKRRHQQGQGDDSSHKKERKVYNDGYDDDNYDYIVKNGEKWMDRYEIDSLIGKGSFGQVVKAYDRVEQEWVAIKIIKNKKAFLNQAQIEVRLLELMNKHDTEMKYYIVHLKRHFMFRNHLCLVFEMLSYNLYDLLRNTNFRGVSLNLTRKFAQQMCTALLFLATPELSIIHCDLKPENILLCNPKRSAIKIVDFGSSCQLGQRIYQYIQSRFYRSPEVLLGMPYDLAIDMWSLGCILVEMHTGEPLFSGANEVDQMNKIVEVLGIPPAHILDQAPKARKFFEKLPDGTWNLKKTKDGKREYKPPGTRKLHNILGVETGGPGGRRAGESGHTVADYLKFKDLILRMLDYDPKTRIQPYYALQHSFFKKTADEGTNTSNSVSTSPAMEQSQSSGTTSSTSSSSGGSSGTSNSGRARSDPTHQHRHSGGHFTAAVQAMDCETHSPQVRQQFPAPLGWSGTEAPTQVTVETHPVQETTFHVAPQQNALHHHHGNSSHHHHHHHHHHHHHGQQALGNRTRPRVYNSPTNSSSTQDSMEVGHSHHSMTSLSSSTTSSSTSSSSTGNQGNQAYQNRPVAANTLDFGQNGAMDVNLTVYSNPRQETGIAGHPTYQFSANTGPAHYMTEGHLTMRQGADREESPMTGVCVQQSPVASS

SEQ ID NO: 6281 - protein, 826 aa, Homo sapiens
MEQVAKKLGVAHEEIQRLTDELQVKEKEQCKLDSALKKAQLEIDKLKENLVKLKENDAADLQKAKEQNQRLDEEILALRNRVRSLDSEKKVLGEMVERLKGEVCESQENKQLGNHSPGKTVGGEQREQVLKLSQEFAQLNHFTLGGKTAPSNLITSENTCKDPESNEPILETEIQSRKEETEELCPKLGERKQKEIPEESVKEGSFPREGQKEEGSQQNRDMKDEEKEQQLTMKPEEIVRLREELSHINQSLLQSQSSGDSSDDSGAQHPSSGEKLKYNQQGEVQQLHQNLHRLQILCNSAENELRYERGQNLDLKQHNSLLQEENIKIKIELKHAQQKLLDSTKMCSSLTAEYKHCQQKIKELELEVLKHTQSIKSQNNLQEKLVQEKSKVADAEEKILDLQRKLEHAHKVCLTDTCISEKQQLEEKIKEATQNEAKVKQQYQEEQQKRKLLYQNVDELHRQVRTLQDKENLLEMTCSQQQSRIQQQEALLKQLENEKRKYDEHVKSNQELSEKLSKLQQEKEALREEYLRLLKLLNVHVRNYNEKHHQQKVKLQKVKYRLTNEVELRDKRINQFEDEIGILQHKIEKEKAIQDQITAQNDTLLLEKRKLQEQVIEQEQLIHSNKWTISSIQSRVLYMDKENKQLQENSLRLTQQIGFLERIIRSIHIRRGENLKEFPVPKWWHRGKLASLPPTKKQKEIYSTEVFTSNNAELQHEDESVPEATEKWKHSEQMETTISDILESEVVNEILPLSNSSFSGKGLVESFASLQETEEIKSKEAMASSKSPEKSPENLVCSQNSEAGYINVASLKETHGIQEQDQKSEL

SEQ ID NO: 6282 - protein, 648 aa, Homo sapiens
MLGSLVLRRKALAPRLLLRLLRSPTLRGHGGASGRNVTTGSLGEPQWLRVATGGRPGTSPALFSGRGAATGGRQGGRFDTKCLAAATWGRLPGPEETLPGQDSWNGVPSRAGLGMCALAAALVVHCYSKSPSNKDAALLEAARANNMQEVSSVVQVLLAAGADPNLGDDFSSVYKTAKEQGIHSLEVLITREDDFNNRLNNRASFKGCTALHYAVLADDYRTVKELLDGGANPLQRNEMGHTPLDYAREGEVMKLLRTSEAKYQEKQRKREAEERRRFPLEQRLKEHIIGQESAIATVGAAIRRKENGWYDEEHPLVFLFLGSSGIGKTELAKQTAKYMHKDAKKGFIRLDMSEFQERHEVAKFIGSPPGYVGHEEGGQLTKKLKQCPNAVVLFDEVDKAHPDVLTIMLQLFDEGRLTDGKGKTIDCKDAIFIMTSNVASDEIAQHALQLRQEALEMSRNRIAENLGDVQISDKITISKNFKENVIRPILKAHFRRDEFLGRINEIVYFLPFCHSELIQLVNKELNFWAKRAKQRHNITLLWDREVADVLVDGYNVHYGARSIKHEVERRVVNQLAAAYEQDLLPGGCTLRITVEDSDKQLLKSPELPSPQAEKRLPKLRLEIIDKDSKTRRLDIRAPLHPEKVCNTI

SEQ ID NO: 6283 - protein, 680 aa, Homo sapiens
MALDGIRMPDGCYADGTWELSVHVTDLNRDVTLRVTGEVHIGGVMLKLVEKLDVKKDWSDHALWWEKKRTWLLKTHWTLDKYGIQADAKLQFTPQHKLLRLQLPNMKYVKVKVNFSDRVFKAVSDICKTFNIRHPEELSLLKKPRDPTKKKKKKLDDQSEDEALELEGPLITPGSGSIYSSPGLYSKTMTPTYDAHDGSPLSPTSAWFGDSALSEGNPGILAVSQPITSPEILAKMFKPQALLDKAKINQGWLDSSRSLMEQDVKENEALLLRFKYYSFFDLNPKYDAIRINQLYEQAKWAILLEEIECTEEEMMMFAALQYHINKLSIMTSENHLNNSDKEVDEVDAALSDLEITLEGGKTSTILGDITSIPELADYIKVFKPKKLTLKGYKQYWCTFKDTSISCYKSKEESSGTPAHQMNLRGCEVTPDVNISGQKFNIKLLIPVAEGMNEIWLRCDNEKQYAHWMAACRLASKGKTMADSSYNLEVQNILSFLKMQHLNPDPQLIPEQITTDITPECLVSPRYLKKYKNKQITARILEAHQNVAQMSLIEAKMRFIQAWQSLPEFGITHFIARFQGGKKEELIGIAYNRLIRMDASTGDAIKTWRFSNMKQWNVNWEIKMVTVEFADEVRLSFICTEVDCKVVHEFIGGYIFLSTRAKDQNESLDEEMFYKLTSGWV

SEQ ID NO: 6284 - protein, 579 aa, Homo sapiens
MSVTGFTITDEKVHLYHSIEKEKTVRHIGDLCSSHSVKKIQVGICLLLVELCERFTFFEVVCNMIPFCTIKLGYHNCQAAILNLCFIGTSILTPVFVRWLTDVYLGRNKLVYICLFLHFLGTALLSVVAFPLEDFYLGTYHAVNNIPKTEQHRLFYVALLTICLGIGGVRAIVCPLGAFGLQEYGSQKTMSFFNWFYWLMNLNATIVFLGISYIQHSQAWALVLLIPFMSMLMAVITLHMIYYNLIYQSEKRCSLLTGVGVLVSALKTCHPQYCHLGRDVTSQLDHAKEKNGGCYSELHVEDTTFFLTLLPLFIFQLLYRMCIMQIPSGYYLQTMNSNLNLDGFLLPIAVMNAISSLPLLILAPFLEYFSTCLFPSKRVGSFLSTCIIAGNLFAALSVMIAGFFEIHRKHFPAVEQPLSGKVLTVSSMPCFYLILQYVLLGVAETLVNPALSVISYRFVPSNVRGTSMNFLTLFNGFGCFTGALLVKLVYLISDGNWFPNTLNKGNLESFFFFLASLTLLNVLGFCSVSQRYCNLNHFNAQNIRGSNLEETLLLHEKSLKFYGSIQEFSSSIDLWETAL

SEQ ID NO: 6285 - protein, 631 aa, Homo sapiens
MPRYGASLRQSCPRSGREQGQDGTAGAPGLLWMGLVLALALALALALALSDSRVLWAPAEAHPLSPQGHPARLHRIVPRLRDVFGWGNLTCPICKGLFTAINLGLKKEPNVARVGSVAIKLCNLLKIAPPAVCQSIVHLFEDDMVEVWRRSVLSPSEACGLLLGSTCGHWDIFSSWNISLPTVPKPPPKPPSPPAPGAPVSRILFLTDLHWDHDYLEGTDPDCADPLCCRRGSGLPPASRPGAGYWGEYSKCDLPLRTLESLLSGLGPAGPFDMVYWTGDIPAHDVWHQTRQDQLRALTTVTALVRKFLGPVPVYPAVGNHESTPVNSFPPPFIEGNHSSRWLYEAMAKAWEPWLPAEALRTLRIGGFYALSPYPGLRLISLNMNFCSRENFWLLINSTDPAGQLQWLVGELQAAEDRGDKVHIIGHIPPGHCLKSWSWNYYRIVARYENTLAAQFFGHTHVDEFEVFYDEETLSRPLAVAFLAPSATTYIGLNPGYRVYQIDGNYSGSSHVVLDHETYILNLTQANIPGAIPHWQLLYRARETYGLPNTLPTAWHNLVYRMRGDMQLFQTFWFLYHKGHPPSEPCGTPCRLATLCAQLSARADSPALCRHLMPDGSLPEAQSLWPRPLFC

SEQ ID NO: 6286 - protein, 904 aa, Homo sapiens
MEWGSESAAVRRHRVGVERREGAAAAPPPEREARAQEPLVDGCSGGGRTRKRSPGGSGGASRGAGTGLSEVRAALGLALYLIALRTLVQLSLQQLVLRGAAGHRGEFDALQARDYLEHITSIGPRTTGSPENEILTVHYLLEQIKLIEVQSNSLHKISVDVQRPTGSFSIDFLGGFTSYYDNITNVVVKLEPRDGAQHAVLANCHFDSVANSPGASDDAVSCSVMLEVLRVLSTSSEALHHAVIFLFNGAEENVLQASHGFITQHPWASLIRAFINLEAAGVGGKELVFQTGPENPWLVQAYVSAAKHPFASVVAQEVFQSGIIPSDTDFRIYRDFGNIPGIDLAFIENGYIYHTKYDTADRILTDSIQRAGDNILAVLKHLATSDMLAAASKYRHGNMVFFDVLGLFVIAYPSRIGSIINYMVVMGVVLYLGKKFLQPKHKTGNYKKDFLCGLGITLISWFTSLVTVLIIAVFISLIGQSLSWYNHFYVSVCLYGTATVAKIILIHTLAKRFYYMNASAQYLGEVFFDISLFVHCCFLVTLTYQGLCSAFISAVWVAFPLLTKLCVHKDFKQHGAQGKFIAFYLLGMFIPYLYALYLIWAVFEMFTPILGRSGSEIPPDVVLASILAGCTMILSSYFINFIYLAKSTKKTMLTLTLVCAITFLLVCSGTFFPYSSNPANPKPKRVFLQHMTRTFHDLEGNAVKRDSGIWINGFDYTGISHITPHIPEINDSIRAHCEENAPLCGFPWYLPVHFLIRKNWYLPAPEVSPRNPPHFRLISKEQTPWDSIKLTFEATGPSHMSFYVRAHKGSTLSQWSLGNGTPVTSKGGDYFVFYSHGLQASAWQFWIEVQVSEEHPEGMVTVAIAAHYLSGEDKRSPQLDALKEKFPDWTFPSAWVCTYDLFVF

SEQ ID NO: 6287 - protein, 412 aa, Homo sapiens
MAEPRQEFEVMEDHAGTYGLGDRKDQGGYTMHQDQEGDTDAGLKESPLQTPTEDGSEEPGSETSDAKSTPTAEAEEAGIGDTPSLEDEAAGHVTQARMVSKSKDGTGSDDKKAKGADGKTKIATPRGAAPPGQKGQANATRIPAKTPPAPKTPPSSGEPPKSGDRSGYSSPGSPGTPGSRSRTPSLPTPPTREPKKVAVVRTPPKSPSSAKSRLQTAPVPMPDLKNVKSKIGSTENLKHQPGGGKVQIINKKLDLSNVQSKCGSKDNIKHVPGGGSVQIVYKPVDLSKVTSKCGSLGNIHHKPGGGQVEVKSEKLDFKDRVQSKIGSLDNITHVPGGGNKKIETHKLTFRENAKAKTDHGAEIVYKSPVVSGDTSPRHLSNVSSTGSIDMVDSPQLATLADEVSASLAKQGL

SEQ ID NO: 6288 - protein, 398 aa, Homo sapiens
MGAKSMRSWCLCQICSCGSDYCPYEIVKQPRHVPEEYKPKQGKIDLGTTYKRDLNSYKVQPVAIVRPLERQVKKGKLDTVPTYKDDYRAWDLHKSELYKPEQTYHPPTVKFGNSTTFQDDFVPQEIKPRQSFKPSSVVKRSTAPFNGITSHRLDYIPHQLELKFERPKEVYKPTDQRFEDLTTHRCDFQGLIGETAKLCRPVHTRVTQNALFEGSTEFRESFQPWEIPPPEVKKVPEYVPPTGSMLLNSTSHLDYVPYQANHVVPIRPVSQKRSNNFPFQGKSIMKEDFPAWESCRQGLIKKQQQIPNPSGKFDGLSTFRSHYVPHELIPTESCKPLNIAFKSSVPFDDVTMYSVEYTPKRQEICPASYPSPPGYIFDNTNSQGHKFFRKIIPAVKAF

SEQ ID NO: 6289 - protein, 652 aa, Homo sapiens
MAMDEYLWMVILGFIIAFILAFSVGANDVANSFGTAVGSGVVTLRQACILASIFETTGSVLLGAKVGETIRKGIIDVNLYNETVETLMAGEVSAMVGSAVWQLIASFLRLPISGTHCIVGSTIGFSLVAIGTKGVQWMELVKIVASWFISPLLSGFMSGLLFVLIRIFILKKEDPVPNGLRALPVFYAATIAINVFSIMYTGAPVLGLVLPMWAIALISFGVALLFAFFVWLFVCPWMRRKITGKLQKEGALSRVSDESLSKVQEAESPVFKELPGAKANDDSTIPLTGAAGETLGTSEGTSAGSHPRAAYGRALSMTHGSVKSPISNGTFGFDGHTRSDGHVYHTVHKDSGLYKDLLHKIHIDRGPEEKPAQESNYRLLRRNNSYTCYTAAICGLPVHATFRAADSSAPEDSEKLVGDTVSYSKKRLRYDSYSSYCNAVAEAEIEAEEGGVEMKLASELADPDQPREDPAEEEKEEKDAPEVHLLFHFLQVLTACFGSFAHGGNDVSNAIGPLVALWLIYKQGGVTQEAATPVWLLFYGGVGICTGLWVWGRRVIQTMGKDLTPITPSSGFTIELASAFTVVIASNIGLPVSTTHCKVGSVVAVGWIRSRKAVDWRLFRNIFVAWFVTVPVAGLFSAAVMALLMYGILPYV

SEQ ID NO: 6290 - protein, 966 aa, Homo sapiens
MAAVAAVAARRRRSWASLVLAFLGVCLGITLAVDRSNFKTCEESSFCKRQRSIRPGLSPYRALLDSLQLGPDSLTVHLIHEVTKVLLVLELQGLQKNMTRFRIDELEPRRPRYRVPDVLVADPPIARLSVSGRDENSVELTMAEGPYKIILTARPFRLDLLEDRSLLLSVNARGLLEFEHQRAPRVSFSDKVNLTLGSIWDKIKNLFSRQGSKDPAEGDGAQPEETPRDGDKPEETQGKAEKDEPGAWEETFKTHSDSKPYGPMSVGLDFSLPGMEHVYGIPEHADNLRLKVTEGGEPYRLYNLDVFQYELYNPMALYGSVPVLLAHNPHRDLGIFWLNAAETWVDISSNTAGKTLFGKMMDYLQGSGETPQTDVRWMSETGIIDVFLLLGPSISDVFRQYASLTGTQALPPLFSLGYHQSRWNYRDEADVLEVDQGFDDHNLPCDVIWLDIEHADGKRYFTWDPSRFPQPRTMLERLASKRRKLVAIVDPHIKVDSGYRVHEELRNLGLYVKTRDGSDYEGWCWPGSAGYPDFTNPTMRAWWANMFSYDNYEGSAPNLFVWNDMNEPSVFNGPEVTMLKDAQHYGGWEHRDVHNIYGLYVHMATADGLRQRSGGMERPFVLARAFFAGSQRFGAVWTGDNTAEWDHLKISIPMCLSLGLVGLSFCGADVGGFFKNPEPELLVRWYQMGAYQPFFRAHAHLDTGRREPWLLPSQHNDIIRDALGQRYSLLPFWYTLLYQAHREGIPVMRPLWVQYPQDVTTFNIDDQYLLGDALLVHPVSDSGAHGVQVYLPGQGEVWYDIQSYQKHHGPQTLYLPVTLSSIPVFQRGGTIVPRWMRVRRSSECMKDDPITLFVALSPQGTAQGELFLDDGHTFNYQTRQEFLLRRFSFSGNTLVSSSADPEGHFETPIWIERVVIIGAGKPAAVVLQTKGSPESRLSFQHDPETSVLVLRKPGINVASDWSIHLR

SEQ ID NO: 6291 - protein, 1372 aa, Homo sapiens
MAKPSVELTRELQDSIRRCLSQGAVLQQHHVKLETKPKKFEDRVLALTSWRLHLFLLKVPAKVESSFNVLEIRAFNTLSQNQILVETERGMVSMRLPSAESVDQVTRHVSSALSKVCPGPGCLIRRGNADTPEGPRDTSPNSETSTSTTHSVCGGFSETYAALCDYNGLHCREEVQWDVDTIYHAEDNREFNLLDFSHLESRDLALMVAALAYNQWFTKLYCKDLRLGSEVLEQVLHTLSKSGSLEELVLDNAGLKTDFVQKLAGVFGENGSCVLHALTLSHNPIEDKGFLSLSQQLLCFPSGLTKLCLAKTAISPRGLQALGQTFGANPAFASSLRYLDLSKNPGLLATDEANALYSFLAQPNALVHLDLSGTDCVIDLLLGALLHGCCSHLTYLNLARNSCSHRKGREAPPAFKQFFSSAYTLSHVNLSATKLPLEALRALLQGLSLNSHLSDLHLDLSSCELRSAGAQALQEQLGAVTCVGSLDLSDNGFDSDLLTLVPALGKNKSLKHLFLGKNFNVKAKTLEEILHKLVQLIQEEDCSLQSLSVADSRLKLRTSILINALGSNTCLAKVDLSGNGMEDIGAKMLSKALQINSSLRTILWDRNNTSALGFLDIARALESNHTLRFMSFPVSDISQAYRSAPERTEDVWQKIQWCLVRNNHSQTCPQEQAFRLQQGLVTSSAEQMLQRLCGRVQEEVRALRLCPLEPVQDELLYARDLIKDAKNSRALFPSLYELGHVLANDGPVRQRLESVASEVSKAVDKELQVILESMVSLTQELCPVAMRVAEGHNKMLSNVAERVTVPRNFIRGALLEQAGQDIQNKLDEVKLSVVTYLTSSIVDEILQELYHSHKSLARHLTQLRTLSDPPGCPGQGQDLSSRGRGRNHDHEETTDDELGTNIDTMAIKKQKRCRKIRPVSAFISGSPQDMESQLGNLGIPPGWFSGLGGSQPTASGSWEGLSELPTHGYKLRHQTQGRPRPPRTTPPGPGRPSMPAPGTRQENGMATRLDEGLEDFFSRRVLEESSSYPRTLRTVRPGLSEAPLPPLQKKRRRGLFHFRRPRSFKGDRGPGSPTTGLLLPPPPPPPPTQESPPSPDPPSLGNNSSPCWSPEEESSLLPGFGGGRGPSFRRKMGTEGSEPGEGGPAPGTAQQPRVHGVALPGLERAKGWSFDGKREGPGPDQEGSTQAWQKRRSSDDAGPGSWKPPPPPQSTKPSFSAMRRAEATWHIAEESAPNHSCQSPSPASQDGEEEKEGTLFPERTLPARNAKLQDPALAPWPPKPVAVPRGRQPPQEPGVREEAEAGDAAPGVNKPRLRLSSQQDQEEPEVQGPPDPGRRTAPLKPKRTRRAQSCDKLEPDRRRPPDPTGTSEPGTD

SEQ ID NO: 6292 - protein, 876 aa, Homo sapiens
MDPGDPAGDPAAGERHRMGRDPLLLLQALQTLWSTRERKQLREEAWRGFAALDDPLAGLLDMLESCRGQRGEGPSLAAWISHQLQCWLQAQPCPSLAQHSLRLKQLQARAVKVLTESPPSLAAPLASIFQLQDADRSCLLAHVHRLHHEGRFREAATLGATLKLQSELGVEKMSIPLLLQDKVALVERYVAGFPDLQRRLLVLMDSWCQPGFDIKDVARRYPEVTSLSLEKLSPKALSRQVLRLQERYGVAPALCPNAAIQQRLAALRHLCHKRFVEKSLSQENWTDHVQGLVGQSPWLQEQLSQLLVSHSDPVTAAQCAMELLLPEERLPAAVAVELRRFRLQGRATEADSRLEVKDMKDRYYQLPIPRENVHLLASWEDLTRHEGALLQCHQVVGVDVEWTPVFVAGGRPRPSLLQVAVEGHVFLLDVLALSQPPTGQGAQAFSRLVAQLLSDPSITKLGYGMVGDLQKLGTSCPALAHVEKQILGGMDLLLVHRQMRVASVPAPAVDRARELRGLSLLVQQVLGTALDKTQQLSNWDRRPLCEEQVIYAAADAYCLLEVHQALCREPARFHLSEDLAGSRRPRHRERPGARKPPGLQKASAPAAPRQVPVAVAVSEGAAPQIPARAFRVVCDNMLQGLARSLRCLGVDARMLGNGEDHRRAAEVARQEGRIILTSGQPFHKLRAQVGAGRCLSVDCSLKAQQQAKAVLKHFNVRVTHADIFSRCQACNCDQYLKVSRDMMKQLMWLSSHQEGPRSSGDEATQSQAVQEPGPAPDAAPEGCTYDRPCRWLQMADLRAETPDMLADGTRLQLAGVPVGVLRTPGLRCFYCCTGCGKVFWDGSHLGRVATHFRDMLESAPSPCEPSPAPSPASSPF

SEQ ID NO: 6293 - protein, 1050 aa, Homo sapiens
MEVAVEKAVAAAAAASAAASGGPSAAPSGENEAESRQGPDSERGGEAARLNLLDTCAVCHQNIQSRAPKLLPCLHSFCQRCLPAPQRYLMLPAPMLGSAETPPPVPAPGSPVSGSSPFATQVGVIRCPVCSQECAERHIIDNFFVKDTTEVPSSTVEKSNQVCTSCEDNAEANGFCVECVEWLCKTCIRAHQRVKFTKDHTVRQKEEVSPEAVGVTSQRPVFCPFHKKEQLKLYCETCDKLTCRDCQLLEHKEHRYQFIEEAFQNQKVIIDTLITKLMEKTKYIKFTGNQIQNRIIEVNQNQKQVEQDIKVAIFTLMVEINKKGKALLHQLESLAKDHRMKLMQQQQEVAGLSKQLEHVMHFSKWAVSSGSSTALLYSKRLITYRLRHLLRARCDASPVTNNTIQFHCDPSFWAQNIINLGSLVIEDKESQPQMPKQNPVVEQNSQPPSGLSSNQLSKFPTQISLAQLRLQHMQQQVMAQRQQVQRRPAPVGLPNPRMQGPIQQPSISHQQPPPRLINFQNHSPKPNGPVLPPHPQQLRYPPNQNIPRQAIKPNPLQMAFLAQQAIKQWQISSGQGTPSTTNSTSSTPSSPTITSAAGYDGKAFGSPMIDLSSPVGGSYNLPSLPDIDCSSTIMLDNIVRKDTNIDHGQPRPPSNRTVQSPNSSVPSPGLAGPVTMTSVHPPIRSPSASSVGSRGSSGSSSKPAGADSTHKVPVVMLEPIRIKQENSGPPENYDFPVVIVKQESDEESRPQNANYPRSILTSLLLNSSQSSTSEETVLRSDAPDSTGDQPGLHQDNSSNGKSEWLDPSQKSPLHVGETRKEDDPNEDWCAVCQNGGELLCCEKCPKVFHLSCHVPTLTNFPSGEWICTFCRDLSKPEVEYDCDAPSHNSEKKKTEGLVKLTPIDKRKCERLLLFLYCHEMSLAFQDPVPLTVPDYYKIIKNPMDLSTIKKRLQEDYSMYSKPEDFVADFRLIFQNCAEFNEPDSEVANAGIKLENYFEELLKNLYPEKRFPKPEFRNESEDNKFSDDSDDDFVQPRKKRLKSIEERQLLK

SEQ ID NO: 6294 - protein, 1756 aa, Homo sapiens
MNSLFRKRNKGKYSPTVQTRSISNKELSELIEQLQKNADQVEKNIVDTEAKMQSDLARLQEGRQPEHRDVTLQKVLDSEKLLYVLEADAAIAKHMKHPQGDMIAEDIRQLKERVTNLRGKHKQIYRLAVKEVDPQVNWAALVEEKLDKLNNQSFGTDLPLVDHQVEEHNIFHNEVKAIGPHLAKDGDKEQNSELRAKYQKLLAASQARQQHLSSLQDYMQRCTNELYWLDQQAKGRMQYDWSDRNLDYPSRRRQYENFINRNLEAKEERINKLHSEGDQLLAAEHPGRNSIEAHMEAVHADWKEYLNLLICEESHLKYMEDYHQFHEDVKDAQELLRKVDSDLNQKYGPDFKDRYQIELLLRELDDQEKVLDKYEDVVQGLQKRGQQVVPLKYRRETPLKPIPVEALCDFEGEQGLISRGYSYTLQKNNGESWELMDSAGNKLIAPAVCFVIPPTDPEALALADSLGSQYRSVRQKAAGSKRTLQQRYEVLKTENPGDASDLQGRQLLAGLDKVASDLDRQEKAITGILRPPLEQGRAVQDSAERAKDLKNITNELLRIEPEKTRSTAEGEAFIQALPGSGTTPLLRTRVEDTNRKYEHLLQLLDLAQEKVDVANRLEKSLQQSWELLATHENHLNQDDTVPESSRVLDSKGQELAAMACELQAQKSLLGEVEQNLQAAKQCSSTLASRFQEHCPDLERQEAEVHKLGQRFNNLRQQVERRAQSLQSAKAAYEHFHRGHDHVLQFLVSIPSYEPQETDSLSQMETKLKNQKNLLDEIASREQEVQKICANSQQYQQAVKDYELEAEKLRSLLDLENGRRSHVSKRARLQSPATKVKEEEAALAAKFTEVYAINRQRLQNLEFALNLLRQQPEVEVTHETLQRNRPDSGVEEAWKIRKELDEETERRRQLENEVKSTQEEIWTLRNQGPQESVVRKEVLKKVPDPVLEESFQQLQRTLAEEQHKNQLLQEELEALQLQLRALEQETRDGGQEYVVKEVLRIEPDRAQADEVLQLREELEALRRQKGAREAEVLLLQQRVAALAEEKSRAQEKVTEKEVVKLQNDPQLEAEYQQLQEDHQRQDQLREKQEEELSFLQDKLKRLEKERAMAEGKITVKEVLKVEKDAATEREVSDLTRQYEDEAAKARASQREKTELLRKIWALEEENAKVVVQEKVREIVRPDPKAESEVANLRLELVEQERKYRGAEEQLRSYQSELEALRRRGPQVEVKEVTKEVIKYKTDPEMEKELQRLREEIVDKTRLIERCDLEIYQLKKEIQALKDTKPQVQTKEVVQEILQFQEDPQTKEEVASLRAKLSEEQKKQVDLERERASQEEQIARKEEELSRVKERVVQQEVVRYEEEPGLRAEASAFAESIDVELRQIDKLRAELRRLQRRRTELERQLEELERERQARREAEREVQRLQQRLAALEQEEAEAREKVTHTQKVVLQQDPQQAREHALLRLQLEEEQHRRQLLEGELETLRRKLAALEKAEVKEKVVLSESVQVEKGDTEQEIQRLKSSLEEESRSKRELDVEVSRLEARLSELEFHNSKSSKELDFLREENHKLQLERQNLQLETRRLQSEINMAATETRDLRNMTVADSGTNHDSRLWSLERELDDLKRLSKDKDLEIDELQKRLGSVAVKREQRENHLRRSIVVIHPDTGRELSPEEAHRAGLIDWNMFVKLRSQECDWEEISVKGPNGESSVIHDRKSGKKFSIEEALQSGRLTPAQYDRYVNKDMSIQELAVLVSGQK

SEQ ID NO: 6295 - protein, 642 aa, Homo sapiens
MDSVSFEDVAVNFTLEEWALLDSSQKKLYEDVMQETFKNLVCLGKKWEDQDIEDDHRNQGKNRRCHMVERLCESRRGSKCGETTSQMPNVNINKETFTGAKPHECSFCGRDFIHHSSLNRHMRSHTGQKPNEYQEYEKQPCKCKAVGKTFSYHHCFRKHERTHTGVKPYECKQCGKAFIYYQPFQRHERTHAGQKPYECKQCGKTFIYYQSFQKHAHTGKKPYECKQCGKAFICYQSFQRHKRTHTGEKPYECKQCGKAFSCPTYFRTHERTHTGEKPYKCKECGKAFSFLSSFRRHKRTHSGEKPYECKECGKAFFYSASFRAHVIIHTGARPYKCKECGKAFNSSNSCRVHERTHIGEKPYECKRCGKSFSWSISLRLHERTHTGEKPYECKQCHKTFSFSSSLREHETTHTGEKPYECKQCGKTFSFSSSLQRHERTHNAEKPYECKQCGKAFRCSSYFRIHERSHTGEKPYECKQCGKVFIRSSSFRLHERTHTGEKPYECKLCGKTFSFSSSLREHEKIHTGNKPFECKQCGKAFLRSSQIRLHERTHTGEKPYQCKQCGKAFISSSKFRMHERTHTGEKPYRCKQCGKAFRFSSSVRIHERSHTGEKPYECKQCGKAFISSSHFRLHERTHMGEKV

SEQ ID NO: 6296 - protein, 911 aa, Homo sapiens
MCSHFTQDFLPVQGIEDSFHKLILRRYEKCGHDNLQLRKGCKSMNVCKVQKGVYNGINKCLSNTQSKIFQCNARVKVFSKFANSNKDKTRHTGEKHFKCNECGKSFQKFSDLTQHKGIHAGEKPYTCEERGKDFGWYTDLNQHKKIHTGEKPYKCEECGKAFNRSTNLTAHKRIHNREKAYTGEDRDRAFGWSTNLNEYKKIHTGDKPYKCKECGKAFMHSSHLNKHEKIHTGEKPYKCKECGKVISSSSSFAKHKRIHTGEKPFKCLECGKAFNISTTLTKHRRIHTGEKPYTCEVCGKAFRQSANLYVHRRIHTGEKPYTCGECGKTFRQSANLYVHRRIHTGEKPYKCEDCGKAFGRYTALNQHKKIHTGEKPYKCEECGKAFNSSTNLTAHKRIHTREKPYTCEDRGRAFGLSTNLNEYKKIHTGDKPYKCKECGKAFIHSLHLNKHEKIHTGKKPYKCKQCGKVITSSSSFAKHKRIHTGEKPFECLECGKAFTSSTTLTKHRRIHTGEKPYTCEVCGKAFRQSAILYVHRRIHTGEKPYTCEECGKTFRQSANLYVHRRIHTGEKPYKCEECGKAFGRYTDLNQHKKIHTGEKLYKCEECGKDFVWYTDLNQQKKIYTGEKPYKCEECGKAFAPSTDLNQHTKILTGEQSYKCEECGKAFGWSIALNQHKKIHTGEKPYKCEECGKAFSRSRNLTTHRRVHTREKPYKCEDRGRSFGWSTNLNEYKKIHTGDKLYKCKECGKVFKQSSHLNRHEKIHTGKKPYKCKECGKVITSSSSFAKHKRIHTGEKPFKCLECGKAFTSSTTLTKHRRIHTGEKPYTCEECGKAFRQSAILYVHRRIHTGEKPYTCGECGKTFRQSANLYAHKKIHTGEKPYTCGDCGKTFRQSANLYAHKKIHTGDKTIQV

SEQ ID NO: 6297 - protein, 450 aa, Homo sapiens
MWLKVFTTFLSFATGACSGLKVTVPSHTVHGVRGQALYLPVHYGFHTPASDIQIIWLFERPHTMPKYLLGSVNKSVVPDLEYQHKFTMMPPNASLLINPLQFPDEGNYIVKVNIQGNGTLSASQKIQVTVDDPVTKPVVQIHPPSGAVEYVGNMTLTCHVEGGTRLAYQWLKNGRPVHTSSTYSFSPQNNTLHIAPVTKEDIGNYSCLVRNPVSEMESDIIMPIIYYGPYGLQVNSDKGLKVGEVFTVDLGEAILFDCSADSHPPNTYSWIRRTDNTTYIIKHGPRLEVASEKVAQKTMDYVCCAYNNITGRQDETHFTVIITSVGLEKLAQKGKSLSPLASITGISLFLIISMCLLFLWKKYQPYKVIKQKLEGRPETEYRKAQTFSGHEDALDDFGIYEFVAFPDVSGVSRIPSRSVPASDCVSGQDLHSTVYEVIQHIPAQQQDHPE

SEQ ID NO: 6298 - protein, 27118 aa, Homo sapiens
MTTQAPTFTQPLQSVVVLEGSTATFEAHISGFPVPEVSWFRDGQVISTSTLPGVQISFSDGRAKLTIPAVTKANSGRYSLKATNGSGQATSTAELLVKAETAPPNFVQRLQSMTVRQGSQVRLQVRVTGIPTPVVKFYRDGAEIQSSLDFQISQEGDLYSLLIAEAYPEDSGTYSVNATNSVGRATSTAELLVQGEEEVPAKKTKTIVSTAQISESRQTRIEKKIEAHFDARSIATVEMVIDGAAGQQLPHKTPPRIPPKPKSRSPTPPSIAAKAQLARQQSPSPIRHSPSPVRHVRAPTPSPVRSVSPAARISTSPIRSVRSPLLMRKTQASTVATGPEVPPPWKQEGYVASSSEAEMRETTLTTSTQIRTEERWEGRYGVQEQVTISGAAGAAASVSASASYAAEAVATGAKEVKQDADKSAAVATVVAAVDMARVREPVISAVEQTAQRTTTTAVHIQPAQEQVRKEAEKTAVTKVVVAADKAKEQELKSRTKEVITTKQEQMHVTHEQIRKETEKTFVPKVVISAAKAKEQETRISEEITKKQKQVTQEAIMKETRKTVVPKVIVATPKVKEQDLVSRGREGITTKREQVQITQEKMRKEAEKTALSTIAVATAKAKEQETILRTRETMATRQEQIQVTHGKVDVGKKAEAVATVVAAVDQARVREPREPGHLEESYAQQTTLEYGYKERISAAKVAEPPQRPASEPHVVPKAVKPRVIQAPSETHIKTTDQKGMHISSQIKKTTDLTTERLVHVDKRPRTASPHFTVSKISVPKTEHGYEASIAGSAIATLQKELSATSSAQKITKSVKAPTVKPSETRVRAEPTPLPQFPFADTPDTYKSEAGVEVKKEVGVSITGTTVREERFEVLHGREAKVTETARVPAPVEIPVTPPTLVSGLKNVTVIEGESVTLECHISGYPSPTVTWYREDYQIESSIDFQITFQSGIARLMIREAFAEDSGRFTCSAVNEAGTVSTSCYLAVQVSEEFEKETTAVTEKFTTEEKRFVESRDVVMTDTSLTEEQAGPGEPAAPYFITKPVVQKLVEGGSVVFGCQVGGNPKPHVYWKKSGVPLTTGYRYKVSYNKQTGECKLVISMTFADDAGEYTIVVRNKHGETSASASLLEEADYELLMKSQQEMLYQTQVTAFVQEPKVGETAPGFVYSEYEKEYEKEQALIRKKMAKDTVVVRTYVEDQEFHISSFEERLIKEIEYRIIKTTLEELLEEDGEEKMAVDISESEAVESGFDSRIKNYRILEGMGVTFHCKMSGYPLPKIAWYKDGKRIKHGERYQMDFLQDGRASLRIPVVLPEDEGIYTAFASNIKGNAICSGKLYVEPAAPLGAPTYIPTLEPVSRIRSLSPRSVSRSPIRMSPARMSPARMSPARMSPARMSPGRRLEETDESQLERLYKPVFVLKPVSFKCLEGQTARFDLKVVGRPMPETFWFHDGQQIVNDYTHKVVIKEDGTQSLIIVPATPSDSGEWTVVAQNRAGRSSISVILTVEAVEHQVKPMFVEKLKNVNIKEGSRLEMKVRATGNPNPDIVWLKNSDIIVPHKYPKIRIEGTKGEAALKIDSTVSQDSAWYTATAINKAGRDTTRCKVNVEVEFAEPEPERKLIIPRGTYRAKEIAAPELEPLHLRYGQEQWEEGDLYDKEKQQKPFFKKKLTSLRLKRFGPAHFECRLTPIGDPTMVVEWLHDGKPLEAANRLRMINEFGYCSLDYGVAYSRDSGIITCRATNKYGTDHTSATLIVKDEKSLVEESQLPEGRKGLQRIEELERMAHEGALTGVTTDQKEKQKPDIVLYPEPVRVLEGETARFRCRVTGYPQPKVNWYLNGQLIRKSKRFRVRYDGIHYLDIVDCKSYDTGEVKVTAENPEGVIEHKVKLEIQQREDFRSVLRRAPEPRPEFHVHEPGKLQFEVQKVDRPVDTTETKEVVKLKRAERITHEKVPEESEELRSKFKRRTEEGYYEAITAVELKSRKKDESYEELLRKTKDELLHWTKELTEEEKKALAEEGKITIPTFKPDKIELSPSMEAPKIFERIQSQTVGQGSDAHFRVRVVGKPDPECEWYKNGVKIERSDRIYWYWPEDNVCELVIRDVTAEDSASIMVKAINIAGETSSHAFLLVQAKQLITFTQELQDVVAKEKDTMATFECETSEPFVKVKWYKDGMEVHEGDKYRMHSDRKVHFLSILTIDTSDAEDYSCVLVEDENVKTTAKLIVEGAVVEFVKELQDIEVPESYSGELECIVSPENIEGKWYHNDVELKSNGKYTITSRRGRQNLTVKDVTKEDQGEYSFVIDGKKTTCKLKMKPRPIAILQGLSDQKVCEGDIVQLEVKVSLESVEGVWMKDGQEVQPSDRVHIVIDKQSHMLLIEDMTKEDAGNYSFTIPALGLSTSGRVSVYSVDVITPLKDVNVIEGTKAVLECKVSVPDVTSVKWYLNDEQIKPDDRVQAIVKGTKQRLVINRTHASDEGPYKLIVGRVETNCNLSVEKIKIIRGLRDLTCTETQNVVFEVELSHSGIDVLWNFKDKEIKPSSKYKIEAHGKIYKLTVLNMMKDDEGKYTFYAGENMTSGKLTVAGGAISKPLTDQTVAESQEAVFECEVANPDSKGEWLRDGKHLPLTNNIRSESDGHKRRLIIAATKLDDIGEYTYKVATSKTSAKLKVEAVKIKKTLKNLTVTETQDAVFTVELTHPNVKGVQWIKNGVVLESNEKYAISVKGTIYSLRIKNCAIVDESVYGFRLGRLGASARLHVETVKIIKKPKDVTALENATVAFEVSVSHDTVPVKWFHKSVEIKPSDKHRLVSERKVHKLMLQNISPSDAGEYTAVVGQLECKAKLFVETLHITKTMKNIEVPETKTASFECEVSHFNVPSMWLKNGVEIEMSEKFKIVVQGKLHQLIIMNTSTEDSAEYTFVCGNDQVSATLTVTPIMITSMLKDINAEEKDTITFEVTVNYEGISYKWLKNGVEIKSTDKCQMRTKKLTHSLNIRNVHFGDAADYTFVAGKATSTATLYVEARHIEFRKHIKDIKVLEKKRAMFECEVSEPDITVQWMKDDQELQITDRIKIQKEKYVHRLLIPSTRMSDAGKYTVVAGGNVSTAKLFVEGRDVRIRSIKKEVQVIEKQRAVVEFEVNEDDVDAHWYKDGIEINFQVQERHKYVVERRIHRMFISETRQSDAGEYTFVAGRNRSSVTLYVNAPEPPQVLQELQPVTVQSGKPARFCAVISGRPQPKISWYKEEQLLSTGFKCKFLHDGQEYTLLLIEAFPEDAAVYTCEAKNDYGVATTSASLSVEVPEVVSPDQEMPVYPPAIITPLQDTVTSEGQPARFQCRVSGTDLKVSWYSKDKKIKPSRFFRMTQFEDTYQLEIAEAYPEDEGTYTFVASNAVGQVSSTANLSLEVQALDRQSSGKDVRESTKSQAVADSSFTKEESKISQKEIKSFQGSSYEYEVQVFESVSQSSIHTAASVQDTQLCHTASLSQIAESTELSKECAKESTGEAPKIFLHLQDVTVKCGDTAQFLCVLKDDSFIDVTWTHEGAKIEESERLKQSQNGNIQFLTICNVQLVDQGLYSCIVHNDCGERTTSAVLSVEGAPESILHERIEQEIEMEMKEFSSSFLSAEEEGLHSAELQLSKINETLELLSESPVYPTKFDSEKEGTGPIFIKEVSNADISMGDVATLSVTVIGIPKPKIQWFFNGVLLTPSADYKFVFDGDDHSLIILFTKLEDEGEYTCMASNDYGKTICSAYLKINSKGEGHKDTETESAVAKSLEKLGGPCPPHFLKELKPIRCAQGLPAIFEYTVVGEPAPTVTWFKENKQLCTSVYYTIIHNPNGSGTFIVNDPQREDSGLYICKAENMLGESTCAAELLVLLEDTDMTDTPCKAKSTPEAPEDFPQTPLKGPAVEALDSEQEIATFVKDTILKAALITEENQQLSYEHIAKANELSSQLPLGAQELQSILEQDKLTPESTREFLCINGSIHFQPLKEPSPNLQLQIVQSQKTFSKEGILMPEEPETQAVLSDTEKIFPSAMSIEQINSLTVEPLKTLLAEPEGNYPQSSIEPPMHSYLTSVAEEVLSPKEKTVSDTNREQRVTLQKQEAQSALILSQSLAEGHVESLQSPDVMISQVNYEPLVPSEHSCTEGGKILIESANPLENAGQDSAVRIEEGKSLRFPLALEEKQVLLKEEHSDNVVMPPDQIIESKREPVAIKKVQEVQGRDLLSKESLLSGIPEEQRLNLKIQICRALQAAVASEQPGLFSEWLRNIEKVEVEAVNITQEPRHIMCMYLVTSAKSVTEEVTIIIEDVDPQMANLKMELRDALCAIIYEEIDILTAEGPRIQQGAKTSLQEEMDSFSGSQKVEPITEPEVESKYLISTEEVSYFNVQSRVKYLDATPVTKGVASAVVSDEKQDESLKPSEEKEESSSESGTEEVATVKIQEAEGGLIKEDGPMIHTPLVDTVSEEGDIVHLTTSITNAKEVNWYFENKLVPSDEKFKCLQDQNTYTLVIDKVNTEDHQGEYVCEALNDSGKTATSAKLTVVKRAAPVIKRKIEPLEVALGHLAKFTCEIQSAPNVRFQWFKAGREIYESDKCSIRSSKYISSLEILRTQVVDCGEYTCKASNEYGSVSCTATLTVTVPGGEKKVRKLLPERKPEPKEEVVLKSVLRKRPEEEEPKVEPKKLEKVKKPAVPEPPPPKPVEEVEVPTVTKRERKIPEPTKVPEIKPAIPLPAPEPKPKPEAEVKTIKPPPVEPEPTPIAAPVTVPVVGKKAEAKAPKEEAAKPKGPIKGVPKKTPSPIEAERRKLRPGSGGEKPPDEAPFTYQLKAVPLKFVKEIKDIILTESEFVGSSAIFECLVSPSTAITTWMKDGSNIRESPKHRFIADGKDRKLHIIDVQLSDAGEYTCVLRLGNKEKTSTAKLVVEELPVRFVKTLEEEVTVVKGQPLYLSCELNKERDVVWRKDGKIVVEKPGRIVPGVIGLMRALTINDADDTDAGTYTVTVENANNLECSSCVKVVEVIRDWLVKPIRDQHVKPKGTAIFACDIAKDTPNIKWFKGYDEIPAEPNDKTEILRDGNHLYLKIKNAMPEDIAEYAVEIEGKRYPAKLTLGEREVELLKPIEDVTIYEKESASFDAEISEADIPGQWKLKGELLRPSPTCEIKAEGGKRFLTLHKVKLDQAGEVLYQALNAITTAILTVKEIELDFAVPLKDVTVPERRQARFECVLTREANVIWSKGPDIIKSSDKFDIIADGKKHILVINDSQFDDEGVYTAEVEGKKTSARLFVTGIRLKFMSPLEDQTVKEGETATFVCELSHEKMHVVWFKNDAKLHTSRTVLISSEGKTHKLEMKEVTLDDISQIKAQVKELSSTAQLKVLEADPYFTVKLHDKTAVEKDEITLKCEVSKDVPVKWFKDGEEIVPSPKYSIKADGLRRILKIKKADLKDKGEYVCDCGTDKTKANVTVEARLIKVEKPLYGVEVFVGETAHFEIELSEPDVHGQWKLKGQPLTASPDCEIIEDGKKHILILHNCQLGMTGEVSFQAANAKSAANLKVKELPLIFITPLSDVKVFEKDEAKFECEVSREPKTFRWLKGTQEITGDDRFELIKDGTKHSMVIKSAAFEDEAKYMFEAEDKHTSGKLIIEGIRLKFLTPLKDVTAKEKESAVFTVELSHDNIRVKWFKNDQRLHTTRSVSMQDEGKTHSITFKDLSIDDTSQIRVEAMGMSSEAKLTVLEGDPYFTGKLQDYTGVEKDEVILQCEISKADAPVKWFKDGKEIKPSKNAVIKADGKKRMLILKKALKSDIGQYTCDCGTDKTSGKLDIEDREIKLVRPLHSVEVMETETARFETEISEDDIHANWKLKGEALLQTPDCEIKEEGKIHSLVLHNCRLDQTGGVDFQAANVKSSAHLRVKPRVIGLLRPLKDVTVTAGETATFDCELSYEDIPVEWYLKGKKLEPSDKVVPRSEGKVHTLTLRDVKLEDAGEVQLTAKDFKTHANLFVKEPPVEFTKPLEDQTVEEGATAVLECEVSRENAKVKWFKNGTEILKSKKYEIVADGRVRKLVIHDCTPEDIKTYTCDAKDFKTSCNLNVVPPHVEFLRPLTDLQVREKEMARFECELSRENAKVKWFKDGAEIKKGKKYDIISKGAVRILVINKCLLDDEAEYSCEVRTARTSGMLTVLEEEAVFTKNLANIEVSETDTIKLVCEVSKPGAEVIWYKGDEEIIETGRYEILTEGRKRILVIQNAHLEDAGNYNCRLPSSRTDGKVKVHELAAEFISKPQNLEILEGEKAEFVCSISKESFPVQWKRDDKTLESGDKYDVIADGKKRVLVVKDATLQDMGTYVVMVGAARAAAHLTVIEKLRIVVPLKDTRVKEQQEVVFNCEVNTEGAKAKWFRNEEAIFDSSKYIILQKDLVYTLRIRDAHLDDQANYNVSLTNHRGENVKSAANLIVEEEDLRIVEPLKDIETMEKKSVTFWCKVNRLNVTLKWTKNGEEVPFDNRVSYRVDKYKHMLTIKDCGFPDEGEYIVTAGQDKSVAELLIIEAPTEFVEHLEDQTVTEFDDAVFSCQLSREKANVKWYRNGREIKEGKKYKFEKDGSIHRLIIKDCRLDDECEYACGVEDRKSRARLFVEEIPVEIIRPPQDILEAPGADVVFLAELNKDKVEVQWLRNNMVVVQGDKHQMMSEGKIHRLQICDIKPRDQGEYRFIAKDKEARAKLELAAAPKIKTADQDLVVDVGKPLTMVVPYDAYPKAEAEWFKENEPLSTKTIDTTAEQTSFRILEAKKGDKGRYKIVLQNKHGKAEGFINLKVIDVPGPVRNLEVTETFDGEVSLAWEEPLTDGGSKIIGYVVERRDIKRKTWVLATDRAESCEFTVTGLQKGGVEYLFRVSARNRVGTGEPVETDNPVEARSKYDVPGPPLNVTITDVNRFGVSLTWEPPEYDGGAEITNYVIELRDKTSIRWDTAMTVRAEDLSATVTDVVEGQEYSFRVRAQNRIGVGKPSAATPFVKVADPIERPSPPVNLTSSDQTQSSVQLKWEPPLKDGGSPILGYIIERCEEGKDNWIRCNMKLVPELTYKVTGLEKGNKYLYRVSAENKAGVSDPSEILGPLTADDAFVEPTMDLSAFKDGLEVIVPNPITILVPSTGYPRPTATWCFGDKVLETGDRVKMKTLSAYAELVISPSERSDKGIYTLKLENRVKTISGEIDVNVIARPSAPKELKFGDITKDSVHLTWEPPDDDGGSPLTGYVVEKREVSRKTWTKVMDFVTDLEFTVPDLVQGKEYLFKVCARNKCGPGEPAYVDEPVNMSTPATVPDPPENVKWRDRTANSIFLTWDPPKNDGGSRIKGYIVERCPRGSDKWVACGEPVAETKMEVTGLEEGKWYAYRVKALNRQGASKPSRPTEEIQAVDTQEAPEIFLDVKLLAGLTVKAGTKIELPATVTGKPEPKITWTKADMILKQDKRITIENVPKKSTVTIVDSKRSDTGTYIIEAVNVCGRATAVVEVNVLDKPGPPAAFDITDVTNESCLLTWNPPRDDGGSKITNYVVERRATDSEVWHKLSSTVKDTNFKATKLIPNKEYIFRVAAENMYGVGEPVQASPITAKYQFDPPGPPTRLEPSDITKDAVTLTWCEPDDDGGSPITGYWVERLDPDTDKWVRCNKMPVKDTTYRVKGLTNKKKYRFRVLAENLAGPGKPSKSTEPILIKDPIDPPWPPGKPTVKDVGKTSVRLNWTKPEHDGGAKIESYVIEMLKTGTDEWVRVAEGVPTTQHLLPGLMEGQEYSFRVRAVNKAGESEPSEPSDPVLCREKLYPPSPPRWLEVINITKNTADLKWTVPEKDGGSPITNYIVEKRDVRRKGWQTVDTTVKDTKCTVTPLTEGSLYVFRVAAENAIGQSDYTEIEDSVLAKDTFTTPGPPYALAVVDVTKRHVDLKWEPPKNDGGRPIQRYVIEKKERLGTRWVKAGKTAGPDCNFRVTDVIEGTEVQFQVRAENEAGVGHPSEPTEILSIEDPTSPPSPPLDLHVTDAGRKHIAIAWKPPEKNGGSPIIGYHVEMCPVGTEKWMRVNSRPIKDLKFKVEEGVVPDKEYVLRVRAVNAIGVSEPSEISENVVAKDPDCKPTIDLETHDIIVIEGEKLSIPVPFRAVPVPTVSWHKDGKEVKASDRLTMKNDHISAHLEVPKSVRADAGIYTITLENKLGSATASINVKVIGLPGPCKDIKASDITKSSCKLTWEPPEFDGGTPILHYVLERREAGRRTYIPVMSGENKLSWTVKDLIPNGEYFFRVKAVNKVGGGEYIELKNPVIAQDPKQPPDPPVDVEVHNPTAEAMTITWKPPLYDGGSKIMGYIIEKIAKGEERWKRCNEHLVPILTYTAKGLEEGKEYQFRVRAENAAGISEPSRATPPTKAVDPIDAPKVILRTSLEVKRGDEIALDASISGSPYPTITWIKDENVIVPEEIKKRAAPLVRRRKGEVQEEEPFVLPLTQRLSIDNSKKGESQLRVRDSLRPDHGLYMIKVENDHGIAKAPCTVSVLDTPGPPINFVFEDIRKTSVLCKWEPPLDDGGSEIINYTLEKKDKTKPDSEWIVVTSTLRHCKYSVTKLIEGKEYLFRVRAENRFGPGPPCVSKPLVAKDPFGPPDAPDKPIVEDVTSNSMLVKWNEPKDNGSPILGYWLEKREVNSTHWSRVNKSLLNALKANVDGLLEGLTYVFRVCAENAAGPGKFSPPSDPKTAHDPISPPGPPIPRVTDTSSTTIELEWEPPAFNGGGEIVGYFVDKQLVGTNEWSRCTEKMIKVRQYTVKEIREGADYKLRVSAVNAAGEGPPGETQPVTVAEPQEPPAVELDVSVKGGIQIMAGKTLRIPAVVTGRPVPTKVWTKEEGELDKDRVVIDNVGTKSELIIKDALRKDHGRYVITATNSCGSKFAAARVEVFDVPGPVLDLKPVVTNRKMCLLNWSDPEDDGGSEITGFIIERKDAKMHTWRQPIETERSKCDITGLLEGQEYKFRVIAKNKFGCGPPVEIGPILAVDPLGPPTSPERLTYTERTKSTITLDWKEPRSNGGSPIQGYIIEKRRHDKPDFERVNKRLCPTTSFLVENLDEHQMYEFRVKAVNEIGESEPSLPLNVVIQDDEVPPTIKLRLSVRGDTIKVKAGEPVHIPADVTGLPMPKIEWSKNETVIEKPTDALQITKEEVSRSEAKTELSIPKAVREDKGTYTVTASNRLGSVFRNVHVEVYDRPSPPRNLAVTDIKAESCYLTWDAPLDNGGSEITHYVIDKRDASRKKAEWEEVTNTAVEKRYGIWKLIPNGQYEFRVRAVNKYGISDECKSDKVVIQDPYRLPGPPGKPKVLARTKGSMLVSWTPPLDNGGSPITGYWLEKREEGSPYWSRVSRAPITKVGLKGVEFNVPRLLEGVKYQFRAMAINAAGIGPPSEPSDPEVAGDPIFPPGPPSCPEVKDKTKSSISLGWKPPAKDGGSPIKGYIVEMQEEGTTDWKRVNEPDKLITTCECVVPNLKELRKYRFRVKAVNEAGESEPSDTTGEIPATDIQEEPEVFIDIGAQDCLVCKAGSQIRIPAVIKGRPTPKSSWEFDGKAKKAMKDGVHDIPEDAQLETAENSSVIIIPECKRSHTGKYSITAKNKAGQKTANCRVKVMDVPGPPKDLKVSDITRGSCRLSWKMPDDDGGDRIKGYVIEKRTIDGKAWTKVNPDCGSTTFVVPDLLSEQQYFFRVRAENRFGIGPPVETIQRTTARDPIYPPDPPIKLKIGLITKNTVHLSWKPPKNDGGSPVTHYIVECLAWDPTGTKKEAWRQCNKRDVEELQFTVEDLVEGGEYEFRVKAVNAAGVSKPSATVGPVTVKDQTCPPSIDLKEFMEVEEGTNVNIVAKIKGVPFPTLTWFKAPPKKPDNKEPVLYDTHVNKLVVDDTCTLVIPQSRRSDTGLYTITAVNNLGTASKEMRLNVLGRPGPPVGPIKFESVSADQMTLSWFPPKDDGGSKITNYVIEKREANRKTWVHVSSEPKECTYTIPKLLEGHEYVFRIMAQNKYGIGEPLDSEPETARNLFSVPGAPDKPTVSSVTRNSMTVNWEEPEYDGGSPVTGYWLEMKDTTSKRWKRVNRDPIKAMTLGVSYKVTGLIEGSDYQFRVYAINAAGVGPASLPSDPATARDPIAPPGPPFPKVTDWTKSSADLEWSPPLKDGGSKVTGYIVEYKEEGKEEWEKGKDKEVRGTKLVVTGLKEGAFYKFRVRAVNIAGIGEPGEVTDVIEMKDRLVSPDLQLDASVRDRIVVHAGGVIRIIAYVSGKPPPTVTWNMNERTLPQEATIETTAISSSMVIKNCQRSHQGVYSLLAKNEAGERKKTIIVDVLDVPGPVGTPFLAHNLTNESCKLTWFSPEDDGGSPITNYVIEKRESDRRAWTPVTYTVTRQNATVQGLIQGKAYFFRIAAENSIGMGPFVETSEALVIREPITVPERPEDLEVKEVTKNTVTLTWNPPKYDGGSEIINYVLESRLIGTEKFHKVTNDNLLSRKYTVKGLKEGDTYEYRVSAVNIVGQGKPSFCTKPITCKDELAPPTLHLDFRDKLTIRVGEAFALTGRYSGKPKPKVSWFKDEADVLEDDRTHIKTTPATLALEKIKAKRSDSGKYCVVVENSTGSRKGFCQVNVVDRPGPPVGPVSFDEVTKDYMVISWKPPLDDGGSKITNYIIEKKEVGKDVWMPVTSASAKTTCKVSKLLEGKDYIFRIHAENLYGISDPLVSDSMKAKDRFRVPDAPDQPIVTEVTKDSALVTWNKPHDGGKPITNYILEKRETMSKRWARVTKDPIHPYTKFRVPDLLEGCQYEFRVSAENEIGIGDPSPPSKPVFAKDPIAKPSPPVNPEAIDTTCNSVDLTWQPPRHDGGSKILGYIVEYQKVGDEEWRRANHTPESCPETKYKVTGLRDGQTYKFRVLAVNAAGESDPAHVPEPVLVKDRLEPPELILDANMAREQHIKVGDTLRLSAIIKGVPFPKVTWKKEDRDAPTKARIDVTPVGSKLEIRNAAHEDGGIYSLTVENPAGSKTVSVKVLVLDKPGPPRDLEVSEIRKDSCYLTWKEPLDDGGSVITNYVVERRDVASAQWSPLSATSKKKSHFAKHLNEGNQYLFRVAAENQYGRGPFVETPKPIKALDPLHPPGPPKDLHHVDVDKTEVSLVWNKPDRDGGSPITGYLVEYQEEGTQDWIKFKTVTNLECVVTGLQQGKTYRFRVKAENIVGLGLPDTTIPIECQEKLVPPSVELDVKLIEGLVVKAGTTVRFPAIIRGVPVPTAKWTTDGSEIKTDEHYTVETDNFSSVLTIKNCLRRDTGEYQITVSNAAGSKTVAVHLTVLDVPGPPTGPINILDVTPEHMTISWQPPKDDGGSPVINYIVEKQDTRKDTWGVVSSGSSKTKLKIPHLQKGCEYVFRVRAENKIGVGPPLDSTPTVAKHKFSPPSPPGKPVVTDITENAATVSWTLPKSDGGSPITGYYMERREVTGKWVRVNKTPIADLKFRVTGLYEGNTYEFRVFAENLAGLSKPSPSSDPIKACRPIKPPGPPINPKLKDKSRETADLVWTKPLSDGGSPILGYVVECQKPGTAQWNRINKDELIRQCAFRVPGLIEGNEYRFRIKAANIVGEGEPRELAESVIAKDILHPPEVELDVTCRDVITVRVGQTIRILARVKGRPEPDITWTKEGKVLVREKRVDLIQDLPRVELQIKEAVRADHGKYIISAKNSSGHAQGSAIVNVLDRPGPCQNLKVTNVTKENCTISWENPLDNGGSEITNFIVEYRKPNQKGWSIVASDVTKRLIKANLLANNEYYFRVCAENKVGVGPTIETKTPILAINPIDRPGEPENLHIADKGKTFVYLKWRRPDYDGGSPNLSYHVERRLKGSDDWERVHKGSIKETHYMVDRCVENQIYEFRVQTKNEGGESDWVKTEEVVVKEDLQKPVLDLKLSGVLTVKAGDTIRLEAGVRGKPFPEVAWTKDKDATDLTRSPRVKIDTRADSSKFSLTKAKRSDGGKYVVTATNTAGSFVAYATVNVLDKPGPVRNLKIVDVSSDRCTVCWDPPEDDGGCEIQNYILEKCETKRMVWSTYSATVLTPGTTVTRLIEGNEYIFRVRAENKIGTGPPTESKPVIAKTKYDKPGRPDPPEVTKVSKEEMTVVWNPPEYDGGKSITGYFLEKKEKHSTRWVPVNKSAIPERRMKVQNLLPDHEYQFRVKAENEIGIGEPSLPSRPVVAKDPIEPPGPPTNFRVVDTTKHSITLGWGKPVYDGGAPIIGYVVEMRPKIADASPDEGWKRCNAAAQLVRKEFTVTSLDENQEYEFRVCAQNQVGIGRPAELKEAIKPKEILEPPEIDLDASMRKLVIVRAGCPIRLFAIVRGRPAPKVTWRKVGIDNVVRKGQVDLVDTMAFLVIPNSTRDDSGKYSLTLVNPAGEKAVFVNVRVLDTPGPVSDLKVSDVTKTSCHVSWAPPENDGGSQVTHYIVEKREADRKTWSTVTPEVKKTSFHVTNLVPGNEYYFRVTAVNEYGPGVPTDVPKPVLASDPLSEPDPPRKLEVTEMTKNSATLAWLPPLRDGGAKIDGYITSYREEEQPADRWTEYSVVKDLSLVVTGLKEGKKYKFRVAARNAVGVSLPREAEGVYEAKEQLLPPKILMPEQITIKAGKKLRIEAHVYGKPHPTCKWKKGEDEVVTSSHLAVHKADSSSILIIKDVTRKDSGYYSLTAENSSGTDTQKIKVVVMDAPGPPQPPFDISDIDADACSLSWHIPLEDGGSNITNYIVEKCDVSRGDWVTALASVTKTSCRVGKLIPGQEYIFRVRAENRFGISEPLTSPKMVAQFPFGVPSEPKNARVTKVNKDCIFVAWDRPDSDGGSPIIGYLIERKERNSLLWVKANDTLVRSTEYPCAGLVEGLEYSFRIYALNKAGSSPPSKPTEYVTARMPVDPPGKPEVIDVTKSTVSLIWARPKHDGGSKIIGYFVEACKLPGDKWVRCNTAPHQIPQEEYTATGLEEKAQYQFRAIARTAVNISPPSEPSDPVTILAENVPPRIDLSVAMKSLLTVKAGTNVCLDATVFGKPMPTVSWKKDGTLLKPAEGIKMAMQRNLCTLELFSVNRKDSGDYTITAENSSGSKSATIKLKVLDKPGPPASVKINKMYSDRAMLSWEPPLEDGGSEITNYIVDKRETSRPNWAQVSATVPITSCSVEKLIEGHEYQFRICAENKYGVGDPVFTEPAIAKNPYDPPGRCDPPVISNITKDHMTVSWKPPADDGGSPITGYLLEKRETQAVNWTKVNRKPIIERTLKATGLQEGTEYEFRVTAINKAGPGKPSDASKAAYARDPQYPPGPPAFPKVYDTTRSSVSLSWGKPAYDGGSPIIGYLVEVKRADSDNWVRCNLPQNLQKTRFEVTGLMEDTQYQFRVYAVNKIGYSDPSDVPDKHYPKDILIPPEGELDADLRKTLILRAGVTMRLYVPVKGRPPPKITWSKPNVNLRDRIGLDIKSTDFDTFLRCENVNKYDAGKYILTLENSCGKKEYTIVVKVLDTPGPPVNVTVKEISKDSAYVTWEPPIIDGGSPIINYVVQKRDAERKSWSTVTTECSKTSFRVANLEEGKSYFFRVFAENEYGIGDPGETRDAVKASQTPGPVVDLKVRSVSKSSCSIGWKKPHSDGGSRIIGYVVDFLTEENKWQRVMKSLSLQYSAKDLTEGKEYTFRVSAENENGEGTPSEITVVARDDVVAPDLDLKGLPDLCYLAKENSNFRLKIPIKGKPAPSVSWKKGEDPLATDTRVSVESSAVNTTLIVYDCQKSDAGKYTITLKNVAGTKEGTISIKVVGKPGIPTGPIKFDEVTAEAMTLKWAPPKDDGGSEITNYILEKRDSVNNKWVTCASAVQKTTFRVTRLHEGMEYTFRVSAENKYGVGEGLKSEPIVARHPFDVPDAPPPPNIVDVRHDSVSLTWTDPKKTGGSPITGYHLEFKERNSLLWKRANKTPIRMRDFKVTGLTEGLEYEFRVMAINLAGVGKPSLPSEPVVALDPIDPPGKPEVINITRNSVTLIWTEPKYDGGHKLTGYIVEKRDLPSKSWMKANHVNVPECAFTVTDLVEGGKYEFRIRAKNTAGAISAPSESTETIICKDEYEAPTIVLDPTIKDGLTIKAGDTIVLNAISILGKPLPKSSWSKAGKDIRPSDITQITSTPTSSMLTIKYATRKDAGEYTITATNPFGTKVEHVKVTVLDVPGPPGPVEISNVSAEKATLTWTPPLEDGGSPIKSYILEKRETSRLLWTVVSEDIQSCRHVATKLIQGNEYIFRVSAVNHYGKGEPVQSEPVKMVDRFGPPGPPEKPEVSNVTKNTATVSWKRPVDDGGSEITGYHVERREKKSLRWVRAIKTPVSDLRCKVTGLQEGSTYEFRVSAENRAGIGPPSEASDSVLMKDAAYPPGPPSNPHVTDTTKKSASLAWGKPHYDGGLEITGYVVEHQKVGDEAWIKDTTGTALRITQFVVPDLQTKEKYNFRISAINDAGVGEPAVIPDVEIVEREMAPDFELDAELRRTLVVRAGLSIRIFVPIKGRPAPEVTWTKDNINLKNRANIENTESFTLLIIPECNRYDTGKFVMTIENPAGKKSGFVNVRVLDTPGPVLNLRPTDITKDSVTLHWDLPLIDGGSRITNYIVEKREATRKSYSTATTKCHKCTYKVTGLSEGCEYFFRVMAENEYGIGEPTETTEPVKASEAPSPPDSLNIMDITKSTVSLAWPKPKHDGGSKITGYVIEAQRKGSDQWTHITTVKGLECVVRNLTEGEEYTFQVMAVNSAGRSAPRESRPVIVKEQTMLPELDLRGIYQKLVIAKAGDNIKVEIPVLGRPKPTVTWKKGDQILKQTQRVNFETTATSTILNINECVRSDSGPYPLTARNIVGEVGDVITIQVHDIPGPPTGPIKFDEVSSDFVTFSWDPPENDGGVPISNYVVEMRQTDSTTWVELATTVIRTTYKATRLTTGLEYQFRVKAQNRYGVGPGITSACIVANYPFKVPGPPGTPQVTAVTKDSMTISWHEPLSDGGSPILGYHVERKERNGILWQTVSKALVPGNIFKSSGLTDGIAYEFRVIAENMAGKSKPSKPSEPMLALDPIDPPGKPVPLNITRHTVTLKWAKPEYTGGFKITSYIVEKRDLPNGRWLKANFSNILENEFTVSGLTEDAAYEFRVIAKNAAGAISPPSEPSDAITCRDDVEAPKIKVDVKFKDTVILKAGEAFRLEADVSGRPPPTMEWSKDGKELEGTAKLEIKIADFSTNLVNKDSTRRDSGAYTLTATNPGGFAKHIFNVKVLDRPGPPEGPLAVTEVTSEKCVLSWFPPLDDGGAKIDHYIVQKRETSRLAWTNVASEVQVTKLKVTKLLKGNEYIFRVMAVNKYGVGEPLESEPVLAVNPYGPPDPPKNPEVTTITKDSMVVCWGHPDSDGGSEIINYIVERRDKAGQRWIKCNKKTLTDLRYKVSGLTEGHEYEFRIMAENAAGISAPSPTSPFYKACDTVFKPGPPGNPRVLDTSRSSISIAWNKPIYDGGSEITGYMVEIALPEEDEWQIVTPPAGLKATSYTITGLTENQEYKIRIYAMNSEGLGEPALVPGTPKAEDRMLPPEIELDADLRKVVTIRACCTLRLFVPIKGRPAPEVKWARDHGESLDKASIESTSSYTLLIVGNVNRFDSGKYILTVENSSGSKSAFVNVRVLDTPGPPQDLKVKEVTKTSVTLTWDPPLLDGGSKIKNYIVEKRESTRKAYSTVATNCHKTSWKVDQLQEGCSYYFRVLAENEYGIGLPAETAESVKASERPLPPGKITLMDVTRNSVSLSWEKPEHDGGSRILGYIVEMQTKGSDKWATCATVKVTEATITGLIQGEEYSFRVSAQNEKGISDPRQLSVPVIAKDLVIPPAFKLLFNTFTVLAGEDLKVDVPFIGRPTPAVTWHKDNVPLKQTTRVNAESTENNSLLTIKDACREDVGHYVVKLTNSAGEAIETLNVIVLDKPGPPTGPVKMDEVTADSITLSWGPPKYDGGSSINNYIVEKRDTSTTTWQIVSATVARTTIKACRLKTGCEYQFRIAAENRYGKSTYLNSEPTVAQYPFKVPGPPGTPVVTLSSRDSMEVQWNEPISDGGSRVIGYHLERKERNSILWVKLNKTPIPQTKFKTTGLEEGVEYEFRVSAENIVGIGKPSKVSECYVARDPCDPPGRPEAIIVTRNSVTLQWKKPTYDGGSKITGYIVEKKELPEGRWMKASFTNIIDTHFEVTGLVEDHRYEFRVIARNAAGVFSEPSESTGAITARDEVDPPRISMDPKYKDTIVVHAGESFKVDADIYGKPIPTIQWIKGDQELSNTARLEIKSTDFATSLSVKDAVRVDSGNYILKAKNVAGERSVTVNVKVLDRPGPPEGPVVISGVTAEKCTLAWKPPLQDGGSDIINYIVERRETSRLVWTVVDANVQTLSCKVTKLLEGNEYTFRIMAVNKYGVGEPLESEPVVAKNPFVVPDAPKAPEVTTVTKDSMIVVWERPASDGGSEILGYVLEKRDKEGIRWTRCHKRLIGELRLRVTGLIENHDYEFRVSAENAAGLSEPSPPSAYQKACDPIYKPGPPNNPKVIDITRSSVFLSWSKPIYDGGCEIQGYIVEKCDVSVGEWTMCTPPTGINKTNIEVEKLLEKHEYNFRICAINKAGVGEHADVPGPIIVEEKLEAPDIDLDLELRKIINIRAGGSLRLFVPIKGRPTPEVKWGKVDGEIRDAAIIDVTSSFTSLVLDNVNRYDSGKYTLTLENSSGTKSAFVTVRVLDTPSPPVNLKVTEITKDSVSITWEPPLLDGGSKIKNYIVEKREATRKSYAAVVTNCHKNSWKIDQLQEGCSYYFRVTAENEYGIGLPAQTADPIKVAEVPQPPGKITVDDVTRNSVSLSWTKPEHDGGSKIIQYIVEMQAKHSEKWSECARVKSLQAVITNLTQGEEYLFRVVAVNEKGRSDPRSLAVPIVAKDLVIEPDVKPAFSSYSVQVGQDLKIEVPISGRPKPTITWTKDGLPLKQTTRINVTDSLDLTTLSIKETHKDDGGQYGITVANVVGQKTASIEIVTLDKPDPPKGPVKFDDVSAESITLSWNPPLYTGGCQITNYIVQKRDTTTTVWDVVSATVARTTLKVTKLKTGTEYQFRIFAENRYGQSFALESDPIVAQYPYKEPGPPGTPFATAISKDSMVIQWHEPVNNGGSPVIGYHLERKERNSILWTKVNKTIIHDTQFKAQNLEEGIEYEFRVYAENIVGVGKASKNSECYVARDPCDPPGTPEPIMVKRNEITLQWTKPVYDGGSMITGYIVEKRDLPDGRWMKASFTNVIETQFTVSGLTEDQRYEFRVIAKNAAGAISKPSDSTGPITAKDEVELPRISMDPKFRDTIVVNAGETFRLEADVHGKPLPTIEWLRGDKEIEESARCEIKNTDFKALLIVKDAIRIDGGQYILRASNVAGSKSFPVNVKVLDRPGPPEGPVQVTGVTSEKCSLTWSPPLQDGGSDISHYVVEKRETSRLAWTVVASEVVTNSLKVTKLLEGNEYVFRIMAVNKYGVGEPLESAPVLMKNPFVLPGPPKSLEVTNIAKDSMTVCWNRPDSDGGSEIIGYIVEKRDRSGIRWIKCNKRRITDLRLRVTGLTEDHEYEFRVSAENAAGVGEPSPATVYYKACDPVFKPGPPTNAHIVDTTKNSITLAWGKPIYDGGSEILGYVVEICKADEEEWQIVTPQTGLRVTRFEISKLTEHQEYKIRVCALNKVGLGEATSVPGTVKPEDKLEAPELDLDSELRKGIVVRAGGSARIHIPFKGRPTPEITWSREEGEFTDKVQIEKGVNYTQLSIDNCDRNDAGKYILKLENSSGSKSAFVTVKVLDTPGPPQNLAVKEVRKDSAFLVWEPPIIDGGAKVKNYVIDKRESTRKAYANVSSKCSKTSFKVENLTEGAIYYFRVMAENEFGVGVPVETVDAVKAAEPPSPPGKVTLTDVSQTSASLMWEKPEHDGGSRVLGYVVEMQPKGTEKWSIVAESKVCNAVVTGLSSGQEYQFRVKAYNEKGKSDPRVLGVPVIAKDLTIQPSLKLPFNTYSIQAGEDLKIEIPVIGRPRPNISWVKDGEPLKQTTRVNVEETATSTVLHIKEGNKDDFGKYTVTATNSAGTATENLSVIVLEKPGPPVGPVRFDEVSADFVVISWEPPAYTGGCQISNYIVEKRDTTTTTWHMVSATVARTTIKITKLKTGTEYQFRIFAENRYGKSAPLDSKAVIVQYPFKEPGPPGTPFVTSISKDQMLVQWHEPVNDGGTKIIGYHLEQKEKNSILWVKLNKTPIQDTKFKTTGLDEGLEYEFKVSAENIVGIGKPSKVSECFVARDPCDPPGRPEAIVITRNNVTLKWKKPAYDGGSKITGYIVEKKDLPDGRWMKASFTNVLETEFTVSGLVEDQRYEFRVIARNAAGNFSEPSDSSGAITARDEIDAPNASLDPKYKDVIVVHAGETFVLEADIRGKPIPDVVWSKDGKELEETAARMEIKSTIQKTTLVVKDCIRTDGGQYILKLSNVGGTKSIPITVKVLDRPGPPEGPLKVTGVTAEKCYLAWNPPLQDGGANISHYIIEKRETSRLSWTQVSTEVQALNYKVTKLLPGNEYIFRVMAVNKYGIGEPLESGPVTACNPYKPPGPPSTPEVSAITKDSMVVTWARPVDDGGTEIEGYILEKRDKEGVRWTKCNKKTLTDLRLRVTGLTEGHSYEFRVAAENAAGVGEPSEPSVFYRACDALYPPGPPSNPKVTDTSRSSVSLAWSKPIYDGGAPVKGYVVEVKEAAADEWTTCTPPTGLQGKQFTVTKLKENTEYNFRICAINSEGVGEPATLPGSVVAQERIEPPEIELDADLRKVVVLRASATLRLFVTIKGRPEPEVKWEKAEGILTDRAQIEVTSSFTMLVIDNVTRFDSGRYNLTLENNSGSKTAFVNVRVLDSPSAPVNLTIREVKKDSVTLSWEPPLIDGGAKITNYIVEKRETTRKAYATITNNCTKTTFRIENLQEGCSYYFRVLASNEYGIGLPAETTEPVKVSEPPLPPGRVTLVDVTRNTATIKWEKPESDGGSKITGYVVEMQTKGSEKWSTCTQVKTLEATISGLTAGEEYVFRVAAVNEKGRSDPRQLGVPVIARDIEIKPSVELPFHTFNVKAREQLKIDVPFKGRPQATVNWRKDGQTLKETTRVNVSSSKTVTSLSIKEASKEDVGTYELCVSNSAGSITVPITIIVLDRPGPPGPIRIDEVSCDSITISWNPPEYDGGCQISNYIVEKKETTSTTWHIVSQAVARTSIKIVRLTTGSEYQFRVCAENRYGKSSYSESSAVVAEYPFSPPGPPGTPKVVHATKSTMLVTWQVPVNDGGSRVIGYHLEYKERSSILWSKANKILIADTQMKVSGLDEGLMYEYRVYAENIAGIGKCSKSCEPVPARDPCDPPGQPEVTNITRKSVSLKWSKPHYDGGAKITGYIVERRELPDGRWLKCNYTNIQETYFEVTELTEDQRYEFRVFARNAADSVSEPSESTGPIIVKDDVEPPRVMMDVKFRDVIVVKAGEVLKINADIAGRPLPVISWAKDGIEIEERARTEIISTDNHTLLTVKDCIRRDTGQYVLTLKNVAGTRSVAVNCKVLDKPGPPAGPLEINGLTAEKCSLSWGRPQEDGGADIDYYIVEKRETSHLAWTICEGELQMTSCKVTKLLKGNEYIFRVTGVNKYGVGEPLESVAIKALDPFTVPSPPTSLEITSVTKESMTLCWSRPESDGGSEISGYIIERREKNSLRWVRVNKKPVYDLRVKSTGLREGCEYEYRVYAENAAGLSLPSETSPLIRAEDPVFLPSPPSKPKIVDSGKTTITIAWVKPLFDGGAPITGYTVEYKKSDDTDWKTSIQSLRGTEYTISGLTTGAEYVFRVKSVNKVGASDPSDSSDPQIAKEREEEPLFDIDSEMRKTLIVKAGASFTMTVPFRGRPVPNVLWSKPDTDLRTRAYVDTTDSRTSLTIENANRNDSGKYTLTIQNVLSAASLTLVVKVLDTPGPPTNITVQDVTKESAVLSWDVPENDGGAPVKNYHIEKREASKKAWVSVTNNCNRLSYKVTNLQEGAIYYFRVSGENEFGVGIPAETKEGVKITEKPSPPEKLGVTSISKDSVSLTWLKPEHDGGSRIVHYVVEALEKGQKNWVKCAVAKSTHHVVSGLRENSEYFFRVFAENQAGLSDPRELLLPVLIKEQLEPPEIDMKNFPSHTVYVRAGSNLKVDIPISGKPLPKVTLSRDGVPLKATMRFNTEITAENLTINLKESVTADAGRYEITAANSSGTTKAFINIVVLDRPGPPTGPVVISDITEESVTLKWEPPKYDGGSQVTNYILLKRETSTAVWTEVSATVARTMMKVMKLTTGEEYQFRIKAENRFGISDHIDSACVTVKLPYTTPGPPSTPWVTNVTRESITVGWHEPVSNGGSAVVGYHLEMKDRNSILWQKANKLVIRTTHFKVTTISAGLIYEFRVYAENAAGVGKPSHPSEPVLAIDACEPPRNVRITDISKNSVSLSWQQPAFDGGSKITGYIVERRDLPDGRWTKASFTNVTETQFIISGLTQNSQYEFRVFARNAVGSISNPSEVVGPITCIDSYGGPVIDLPLEYTEVVKYRAGTSVKLRAGISGKPAPTIEWYKDDKELQTNALVCVENTTDLASILIKDADRLNSGCYELKLRNAMGSASATIRVQILDKPGPPGGPIEFKTVTAEKITLLWRPPADDGGAKITHYIVEKRETSRVVWSMVSEHLEECIITTTKIIKGNEYIFRVRAVNKYGIGEPLESDSVVAKNAFVTPGPPGIPEVTKITKNSMTVVWSRPIADGGSDISGYFLEKRDKKSLGWFKVLKETIRDTRQKVTGLTENSDYQYRVCAVNAAGQGPFSEPSEFYKAADPIDPPGPPAKIRIADSTKSSITLGWSKPVYDGGSAVTGYVVEIRQGEEEEWTTVSTKGEVRTTEYVVSNLKPGVNYYFRVSAVNCAGQGEPIEMNEPVQAKDILEAPEIDLDVALRTSVIAKAGEDVQVLIPFKGRPPPTVTWRKDEKNLGSDARYSIENTDSSSLLTIPQVTRNDTGKYILTIENGVGEPKSSTVSVKVLDTPAACQKLQVKHVSRGTVTLLWDPPLIDGGSPIINYVIEKRDATKRTWSVVSHKCSSTSFKLIDLSEKTPFFFRVLAENEIGIGEPCETTEPVKAAEVPAPIRDLSMKDSTKTSVILSWTKPDFDGGSVITEYVVERKGKGEQTWSHAGISKTCEIEVSQLKEQSVLEFRVFAKNEKGLSDPVTIGPITVKELIITPEVDLSDIPGAQVTVRIGHNVHLELPYKGKPKPSISWLKDGLPLKESEFVRFSKTENKITLSIKNAKKEHGGKYTVILDNAVCRIAVPITVITLGPPSKPKGPIRFDEIKADSVILSWDVPEDNGGGEITCYSIEKRETSQTNWKMVCSSVARTTFKVPNLVKDAEYQFRVRAENRYGVSQPLVSSIIVAKHQFRIPGPPGKPVIYNVTSDGMSLTWDAPVYDGGSEVTGFHVEKKERNSILWQKVNTSPISGREYRATGLVEGLDYQFRVYAENSAGLSSPSDPSKFTLAVSPVDPPGTPDYIDVTRETITLKWNPPLRDGGSKIVGYSIEKRQGNERWVRCNFTDVSECQYTVTGLSPGDRYEFRIIARNAVGTISPPSQSSGIIMTRDENVPPIVEFGPEYFDGLIIKSGESLRIKALVQGRPVPRVTWFKDGVEIEKRMNMEITDVLGSTSLFVRDATRDHRGVYTVEAKNASGSAKAEIKVKVQDTPGKVVGPIRFTNITGEKMTLWWDAPLNDGCAPITHYIIEKRETSRLAWALIEDKCEAQSYTAIKLINGNEYQFRVSAVNKFGVGRPLDSDPVVAQIQYTVPDAPGIPEPSNITGNSITLTWARPESDGGSEIQQYILERREKKSTRWVKVISKRPISETRFKVTGLTEGNEYEFHVMAENAAGVGPASGISRLIKCREPVNPPGPPTVVKVTDTSKTTVSLEWSKPVFDGGMEIIGYIIEMCKADLGDWHKVNAEACVKTRYTVTDLQAGEEYKFRVSAINGAGKGDSCEVTGTIKAVDRLTAPELDIDANFKQTHVVRAGASIRLFIAYQGRPTPTAVWSKPDSNLSLRADIHTTDSFSTLTVENCNRNDAGKYTLTVENNSGSKSITFTVKVLDTPGPPGPITFKDVTRGSATLMWDAPLLDGGARIHHYVVEKREASRRSWQVISEKCTRQIFKVNDLAEGVPYYFRVSAVNEYGVGEPYEMPEPIVATEQPAPPRRLDVVDTSKSSAVLAWLKPDHDGGSRITGYLLEMRQKGSDFWVEAGHTKQLTFTVERLVEKTEYEFRVKAKNDAGYSEPREAFSSVIIKEPQIEPTADLTGITNQLITCKAGSPFTIDVPISGRPAPKVTWKLEEMRLKETDRVSITTTKDRTTLTVKDSMRGDSGRYFLTLENTAGVKTFSVTVVVIGRPGPVTGPIEVSSVSAESCVLSWGEPKDGGGTEITNYIVEKRESGTTAWQLVNSSVKRTQIKVTHLTKYMEYSFRVSSENRFGVSKPLESAPIIAEHPFVPPSAPTRPEVYHVSANAMSIRWEEPYHDGGSKIIGYWVEKKERNTILWVKENKVPCLECNYKVTGLVEGLEYQFRTYALNAAGVSKASEASRPIMAQNPVDAPGRPEVTDVTRSTVSLIWSAPAYDGGSKVVGYIIERKPVSEVGDGRWLKCNYTIVSDNFFTVTALSEGDTYEFRVLAKNAAGVISKGSESTGPVTCRDEYAPPKAELDARLHGDLVTIRAGSDLVLDAAVGGKPEPKIIWTKGDKELDLCEKVSLQYTGKRATAVIKFCDRSDSGKYTLTVKNASGTKAVSVMVKVLDSPGPCGKLTVSRVTQEKCTLAWSLPQEDGGAEITHYIVERRETSRLNWVIVEGECPTLSYVVTRLIKNNEYIFRVRAVNKYGPGVPVESEPIVARNSFTIPSPPGIPEEVGTGKEHIIIQWTKPESDGGNEISNYLVDKREKKSLRWTRVNKDYVVYDTRLKVTSLMEGCDYQFRVTAVNAAGNSEPSEASNFISCREPSYTPGPPSAPRVVDTTKHSISLAWTKPMYDGGTDIVGYVLEMQEKDTDQWYRVHTNATIRNTEFTVPDLKMGQKYSFRVAAVNVKGMSEYSESIAEIEPVERIEIPDLELADDLKKTVTIRAGASLRLMVSVSGRPPPVITWSKQGIDLASRAIIDTTESYSLLIVDKVNRYDAGKYTIEAENQSGKKSATVLVKVYDTPGPCPSVKVKEVSRDSVTITWEIPTIDGGAPVNNYIVEKREAAMRAFKTVTTKCSKTLYRISGLVEGTMYYFRVLPENIYGIGEPCETSDAVLVSEVPLVPAKLEVVDVTKSTVTLAWEKPLYDGGSRLTGYVLEACKAGTERWMKVVTLKPTVLEHTVTSLNEGEQYLFRIRAQNEKGVSEPRETVTAVTVQDLRVLPTIDLSTMPQKTIHVPAGRPVELVIPIAGRPPPAASWFFAGSKLRESERVTVETHTKVAKLTIRETTIRDTGEYTLELKNVTGTTSETIKVIILDKPGPPTGPIKIDEIDATSITISWEPPELDGGAPLSGYVVEQRDAHRPGWLPVSESVTRSTFKFTRLTEGNEYVFRVAATNRFGIGSYLQSEVIECRSSIRIPGPPETLQIFDVSRDGMTLTWYPPEDDGGSQVTGYIVERKEVRADRWVRVNKVPVTMTRYRSTGLTEGLEYEHRVTAINARGSGKPSRPSKPIVAMDPIAPPGKPQNPRVTDTTRTSVSLAWSVPEDEGGSKVTGYLIEMQKVDQHEWTKCNTTPTKIREYTLTHLPQGAEYRFRVLACNAGGPGEPAEVPGTVKVTEMLEYPDYELDERYQEGIFVRQGGVIRLTIPIKGKPFPICKWTKEGQDISKRAMIATSETHTELVIKEADRGDSGTYDLVLENKCGKKAVYIKVRVIGSPNSPEGPLEYDDIQVRSVRVSWRPPADDGGADILGYILERREVPKAAWYTIDSRVRGTSLVVKGLKENVEYHFRVSAENQFGISKPLKSEEPVTPKTPLNPPEPPSNPPEVLDVTKSSVSLSWSRPKDDGGSRVTGYYIERKETSTDKWVRHNKTQITTTMYTVTGLVPDAEYQFRIIAQNDVGLSETSPASEPVVCKDPFDKPSQPGELEILSISKDSVTLQWEKPECDGGKEILGYWVEYRQSGDSAWKKSNKERIKDKQFTIGGLLEATEYEFRVFAENETGLSRPRRTAMSIKTKLTSGEAPGIRKEMKDVTTKLGEAAQLSCQIVGRPLPDIKWYRFGKELIQSRKYKMSSDGRTHTLTVMTEEQEDEGVYTCIATNEVGEVETSSKLLLQATPQFHPGYPLKEKYYGAVGSTLRLHVMYIGRPVPAMTWFHGQKLLQNSENITIENTEHYTHLVMKNVQRKTHAGKYKVQLSNVFGTVDAILDVEIQDKPDKPTGPIVIEALLKNSAVISWKPPADDGGSWITNYVVEKCEAKEGAEWQLVSSAISVTTCRIVNLTENAGYYFRVSAQNTFGISDPLEVSSVVIIKSPFEKPGAPGKPTITAVTKDSCVVAWKPPASDGGAKIRNYYLEKREKKQNKWISVTTEEIRETVFSVKNLIEGLEYEFRVKCENLGGESEWSEISEPITPKSDVPIQAPHFKEELRNLNVRYQSNATLVCKVTGHPKPIVKWYRQGKEIIADGLKYRIQEFKGGYHQLIIASVTDDDATVYQVRATNQGGSVSGTASLEVEVPAKIHLPKTLEGMGAVHALRGEVVSIKIPFSGKPDPVITWQKGQDLIDNNGHYQVIVTRSFTSLVFPNGVERKDAGFYVVCAKNRFGIDQKTVELDVADVPDPPRGVKVSDVSRDSVNLTWTEPASDGGSKITNYIVEKCATTAERWLRVGQARETRYTVINLFGKTSYQFRVIAENKFGLSKPSEPSEPTITKEDKTRAMNYDEEVDETREVSMTKASHSSTKELYEKYMIAEDLGRGEFGIVHRCVETSSKKTYMAKFVKVKGTDQVLVKKEISILNIARHRNILHLHESFESMEELVMIFEFISGLDIFERINTSAFELNEREIVSYVHQVCEALQFLHSHNIGHFDIRPENIIYQTRRSSTIKIIEFGQARQLKPGDNFRLLFTAPEYYAPEVHQHDVVSTATDMWSLGTLVYVLLSGINPFLAETNQQIIENIMNAEYTFDEEAFKEISIEAMDFVDRLLVKERKSRMTASEALQHPWLKQKIERVSTKVIRTLKHRRYYHTLIKKDLNMVVSAARISCGGAIRSQKGVSVAKVKVASIEIGPVSGQIMHAVGEEGGHVKYVCKIENYDQSTQVTWYFGVRQLENSEKYEITYEDGVAILYVKDITKLDDGTYRCKVVNDYGEDSSYAELFVKGVREVYDYYCRRTMKKIKRRTDTMRLLERPPEFTLPLYNKTAYVGENVRFGVTITVHPEPHVTWYKSGQKIKPGDNDKKYTFESDKGLYQLTINSVTTDDDAEYTVVARNKYGEDSCKAKLTVTLHPPPTDSTLRPMFKRLLANAECQEGQSVCFEIRVSGIPPPTLKWEKDGQPLSLGPNIEIIHEGLDYYALHIRDTLPEDTGYYRVTATNTAGSTSCQAHLQVERLRYKKQEFKSKEEHERHVQKQIDKTLRMAEILSGTESVPLTQVAKEALREAAVLYKPAVSTKTVKGEFRLEIEEKKEERKLRMPYDVPEPRKYKQTTIEEDQRIKQFVPMSDMKWYKKIRDQYEMPGKLDRVVQKRPKRIRLSRWEQFYVMPLPRITDQYRPKWRIPKLSQDDLEIVRPARRRTPSPDYDFYYRPRRRSLGDISDEELLLPIDDYLAMKRTEEERLRLEEELELGFSASPPSRSPPHFELSSLRYSSPQAHVKVEETRKDFRYSTYHIPTKAEASTSYAELRERHAQAAYRQPKQRQRIMAEREDEELLRPVTTTQHLSEYKSELDFMSKEEKSRKKSRRQREVTEITEIEEEYEISKHAQRESSSSASRLLRRRRSLSPTYIELMRPVSELIRSRPQPAEEYEDDTERRSPTPERTRPRSPSPVSSERSLSRFERSARFDIFSRYESMKAALKTQKTSERKYEVLSQQPFTLDHAPRITLRMRSHRVPCGQNTRFILNVQSKPTAEVKWYHNGVELQESSKIHYTNTSGVLTLEILDCHTDDSGTYRAVCTNYKGEASDYATLDVTGGDYTTYASQRRDEEVPRSVFPELTRTEAYAVSSFKKTSEMEASSSVREVKSQMTETRESLSSYEHSASAEMKSAALEEKSLEEKSTTRKIKTTLAARILTKPRSMTVYEGESARFSCDTDGEPVPTVTWLRKGQVLSTSARHQVTTTKYKSTFEISSVQASDEGNYSVVVENSEGKQEAEFTLTIQKARVTEKAVTSPPRVKSPEPRVKSPEAVKSPKRVKSPEPSHPKAVSPTETKPTPTEKVQHLPVSAPPKITQFLKAEASKEIAKLTCVVESSVLRAKEVTWYKDGKKLKENGHFQFHYSADGTYELKINNLTESDQGEYVCEISGEGGTSKTNLQFMGQAFKSIHEKVSKISETKKSDQKTTESTVTRKTEPKAPEPISSKPVIVTGLQDTTVSSDSVAKFAVKATGEPRPTAIWTKDGKAITQGGKYKLSEDKGGFFLEIHKTDTSDSGLYTCTVKNSAGSVSSSCKLTIKAIKDTEAQKVSTQKTSEITPQKKAVVQEEISQKALRSEEIKMSEAKSQEKLALKEEASKVLISEEVKKSAATSLEKSIVHEEITKTSQASEEVRTHAEIKAFSTQMSINEGQRLVLKANIAGATDVKWVLNGVELTNSEEYRYGVSGSDQTLTIKQASHRDEGILTCISKTKEGIVKCQYDLTLSKELSDAPAFISQPRSQNINEGQNVLFTCEISGEPSPEIEWFKNNLPISISSNVSISRSRNVYSLEIRNASVSDSGKYTIKAKNFRGQCSATASLMVLPLVEEPSREVVLRTSGDTSLQGSFSSQSVQMSASKQEASFSSFSSSSASSMTEMKFASMSAQSMSSMQESFVEMSSSSFMGISNMTQLESSTSKMLKAGIRGIPPKIEALPSDISIDEGKVLTVACAFTGEPTPEVTWSCGGRKIHSQEQGRFHIENTDDLTTLIIMDVQKQDGGLYTLSLGNEFGSDSATVNIHIRSI

SEQ ID NO: 6299 - protein, 1452 aa, Homo sapiens
MPSSSDTALGGGGGLSWAEKKLEERRKRRRFLSPQQPPLLLPLLQPQLLQPPPPPPPLLFLAAPGTAAAAAAAAAASSSCFSPGPPLEVKRLARGKRRAGGRQKRRRGPRAGQEAEKRRVFSLPQPQQDGGGGASSGGGVTPLVEYEDVSSQSEQGLLLGGASAATAATAAGGTGGSGGSPASSSGTQRRGEGSERRPRRDRRSSSGRSKERHREHRRRDGQRGGSEASKSRSRHSHSGEERAEVAKSGSSSSSGGRRKSASATSSSSSSRKDRDSKAHRSRTKSSKEPPSAYKEPPKAYREDKTEPKAYRRRRSLSPLGGRDDSPVSHRASQSLRSRKSPSPAGGGSSPYSRRLPRSPSPYSRRRSPSYSRHSSYERGGDVSPSPYSSSSWRRSRSPYSPVLRRSGKSRSRSPYSSRHSRSRSRHRLSRSRSRHSSISPSTLTLKSSLAAELNKNKKARAAEAARAAEAAKAAEATKAAEAAAKAAKASNTSTPTKGNTETSASASQTNHVKDVKKIKIEHAPSPSSGGTLKNDKAKTKPPLQVTKVENNLIVDKATKKAVIVGKESKSAATKEESVSLKEKTKPLTPSIGAKEKEQHVALVTSTLPPLPLPPMLPEDKEADSLRGNISVKAVKKEVEKKLRCLLADLPLPPELPGGDDLSKSPEEKKTATQLHSKRRPKICGPRYGETKEKDIDWGKRCVDKFDIIGIIGEGTYGQVYKARDKDTGEMVALKKVRLDNEKEGFPITAIREIKILRQLTHQSIINMKEIVTDKEDALDFKKDKGAFYLVFEYMDHDLMGLLESGLVHFNENHIKSFMRQLMEGLDYCHKKNFLHRDIKCSNILLNNRGQIKLADFGLARLYSSEESRPYTNKVITLWYRPPELLLGEERYTPAIDVWSCGCILGELFTKKPIFQANQELAQLELISRICGSPCPAVWPDVIKLPYFNTMKPKKQYRRKLREEFVFIPAAALDLFDYMLALDPSKRCTAEQALQCEFLRDVEPSKMPPPDLPLWQDCHELWSKKRRRQKQMGMTDDVSTIKAPRKDLSLGLDDSRTNTPQGVLPSSQLKSQGSSNVAPGEKQTDPSTPQQESSKPLGGIQPSSQTIQPKVETDAAQAAVQSAFAVLLTQLIKAQQSKQKDVLLEERENGSGHEASLQLRPPPEPSTPVSGQDDLIQHQDMRILELTPEPDRPRILPPDQRPPEPPEPPPVTEEDLDYRTENQHVPTTSSSLTDPHAGVKAALLQLLAQHQPQDDPKREGGIDYQAGDTYVSTSDYKDNFGSSSFSSAPYVSNDGLGSSSAPPLERRSFIGNSDIQSLDNYSTASSHSGGPPQPSAFSESFPSSVAGYGDIYLNAGPMLFSGDKDHRFEYSHGPIAVLANSSDPSTGPESTHPLPAKMHNYNYGGNLQENPSGPSLMHGQTWTSPAQGPGYSQGYRGHISTSTGRGRGRGLPY

SEQ ID NO: 6300 - protein, 369 aa, Homo sapiens
MLWEETGAAPAPARASDLPYRISSDHLKKEEKMTMMAHQYPSWIFINEKTFITREQLNSLLKTYNIFYENQKNLHILYGETEDGKLIVEGMLDIFWGVKRPIQLKIQDEKPFSSFTSMKSSDVFSSKGMTRWGEFDDLYRISELDRTQIPMSEKRNSQEDYLSYHSNTLKPHAKDEPDSPVLYRTMSEAALVRKRMKPLMMDRKERQKNRASINGHFYNHETSIFIPAFESETKVRVNSNMRTEEVIKQLLQKFKIENSPQDFALHIIFATGEQRRLKKTDIPLLQRLLQGPSEKNARIFLMDKDAEEISSDVAQYINFHFSLLESILQRLNEEEKREIQRIVTKFNKEKAIILKCLQNKLVIKTETTV

SEQ ID NO: 6301 - protein, 1319 aa, Homo sapiens
MKVTVCFGRTRVVVPCGDGHMKVFSLIQQAVTRYRKAIAKDPNYWIQVHRLEHGDGGILDLDDILCDVADDKDRLVAVFDEQDPHHGGDGTSASSTGTQSPEIFGSELGTNNVSAFQPYQATSEIEVTPSVLRANMPLHVRRSSDPALIGLSTSVSDSNFSSEEPSRKNPTRWSTTAGFLKQNTAGSPKTCDRKKDENYRSLPRDTSNWSNQFQRDNARSSLSASHPMVGKWLEKQEQDEDGTEEDNSRVEPVGHADTGLEHIPNFSLDDMVKLVEVPNDGGPLGIHVVPFSARGGRTLGLLVKRLEKGGKAEHENLFRENDCIVRINDGDLRNRRFEQAQHMFRQAMRTPIIWFHVVPAANKEQYEQLSQSEKNNYYSSRFSPDSQYIDNRSVNSAGLHTVQRAPRLNHPPEQIDSHSRLPHSAHPSGKPPSAPASAPQNVFSTTVSSGYNTKKIGKRLNIQLKKGTEGLGFSITSRDVTIGGSAPIYVKNILPRGAAIQDGRLKAGDRLIEVNGVDLVGKSQEEVVSLLRSTKMEGTVSLLVFRQEDAFHPRELNAEPSQMQIPKETKAEDEDIVLTPDGTREFLTFEVPLNDSGSAGLGVSVKGNRSKENHADLGIFVKSIINGGAASKDGRLRVNDQLIAVNGESLLGKTNQDAMETLRRSMSTEGNKRGMIQLIVARRISKCNELKSPGSPPGPELPIETALDDRERRISHSLYSGIEGLDESPSRNAALSRIMGESGKYQLSPTVNMPQDDTVIIEDDRLPVLPPHLSDQSSSSSHDDVGFVTADAGTWAKAAISDSADCSLSPDVDPVLAFQREGFGRQSMSEKRTKQFSDASQLDFVKTRKSKSMDLGIADETKLNTVDDQKAGSPSRDVGPSLGLKKSSSLESLQTAVAEVTLNGDIPFHRPRPRIIRGRGCNESFRAAIDKSYDKPAVDDDDEGMETLEEDTEESSRSGRESVSTASDQPSHSLERQMNGNQEKGDKTDRKKDKTGKEKKKDRDKEKDKMKAKKGMLKGLGDMFRIQAKTREFRERQARERDYAEIQDFHRTFGCDDELMYGGVSSYEGSMALNARPQSPREGHMMDALYAQVKKPRNSKPSPVDSNRSTPSNHDRIQRLRQEFQQAKQDEDVEDRRRTYSFEQPWPNARPATQSGRHSVSVEVQMQRQRQEERESSQQAQRQYSSLPRQSRKNASSVSQDSWEQNYSPGEGFQSAKENPRYSSYQGSRNGYLGGHGFNARVMLETQELLRQEQRRKEQQMKKQPPSEGPSNYDSYKKVQDPSYAPPKGPFRQDVPPSPSQVARLNRLQTPEKGRPFYS

SEQ ID NO: 6302 - protein, 1194 aa, Homo sapiens
MHDLPPDSGARRGGRGLADHSFPAGARAPGQPPSRGAAYRRACPRDGERGGGGRPRQQVSPPRSPQREPRGGQLRTPRMRPSCSRSLESLRVGAKPPPFQRWPSDSWIRCGAHRDWDEPPPRGGRMDGWSGDRARAAAPTGLQPPGCKDHGCSSGSPFRDPAGSSVIRSGKGDRQEGPSFLRPPAVTVKKLQKWMYKGRLLSLGMKGRARGTAPKVTGTQAASPNVGALKVRENRVLSVPPDQRITLTDLFENAYGSSMKGRELEELKDNIEFRGHKPLNSITVSKKRNWLYQSTLRPLNLEEENKKCQDRSHLSISPVSLPKHQLSQSFLKSSKEYCTYVVCNATNSSLSKNCALDFNEENDADDEGEIWYNPIPEDDDLGISSALSFGEADSAVLKLPAVNLSMLSGSDLMKAERHTEDSLCSSEHAGDIQTTRSNGMNPIHPAHSTEFVQQYKQKLGHKTQEGIMVEDSPMLKSPFAGSGILAATNSTELGIMEPSSPNPSPVKKGSSINWSLPDKIKSPRTVRKLSMKMKKLPEFSRKLSVKGTLNYINSPDNTPSLSKYNCREVHHTDILPSGNTTTAAKRNVISRYHLDTSVSSQQSYQKKNSMSSKYSCKGGYLSDGDSPELTTKASKHGSENKFGKGKEIISNSCSKNEIDIDAFRHYSFSDQPKCSQYISGLMSVHFYGAEDLKPPRIDSKDVFCAIQVDSVNKARTALLTCRTTFLDMDHTFNIEIENAQHLKLVVFSWEPTPRKNRVCCHGTVVLPTLFRVTKTHQLAVKLEPRGLIYVKVTLMEQWENSLHGLDINQEPIIFGVDIQKVVEKENIGLMVPLLIQKCIMEIEKRGCQVVGLYRLCGSAAVKKELREAFERDSKAVGLCENQYPDINVITGVLKDYLRELPSPLITKQLYEAVLDAMAKSPLKMSSNGCENDPGDSKYTVDLLDCLPEIEKATLKMLLDHLKLVASYHEVNKMTCQNLAVCFGPVLLSQRQEPSTHNNRVFTDSEELASALDFKKHIEVLHYLLQLWPVQRLTVKKSTDNLFPEQKSSLNYLRQKKERPHMLNLSGTDSSGVLRPRQNRLDSPLSNRYAGDWSSCGENYFLNTKENLNDVDYDDVPSEDRKIGENYSKMDGPEVMIEQPIPMSKECTFQTYLTMQTVESTVDRKNNLKDLQESIDTLIGNLERELNKNKLNMSF

SEQ ID NO: 6303 - protein, 1068 aa, Homo sapiens
MFTLSQTSRAWFIDRARQAREERLVQKERERAAVVIQAHVRSFLCRSRLQRDIRREIDDFFKADDPESTKRSALCIFKIARKLLFLFRIKEDNERFEKLCRSILSSMDAENEPKVWYVSLACSKDLTLLWIQQIKNILWYCCDFLKQLKPEILQDSRLITLYLTMLVTFTDTSTWKILRGKGESLRPAMNHICANIMGHLNQHGFYSVLQILLTRGLARPRPCLSKGTLTAAFSLALRPVIAAQFSDNLIRPFLIHIMSVPALVTHLSTVTPERLTVLESHDMLRKFIIFLRDQDRCRDVCESLEGCHTLCLMGNLLHLGSLSPRVLEEETDGFVSLLTQTLCYCRKYVSQKKSNLTHWHPVLGWFSQSVDYGLNESMHLITKQLQFLWGVPLIRIFFCDILSKKLLESQEPAHAQPASPQNVLPVKSLLKRAFQKSASVRNILRPVGGKRVDSAEVQKVCNICVLYQTSLTTLTQIRLQILTGLTYLDDLLPKLWAFICELGPHGGLKLFLECLNNDTEESKQLLAMLMLFCDCSRHLITILDDIEVYEEQISFKLEELVTISSFLNSFVFKMIWDGIVENAKGETLELFQSVHGWLMVLYERDCRRRFTPEDHWLRKDLKPSVLFQELDRDRKRAQLILQYIPHVIPHKNRVLLFRTMVTKEKEKLGLVETSSASPHVTHITIRRSRMLEDGYEQLRQLSQHAMKGVIRVKFVNDLGVDEAGIDQDGVFKEFLEEIIKRVFDPALNLFKTTSGDERLYPSPTSYIHENYLQLFEFVGKMLGKAVYEGIVVDVPFASFFLSQLLGHHHSVFYSSVDELPSLDSEFYKNLTSIKRYDGDITDLGLTLSYDEDVMGQLVCHELIPGGKTIPVTNENKISYIHLMAHFRMHTQIKNQTAALISGFRSIIKPEWIRMFSTPELQRLISGDNAEIDLEDLKKHTVYYGGFHGSHRVIIWLWDILASDFTPDERAMFLKFVTSCSRPPLLGFAYLKPPFSIRCVEVSDDQDTGDTLGSVLRGFFTIRKREPGGRLPTSSTCFNLLKLPNYSKKSVLREKLRYAISMNTGFELS

SEQ ID NO: 6304 - protein, 427 aa, Homo sapiens
MQGLLTSGRKPSGGGRCTGRGGWRGQWCLKPWMGGADPPTPTLSCLLLPVPPELPDHCYRMNSSPAGTPSPQPSRANGNINLGPSANPNAQPTDFDFLKVIGKGNYGKVLLAKRKSDGAFYAVKVLQKKSILKKKEQSHIMAERSVLLKNVRHPFLVGLRYSFQTPEKLYFVLDYVNGGELFFHLQRERRFLEPRARFYAAEVASAIGYLHSLNIIYRDLKPENILLDCQGHVVLTDFGLCKEGVEPEDTTSTFCGTPEYLAPEVLRKEPYDRAVDWWCLGAVLYEMLHGLPPFYSQDVSQMYENILHQPLQIPGGRTVAACDLLQSLLHKDQRQRLGSKADFLEIKNHVFFSPINWDDLYHKRLTPPFNPNVTGPADLKHFDPEFTQEAVSKSIGCTPDTVASSSGASSAFLGFSYAPEDDDILDC

SEQ ID NO: 6305 - protein, 220 aa, Homo sapiens
MTSGEVKTSLKNAYSSAKRLSPKMEEEGEEEDYCTPGAFELERLFWKGSPQYTHVNEVWPKLYIGDEATALDRYRLQKAGFTHVLNAAHGRWNVDTGPDYYRDMDIQYHGVEADDLPTFDLSVFFYPAAAFIDRALSDDHSKILVHCVMGRSRSATLVLAYLMIHKDMTLVDAIQQVAKNRCVLPNRGFLKQLRELDKQLVQQRRRSQRQDGEEEDGREL

SEQ ID NO: 6306 - protein, 601 aa, Homo sapiens
MWLFFGITGLLTAALSGHPSPAPPDQLNTSSAESELWEPGERLPVRLTNGSSSCSGTVEVRLEASWEPACGALWDSRAAEAVCRALGCGGAEAASQLAPPTPELPPPPAAGNTSVAANATLAGAPALLCSGAEWRLCEVVEHACRSDGRRARVTCAENRALRLVDGGGACAGRVEMLEHGEWGSVCDDTWDLEDAHVVCRQLGCGWAVQALPGLHFTPGRGPIHRDQVNCSGAEAYLWDCPGLPGQHYCGHKEDAGAVCSEHQSWRLTGGADRCEGQVEVHFRGVWNTVCDSEWYPSEAKVLCQSLGCGTAVERPKGLPHSLSGRMYYSCNGEELTLSNCSWRFNNSNLCSQSLAARVLCSASRSLHNLSTPEVPASVQTVTIESSVTVKIENKESRELMLLIPSIVLGILLLGSLIFIAFILLRIKGKYVFMLPIQVQAPPPEDSDSGSDSDYEHYDFSAQPPVALTTFYNSQRHRVTDEEVQQSRFQMPPLEEGLEELHASHIPTANPGHCITDPPSLGPQYHPRSNSESSTSSGEDYCNSPKSKLPPWNPQVFSSERSSFLEQPPNLELAGTQPAFSGSPSPQPDSTDNDDYDDISAA

SEQ ID NO: 6307 - protein, 325 aa, Homo sapiens
AALPLLGELPRLLLLVLLCLPAVWESSRVEHTMLQTCMSSLSGDCGLPPDVPNAQPALEGRTSFPEDTVITYKCEESFVKIPGEKDSVICLKGSQWSDIEEFCNRSCEVPTRLNSASLKQPYITQNYFPVGTVVEYECRPGYRREPSLSPKLTCLQNLKWSTAVEFCKKKSCPNPGEIRNGQIDVPGGILFGATISFSCNTGYKLFGSTSSFCLISGSSVQWSDPLPECREIYCPAPPQIDNGIIQGERDHYGYRQSVTYACNKGFTMIGEHSIYCTVNNDEGEWSGPPPECRGKSLTSKVPPTVQKPTTVNVPTTEVSPTSQKT

SEQ ID NO: 6308 - protein, 799 aa, Homo sapiens
MKPMLKDFSNLLLVVLCDYVLGEAEYLLLREPGHVALSNDTVYVDFQYFDGANGTLRNVSVLLLEANTNQTVTTKYLLTNQSQGTLKFECFYFKEAGDYWFTMTPEATDNSTPFPWWEKSAFLKVEWPVFHVDLNRSAKAAEGTFQVGLFTSQPLCPFPVDKPNIVVDVIFTNSLPEARRNSRQPLEIRTSKRTELAQGQWVEFGCAPLGPEAYVTVVLKLLGRDSVITSTGPIDLAQKFGYKLVMVPELTCESGVEVTVLPPPCTFVQGVVTVFKEAPRYPGKRTIHLAENSLPLGERRTIFNCTLFDMGKNKYCFDFGISSRSHFSAKEECMLIQRNTAFQPSSPSPLQPQGPVKSNNIVTVTGISLCLFIIIATVLITLWRRFGRPAKCSTPARHNSIHSPSFRKNSDEENICELSEQRGSFSDGGDGPTGSPGDTGIPLTYRRSGPVPPEDDASGSESFQSNAQKIIPPLFSYRLAQQQLKEMKKKGLTETTKVYHVSQSPLTDTAIDAAPSAPLDLESPEEAAANKFRIKSPFPEQPAVSAGERPPSRLDLNVTQASCAISPSQTLIRKSQARHVGSRGGPSERSHARNAHFRRTASFHEARQARPFRERSMSTLTPRQAPAYSSRTRTCEQAEDRFRPQSRGAHLFPEKLEHFQEASGTRGPLNPLPKSYTLGQPLRKPDLGDHQAGLVAGIERTEPHRARRGPSPSHKSVSRKQSSPISPKDNYQRVSSLSPSQCRKDKCQSFPTHPEFAFYDNTSFGLTEAEQRMLDLPGYFGSNEEDETTSTLSVEKLVI

SEQ ID NO: 6309 - protein, 379 aa, Homo sapiens
MGYARKVGWVTAGLVIGAGACYCIYRLTRGRKQNKEKMAEGGSGDVDDAGDCSGARYNDWSDDDDDSNESKSIVWYPPWARIGTEAGTRARARARARATRARRAVQKRASPNSDDTVLSPQELQKVLCLVEMSEKPYILEAALIALGNNAAYAFNRDIIRDLGGLPIVAKILNTRDPIVKEKALIVLNNLSVNAENQRRLKVYMNQVCDDTITSRLNSSVQLAGLRLLTNMTVTNEYQHMLANSISDFFRLFSAGNEETKLQVLKLLLNLAENPAMTRELLRAQVPSSLGSLFNKKENKEVILKLLVIFENINDNFKWEENEPTQNQFGEGSLFFFLKEFQVCADKVLGIESHHDFLVKVKVGKFMAKLAEHMFPKSQE

SEQ ID NO: 6310 - protein, 610 aa, Homo sapiens
MDSVAFEDVAVNFTQEEWALLGPSQKSLYRNVMQETIRNLDCIEMKWEDQNIGDQCQNAKRNLRSHTCEIKDDSQCGETFGQIPDSIVNKNTPRVNPCDSGECGEVVLGHSSLNCNIRVDTGHKSCEHQEYGEKPYTHKQRGKAISHQHSFQTHERPPTGKKPFDCKECAKTFSSLGNLRRHMAAHHGDGPYKCKLCGKAFVWPSLFHLHERTHTGEKPYECKQCSKAFPFYSSYLRHERIHTGEKAYECKQCSKAFPDYSTYLRHERTHTGEKPYKCTQCGKAFSCYYYTRLHERTHTGEQPYACKQCGKTFYHHTSFRRHMIRHTGDGPHKCKICGKGFDCPSSVRNHETTHTGEKPYECKQCGKVLSHSSSFRSHMITHTGDGPQKCKICGKAFGCPSLFQRHERTHTGEKPYQCKQCGKAFSLAGSLRRHEATHTGVKPYKCQCGKAFSDLSSFQNHETTHTGEKPYECKECGKAFSCFKYLSQHKRTHTVEKPYECKTCRKAFSHFSNLKVHERIHSGEKPYECKECGKAFSWLTCLLRHERIHTGEKPYECLQCGKAFTRSRFLRGHEKTHTGEKLYECKECGKALSSLRSLHRHKRTHWKDTL

SEQ ID NO: 6311 - protein, 1474 aa, Homo sapiens
MARLAAVLWNLCVTAVLVTSATQGLSRAGLPFGLMRRELACEGYPIELRCPGSDVIMVENANYGRTDDKICDADPFQMENVQCYLPDAFKIMSQRCNNRTQCVVVAGSDAFPDPCPGTYKYLEVQYDCVPYKVEQKVFVCPGTLQKVLEPTSTHESEHQSGAWCKDPLQAGDRIYVMPWIPYRTDTLTEYASWEDYVAARHTTTYRLPNRVDGTGFVVYDGAVFYNKERTRNIVKYDLRTRIKSGETVINTANYHDTSPYRWGGKTDIDLAVDENGLWVIYATEGNNGRLVVSQLNPYTLRFEGTWETGYDKRSASNAFMVCGVLYVLRSVYVDDDSEAAGNRVDYAFNTNANREEPVSLTFPNPYQFISSVDYNPRDNQLYVWNNYFVVRYSLEFGPPDPSAGPATSPPLSTTTTARPTPLTSTASPAATTPLRRAPLTTHPVGAINQLGPDLPPATAPVPSTRRPPAPNLHVSPELFCEPREVRRVQWPATQQGMLVERPCPKGTRGIASFQCLPALGLWNPRGPDLSNCTSPWVNQVAQKIKSGENAANIASELARHTRGSIYAGDVSSSVKLMEQLLDILDAQLQALRPIERESAGKNYNKMHKRERTCKDYIKAVVETVDNLLRPEALESWKDMNATEQVHTATMLLDVLEEGAFLLADNVREPARFLAAKENVVLEVTVLNTEGQVQELVFPQEEYPRKNSIQLSAKTIKQNSRNGVVKVVFILYNNLGLFLSTENATVKLAGEAGPGGPGGASLVVNSQVIAASINKESSRVFLMDPVIFTVAHLEDKNHFNANCSFWNYSERSMLGYWSTQGCRLVESNKTHTTCACSHLTNFAVLMAHREIYQGRINELLLSVITWVGIVISLVCLAICISTFCFLRGLQTDRNTIHKNLCINLFLAELLFLVGIDKTQYEIACPIFAGLLHYFFLAAFSWLCLEGVHLYLLLVEVFESEYSRTKYYYLGGYCFPALVVGIAAAIDYRSYGTEKACWLRVDNYFIWSFIGPVSFVIVVNLVFLMVTLHKMIRSSSVLKPDSSRLDNIKSWALGAIALLFLLGLTWAFGLLFINKESVVMAYLFTTFNAFQGVFIFVFHCALQKKVHKEYSKCLRHSYCCIRSPPGGTHGSLKTSAMRSNTRYYTGTQSRIRRMWNDTVRKQTESSFMAGDINSTPTLNRGTMGNHLLTNPVLQPRGGTSPYNTLIAESVGFNPSSPPVFNSPGSYREPKHPLGGREACGMDTLPLNGNFNNSYSLRSGDFPPGDGGPEPPRGRNLADAAAFEKMIISELVHNNLRGSSSAAKGPPPPEPPVPPVPGGGGEEEAGGPGGADRAEIELLYKALEEPLLLPRAQSVLYQSDLDESESCTAEDGATSRPLSSPPGRDSLYASGANLRDSPSYPDSSPEGPSEALPPPPPAPPGPPEIYYTSRPPALVARNPLQGYYQVRRPSHEGYLAAPGLEGPGPDGDGQMQLVTSL

SEQ ID NO: 6312 - protein, 598 aa, Homo sapiens
MMRLRGSGMLRDLLLRSPAGVSATLRRAQPLVTLCRRPRGGGRPAAGPAAAARLHPWWGGGGWPAEPLARGLSSSPSEILQELGKGSTHPQPGVSPPAAPAAPGPKDGPGETDAFGNSEGKELVASGENKIKQGLLPSLEDLLFYTIAEGQEKIPVHKFITALKSTGLRTSDPRLKECMDMLRLTLQTTSDGVMLDKDLFKKCVQSNIVLLTQAFRRKFVIPDFMSFTSHIDELYESAKKQSGGKVADYIPQLAKFSPDLWGVSVCTVDGQRHSTGDTKVPFCLQSCVKPLKYAIAVNDLGTEYVHRYVGKEPSGLRFNKLFLNEDDKPHNPMVNAGAIVVTSLIKQGVNNAEKFDYVMQFLNKMAGNEYVGFSNATFQSERESGDRNFAIGYYLKEKKCFPEGTDMVGILDFYFQLCSIEVTCESASVMAATLANGGFCPITGERVLSPEAVRNTLSLMHSCGMYDFSGQFAFHVGLPAKSGVAGGILLVVPNVMGMMCWSPPLDKMGNSVKGIHFCHDLVSLCNFHNYDNLRHFAKKLDPRREGGDQRHSFGPLDYESLQQELALKETVWKKVSPESNEDISTTVVYRMESLGEKS

SEQ ID NO: 6313 - protein, 453 aa, Homo sapiens
MRIPVDASTSRRFTPPSTALSPGKMSEALPLGAPDAGAALAGKLRSGDRSMVEVLADHPGELVRTDSPNFLCSVLPTHWRCNKTLPIAFKVVALGDVPDGTLVTVMAGNDENYSAELRNATAAMKNQVARFNDLRFVGRSGRGKSFTLTITVFTNPPQVATYHRAIKITVDGPREPRRHRQKLDDQTKPGSLSFSERLSELEQLRRTAMRVSPHHPAPTPNPRASLNHSTAFNPQPQSQMQDTRQIQPSPPWSYDQSYQYLGSIASPSVHPATPISPGRASGMTTLSAELSSRLSTAPDLTAFSDPRQFPALPSISDPRMHYPGAFTYSPTPVTSGIGIGMSAMGSATRYHTYLPPPYPGSSQAQGGPFQASSPSYHLYYGASAGSYQFSMVGGERSPPRILPPCTNASTGSALLNPSLPNQSDVVEAEGSHSNSPTNMAPSARLEEAVWRPY

SEQ ID NO: 6314 - protein, 684 aa, Homo sapiens
MAEGEDVPPLPTSSGDGWEKDLEEALEAGGCDLETLRNIIQGRPLPADLRAKVWKIALNVAGKGDSLASWDGILDLPEQNTIHKDCLQFIDQLSVPEEKAAELLLDIESVITFYCKSRNIKYSTSLSWIHLLKPLVHLQLPRSDLYNCFYAIMNKYIPRDCSQKGRPFHLFRLLIQYHEPELCSYLDTKKITPDSYALNWLGSLFACYCSTEVTQAIWDGYLQQADPFFIYFLMLIILVNAKEVILTQESDSKEEVIKFLENTPSSLNIEDIEDLFSLAQYYCSKTPASFRKDNHHLFGSTLLGIKDDDADLSQALCLAISVSEILQANQLQGEGVRFFVVDCRPAEQYNAGHLSTAFHLDSDLMLQNPSEFAQSVKSLLEAQKQSIESGSIAGGEHLCFMGSGREEEDMYMNMVLAHFLQKNKEYVSIASGGFMALQQHLADINVDGPENGYGHWIASTSGSRSSINSVDGESPNGSSDRGMKSLVNKMTVALKTKSVNVREKVISFIENTSTPVDRHVSSSDRVGKPYRGVKPVFSIGDEEEYDTDEIDSSSMSDDDRKEVVNIQTWINKPDVKHHFPCKEVKESGHMFPSHLLVTATHMYCLREIVSRKGLAYIQSRQALNSVVKITSKKKHPELITFKYGNSSASGIEILAIERYLIPNAGDATKAIKQQIMKVLDALES

SEQ ID NO: 6315 - protein, 333 aa, Homo sapiens
MPLGLGRRKKAPPLVENEEAEPGRGGLGVGEPGPLGGGGSGGPQMGLPPPPPALRPRLVFHTQLAHGSPTGRIEGFTNVKELYGKIAEAFRLPTAEVMFCTLNTHKVDMDKLLGGQIGLEDFIFAHVKGQRKEVEVFKSEDALGLTITDNGAGYAFIKRIKEGSVIDHIHLISVGDMIEAINGQSLLGCRHYEVARLLKELPRGRTFTLKLTEPRKAFDMISQRSAGGRPGSGPQLGTGRGTLRLRSRGPATVEDLPSAFEEKAIEKVDDLLESYMGIRDTELAATMVELGKDKRNPDELAEALDERLGDFAFPDEFVFDVWGAIGDAKVGRY

SEQ ID NO: 6316 - protein, 686 aa, Homo sapiens
MSLRDKGGEEECFEYDCQDEERKPTHRQHDTQDLLEEVLCAERVGQMTKTYNDIDAVTRLLEEKERDLELAARIGQSLLKKNKTLTERNELLEEQVEHIREEVSQLRHELSMKDELLQFYTSAAEESEPESVCSTPLKRNESSSSVQNYFHLDSLQKKLKDLEEENVVLRSEASQLKTETITYEEKEQQLVNDCVKELRDANVQIASISEELAKKTEDAARQQEEITHLLSQIVDLQKKAKACAVENEELVQHLGAAKDAQRQLTAELRELEDKYAECMEMLHEAQEELKNLRNKTMPNTTSRRYHSLGLFPMDSLAAEIEGTMRKELQLEEAESPDITHQKRVFETVRNINQVVKQRSLTPSPMNIPGSNQSSAMNSLLSSCVSTPRSSFYGSDIGNVVLDNKTNSIILETEAADLGNDERSKKPGTPGTPGSHDLETALRRLSLRRENYLSERRFFEEEQERKLQELAEKGELRSGSLTPTESIMSLGTHSRFSEFTGFSGMSFSSRSYLPEKLQIVKPLEGSATLHHWQQLAQPHLGGILDPRPGVVTKGFRTLDVDLDEVYCLNDFEEDDTGDHISLPRLATSTPVQHPETSGERSQARVTVSGSRSYPSRPQASPEEMQEPPAATEEEEEEEEEEGSGEGTTISPVNLAPFPEAEFWAILTSVPGTIRSGSLSVASARLCG

SEQ ID NO: 6317 - protein, 277 aa, Homo sapiens
QKNWLREFYQVVHTHKPHFMALHCQEFGGKNYEASMSHVDKFVKELLSSDAMKEYNRARVYLDENYKSQEHFTALGSFYFLHESLKNIYQFDFKAKKYRKVAGKEIYSDTLESTPMLEKEKFPQDYFPECKWSRKGFIRTRWCIADCAFDLVNIHLFHDASNLVAWETSPSVYSGIRHKALGYVLDRIIDQRFEKVSYFVFGDFNFRLDSKSVVELLEFDKELSVFKDRLYELDISFPPSYPYSEDARQGEQYMNTRCPAWCDRILMSPSAKELVLR

SEQ ID NO: 6318 - protein, 2109 aa, Homo sapiens
MAERRAFAQKISRTVAAEVRKQISGQYSGSPQLLKNLNIVGNISHHTTVPLTEAVDPVDLEDYLITHPLAVDSGPLRDLIEFPPDDIEVVYSPRDCRTLVSAVPEESEMDPHVRDCIRSYTEDWAIVIRKYHKLGTGFNPNTLDKQKERQKGLPKQVFESDEAPDGNSYQDDQDDLKRRSMSIDDTPRGSWACSIFDLKNSLPDALLPNLLDRTPNEEIDRQNDDQRKSNRHKELFALHPSPDEEEPIERLSVPDIPKEHFGQRLLVKCLSLKFEIEIEPIFASLALYDVKEKKKISENFYFDLNSEQMKGLLRPHVPPAAITTLARSAIFSITYPSQDVFLVIKLEKVLQQGDIGECAEPYMIFKEADATKNKEKLEKLKSQADQFCQRLGKYRMPFAWTAIHLMNIVSSAGSLERDSTEVEISTGERKGSWSERRNSSIVGRRSLERTTSGDDACNLTSFRPATLTVTNFFKQEGDRLSDEDLYKFLADMRRPSSVLRRLRPITAQLKIDISPAPENPHYCLTPELLQVKLYPDSRVRPTREILEFPARDVYVPNTTYRNLLYIYPQSLNFANRQGSARNITVKVQFMYGEDPSNAMPVIFGKSSCSEFSKEAYTAVVYHNRSPDFHEEIKVKLPATLTDHHHLLFTFYHVSCQQKQNTPLETPVGYTWIPMLQNGRLKTGQFCLPVSLEKPPQAYSVLSPEVPLPGMKWVDNHKGVFNVEVVAVSSIHTQDPYLDKFFALVNALDEHLFPVRIGDMRIMENNLENELKSSISALNSSQLEPVVRFLHLLLDKLILLVIRPPVIAGQIVNLGQASFEAMASIINRLHKNLEGNHDQHGRNSLLASYIHYVFRLPNTYPNSSSPGPGGLGGSVHYATMARSAVRPASLNLNRSRSLSNSNPDISGTPTSPDDEVRSIIGSKAMDRSCNRMSSHTETSSFLQTLTGRLPTKKLFHEELALQWVVCSGSVRESALQQAWFFFELMVKSMVHHLYFNDKLEAPRKSRFPERFMDDIAALVSTIASDIVSRFQKDTEMVERLNTSLAFFLNDLLSVMDRGFVFSLIKSCYKQVSSKLYSLPNPSVLVSLRLDFLRIICSHEHYVTLNLPCSLLTPPASPSPSVSSATSQSSGFSTNVQDQKIANMFELSVPFRQQHYLAGLVLTELAVILDPDAEGLFGLHKKVINMVHNLLSSHDSDPRYSDPQIKARVAMLYLPLIGIIMETVPQLYDFTETHNQRGRPICIATDDYESESGSMISQTVAMAIAGTSVPQLTRPGSFLLTSTSGRQHTTFSAESSRSLLICLLWVLKNADETVLQKWFTDLSVLQLNRLLDLLYLCVSCFEYKGKKVFERMNSLTFKKSKDMRAKLEEAILGSIGARQEMVRRSRGQLGTYTIASPPERSPSGSAFGSQENLRWRKDMTHWRQNTEKLDKSRAEIEHEALIDGNLATEANLIILDTLEIVVQTVSVTESKESILGGVLKVLLHSMACNQSAVYLQHCFATQRALVSKFPELLFEEETEQCADLCLRLLRHCSSSIGTIRSHASASLYLLMRQNFEIGNNFARVKMQVTMSLSSLVGTSQNFNEEFLRRSLKTILTYAEEDLELRETTFPDQVQDLVFNLHMILSDTVKMKEHQEDPEMLIDLMYRIAKGYQTSPDLRLTWLQNMAGKHSERSNHAEAAQCLVHSAALVAEYLSMLEDRKYLPVGCVTFQNISSNVLEESAVSDDVVSPDEEGICSGKYFTESGLVGLLEQAAASFSMAGMYEAVNEVYKVLIPIHEANRDAKKLSTIHGKLQEAFSKIVHQSTGWERMFGTYFRVGFYGTKFGDLDEQEFVYKEPAITKLAEISHRLEGFYGERFGEDVVEVIKDSNPVDKCKLDPNKAYIQITYVEPYFDTYEMKDRITYFDKNYNLRRFMYCTPFTLDGRAHGELHEQFKRKTILTTSHAFPYIKTRVNVTHKEEIILTPIEVAIEDMQKKTQELAFATHQDPADPKMLQMVLQGSVGTTVNQGPLEVAQVFLSEIPSDPKLFRHHNKLRLCFKDFTKRCEDALRKNKSLIGPDQKEYQRELERNYHRLKEALQPLINRKIPQLYKAVLPVTCHRDSFSRMSLRKMDL

SEQ ID NO: 6319 - protein, 289 aa, Homo sapiens
MSGHPGSWEMNSVAFEDVAVNFTQEEWALLDPSQKNLYRDVMQETFRNLASIGNKGEDQSIEDQYKNSSRNLSSFQIHQRNHTGEKPYECMECGKALGFSRSLNRHKRIHTGEKRYECKQCGKAFSRSSHLRDHERTHTGEKPYECKHCGKAFRYSNCLHYHERTHTGEKPYVCMECGKAFSCLSSLQGHIKAHAGEEPYPCKQCGKAFRYASSLQKHEKTHIAQKPYVCNNCGKGFRCSSSLRDHERTHTGEKPYECQKCGKAFSRASTLWKHKKTHTGEKPYKCKKM

SEQ ID NO: 6320 - protein, 777 aa, Homo sapiens
MTFYPFVASSSTRRVDNSNTRLAVQIERDPGNDDNNLNSIFYEHLTRTLQESLCGDLVLGRWGNYSSGDCFILASDDLNAFVHLIEIGNGLVTFQLRGLEFRGTYCQQREVEAIMEGDEEDRGCCCCKPGHLPHLLSCNAAFHLRWLTWEITQTQYILEGYSILDNNAATMLQVFDLRRILIRYYIKSIIYYMVTSPKLLSWIKNESLLKSLQPFAKWHYIERDLAMFNINIDDDYVPCLQGITRASFCNVYLEWIQHCARKRQEPSTTLDSDEDSPLVTLSFALCTLGRRALGTAAHNMAISLDSFLYGLHVLFKGDFRITARDEWVFADMDLLHKVVAPAIRMSLKLHQDQFTCPDEYEDPAVLYEAIQSFEKKVVICHEGDPAWRGAVLSNKEELLTLRHVVDEGADEYKVIMLHRSFLSFKVIKVNKECVRGLWAGQQQELIFLRNRNPERGSIQNNKQVLRNLINSSCDQPLGYPMYVSPLTTSYLGTHRQLKNIWGGPITLDRIRTWFWTKWVRMRKDCNARQHSGGNIEDVDGGGAPTTGGNNAPSGGSQESSAEQPRKGGAQHGVSSCEGTQRTGRRKGRSQSVQAHSALSQRPPMLSSSGPILESRQTFLQTSTSVHELAQRLSGSRLSLHASATSLHSQPPPVTTTGHLSVRERAEALIRSSLGSSTSSTLSFLFGKRSFSSALVISGLSAAEGGNTSDTQSSSSVNIVMGPSARAASQATRVRGWAGLTRTGWDGGTGSWPERGTCLAFPPFCLQNPIPFSMGLPE

SEQ ID NO: 6321 - protein, 1137 aa, Homo sapiens
MSLQSAQYLRQAEVLKADMTDSKLGPAEVWTSRQALQDLYQKMLVTDLEYALDKKVEQDLWNHAFKNQITTLQGQAKNRANPNRSEVQANLSLFLEAASGFYTQLLQELCTVFNVDLPCRVKSSQLGIISNKQTHTSAIVKPQSSSCSYICQHCLVHLGDIARYRNQTSQAESYYRHAAQLVPSNGQPYNQLAILASSKGDHLTTIFYYCRSIAVKFPFPAASTNLQKALSKALESRDEVKTKWGVSDFIKAFIKFHGHVYLSKSLEKLSPLREKLEEQFKRLLFQKAFNSQQLVHVTVINLFQLHHLRDFSNETEQHTYSQDEQLCWTQLLALFMSFLGILCKCPLQNESQEESYNAYPLPAVKVSMDWLRLRPRVFQEAVVDERQYIWPWLISLLNSFHPHEEDLSSISATPLPEEFELQGFLALRPSFRNLDFSKGHQGITGDKEGQQRRIRQQRLISIGKWIADNQPRLIQCENEVGKLLFITEIPELILEDPSEAKENLILQETSVIESLAADGSPGLKSVLSTSRNLSNNCDTGEKPVVTFKENIKTREVNRDQGRSFPPKEVRRDYSKGITVTKNDGKKDNNKRKTETKKCTLEKLQETGKQNVAVQVKSQTELRKTPVSEARKTPVTQTPTQASNSQFIPIHHPGAFPPLPSRPGFPPPTYVIPPPVAFSMGSGYTFPAGVSVPGTFLQPTAHSPAGNQVQAGKQSHIPYSQQRPSGPGPMNQGPQQSQPPSQQPLTSLPAQPTAQSTSQLQVQALTQQQQSPTKAVPALGKSPPHHSGFQQYQQADASKQLWNPPQVQGPLGKIMPVKQPYYLQTQDPIKLFEPSLQPPVMQQQPLEKKMKPFPMEPYNHNPSEVKVPEFYWDSSYSMADNRSVMAQQANIDRRGKRSPGVFRPEQDPVPRMPFEKSLLEKPSELMSHSSSFLSLTGFSLNQERYPNNSMFNEVYGKNLTSSSKAELSPSMAPQETSLYSLFEGTPWSPSLPASSDHSTPASQSPHSSNPSSLPSSPPTHNHNSVPFSNFGPIGTPDNRDRRTADRWKTDKPAMGGFGIDYLSATSSSESSWHQASTPSGTWTGHGPSMEDSSAVLMESLKSIWSSSMMHPGPSALEQLLMQQKQKQQRGQGTMNPPH

SEQ ID NO: 6322 - protein, 1925 aa, Homo sapiens
MFTLTGCRLVEKTQKVENPSVSFASSFPLIPLLLRGKSVQKKQAESKSQIKLHTQSAPFGLCPKDMMLTQAPSSVVRSRNSRNHTVNSGGSCLSASTVAIPAINDSSAAMSACSTISAQPASSMDTQMHSPKKQERVNKRVIWGIEVAEELHWKGWELGKETTRNLVLKNRSLKLQKMKYRPPKTKFFFTVIPQPIFLSPGITLTLPIVFRPLEAKEYMDQLWFEKAEGMFCVGLRATLPCHRLICRPPSLQLPMCAVGDTTEAFFCLDNVGDLPTFFTWEFSSPFQMLPATGLLEPGQASQIKVTFQPLTAVIYEVQATCWYGAGSRQRSSIQLQAVAKCAQLLVSIKHKCPEDQDAEGFQKLLYFGSVAVGCTSERQIRLHNPSAVNAPFRIEISPDELAEDQAFSCPTAHGIVLPGEKKCVSVFFHPKTLDTRTVDYCSIMPSGCASKTLLKVVGFCRGPAVSLQHYCVNFSWVNLGERSEQPLWIENQSDCTAHFQFAIDCLESVFTIRPAFGTLVGKARMTLHCAFQPTHPIICFRRVACLIHHQDPLFLDLMGTCHSDSTKPAILKPQHLTWYRTHLARGLTLYPPDILDAMLKEKKLAQDQNGALMIPIQDLEDMPAPQYPYIPPMTEFFFDGTSDITIFPPPISVEPVEVDFGACPGPEAPNPVPLCLMNHTKGKIMVVWTRRSDCPFWVTPESCDVPPLKSMAMRLHFQPPHPNCLYTVELEAFAIYKVLQSYSNIEEDCTMCPSWCLTVRARGHSYFAGFEHHIPQYSLDVPKLFPAVSSGEPTYRSLLLVNKDCKLLTFSLAPQRGSDVILRPTSGLVAPGAHQIILICTYPEGSSWKQHTFYLQCNASPQYLKEVSMYSREEPLQLKLDTHKSLYFKPTWVGCSSTSPFTFRNPSRLPLQFEWRVSEQHRKLLAVQPSRGLIQPNERLTLTWTFSPLEETKYLFQVGMWVWEAGLSPNANPAATTHYMLRLVGVGLTSSLSAKEKELAFGNVLVNSKQSRFLVLLNDGNCTLYYRLYLEQGSPEAVDNHPLALQLDRTEGSMPPRSQDTICLTACPKQRSQYSWTITYSLLSHRDNKAGEKQELCCVSLVAVYPLLSILDVSSMGSAEGITRKHLWRLFSLDLLNSYLERDPTPCELTYKVPTRHSMSQIPPVLTPLRLDFNFGAAPFKAPPSVVFLALKNSGVVSLDWAFLLPSDQRIDVELWAEQAELNSTELHQMRVQDNCLFSISPKAGSLSPGQEQMVELKYSHLFIGTDHLPVLFKVSHGREILLNFIGVTVKPEQKYVHFTSTTHQFIPIPIGDTLPPRQIYELYNGGSVPVTYEVQTDVLSQVQEKNFDHPIFCCLNPKGEIQPGSTARVLWIFSPIEAKTYTVDVPIHILGWNSALIHFQGVGYNPHMMGDTAPFHNISSWDNSSIHSRLVVPGQNVFLSQSHISLGNIPVQSKCSRLLFLNNISKNEEIAFSWQPSPLDFGEVSVSPMIGVVAPEETVPFVVTLRASVHASFYSADLVCKLYSQQLMRQYHKELQEWKDEKVRQEVEFTITDMKVKKRTCCTACEPARKYKTLPPIKNQQSVSRPASWKLQTPKEEVSWPCPQPPSPGMLCLGLTARAHATDYFLANFFSEFPCHFLHRELPKRKAPREESETSEEKSPNKWGPVSKQKKQLLVDILTTIIRGLLEDKNFHEAVDQSLVEQVPYFRQFWNEQSTKFMDQKNSLYLMPILPVPSSSWEDGKGKQPKEDRPEHYPGLGKKEEGEEEKGEEEEEELEEEEEEEEETEEEELGKEEIEEKEEERDEKEEKVSWAGIGPTPQPESQESMQWQWQQQLNVMVKEEQEQDEKEAIRRLPAFANLQEALLENMIQNILVEASRGEVVLTSRPRVIALPPFCVPRSLTPDTLLPTQQAEVLHPVVPLPTDLP

SEQ ID NO: 6323 - protein, 582 aa, Homo sapiens
MDFEDDYTHSACRNTYQGFNGMDRDYGPGSYGGMDRDYGHGSYGGQRSMDSYLNQSYGMDNHSGGGGGSRFGPYESYDSRSSLGGRDLYRSGYGFNEPEQSRFGGSYGGRFESSYRNSLDSFGGRNQGGSSWEAPYSRSKLRPGFMEDRGRENYSSYSSFSSPHMKPAPVGSRGRGTPAYPESTFGSRNYDAFGGPSTGRGRGRGHMGDFGSIHRPGIVVDYQNKSTNVTVAAARGIKRKMMQPFNKPSGTFIKKPKLAKPMEKISLSKSPTKTDPKNEEEEKRRIEARREKQRRRREKNSEKYGDGYRMAFTCSFCKFRTFEEKDIELHLESSSHQETLDHIQKQTKFDKVVMEFLHECMVNKFKKTSIRKQQTNNQTEVVKIIEKDVMEGVTVDDHMMKVETVHCSACSVYIPALHSSVQQHLKSPDHIKGKQAYKEQIKRESVLTATSILNNPIVKARYERFVKGENPFEIQDHSQDQQIEGDEEDEEKIDEPIEEEEDEDEEEEAEEVGEVEEVEEVEEVREGGIEGEGNIQGVGEGGEVGVVGEVEGVGEVEEVEELEEETAKEEPADFPVEQPEEN

SEQ ID NO: 6324 - protein, 744 aa, Homo sapiens
MAKREDSPGPEVQPMDKQFLVCSICLDRYQCPKVLPCLHTFCERCLQNYIPAQSLTLSCPVCRQTSILPEQGVSALQNNFFISSLMEAMQQAPDGAHDPEDPHPLSVVAGRPLSCPNHEGKTMEFYCEACETAMCGECRAGEHREHGTVLLRDVVEQHKAALQRQLEAVRGRLPQLSAAIALVGGISQQLQERKAEALAQISAAFEDLEQALQQRKQALVSDLETICGAKQKVLQSQLDTLRQGQEHIGSSCSFAEQALRLGSAPEVLLVRKHMRERLAALAAQAFPERPHENAQLELVLEVDGLRRSVLNLGALLTTSATAHETVATGEGLRQALVGQPASLTVTTKDKDGRLVRTGSAELRAEITGPDGTRLPVPVVDHKNGTYELVYTARTEGELLLSVLLYGQPVRGSPFRVRALRPGDLPPSPDDVKRRVKSPGGPGSHVRQKAVRRPSSMYSTGGKRKDNPIEDELVFRVGSRGREKGEFTNLQGVSAASSGRIVVADSNNQCIQVFSNEGQFKFRFGVRGRSPGQLQRPTGVAVDTNGDIIVADYDNRWVSIFSPEGKFKTKIGAGRLMGPKGVAVDRNGHIIVVDNKSCCVFTFQPNGKLVGRFGGRGATDRHFAGPHFVAVNNKNEIVVTDFHNHSVKVYSADGEFLFKFGSHGEGNGQFNAPTGVAVDSNGNIIVADWGNSRIQVFDSSGSFLSYINTSAEPLYGPQGLALTSDGHVVVADAGNHCFKAYRYLQ

SEQ ID NO: 6325 - protein, 718 aa, Homo sapiens
MMEELHSLDPRRQELLEARFTGVGVSKGPLNSESSNQSLCSVGSLSDKEVETPEKKQNDQRNRKRKAEPYETSQGKGTPRGHKISDYFERRVEQPLYGLDGSAAKEATEEQSALPTLMSVMLAKPRLDTEQLAQRGAGLCFTFVSAQQNSPSSTGSGNTEHSCSSQKQISIQHRQTQSDLTIEKISALENSKNSDLEKKEGRIDDLLRANCDLRRQIDEQQKMLEKYKERLNRCVTMSKKLLIEKSKQEKMACRDKSMQDRLRLGHFTTVRHGASFTEQWTDGYAFQNLIKQQERINSQREEIERQRKMLAKRKPPAMGQAPPATNEQKQRKSKTNGAENETLTLAEYHEQEEIFKLRLGHLKKEEAEIQAELERLERVRNLHIRELKRIHNEDNSQFKDHPTLNDRYLLLHLLGRGGFSEVYKAFDLTEQRYVAVKIHQLNKNWRDEKKENYHKHACREYRIHKELDHPRIVKLYDYFSLDTDSFCTVLEYCEGNDLDFYLKQHKLMSEKEARSIIMQIVNALKYLNEIKPPIIHYDLKPGNILLVNGTACGEIKITDFGLSKIMDDDSYNSVDGMELTSQGAGTYWYLPPECFVVGKEPPKISNKVDVWSVGVIFYQCLYGRKPFGHNQSQQDILQENTILKATEVQFPPKPVVTPEAKAFIRRCLAYRKEDRIDVQQLACDPYLLPHIRKSVSTSSPAGAAIASTSGASNNSSSN

SEQ ID NO: 6326 - protein, 835 aa, Homo sapiens
MLSRLFRMHGLFVASHPWEVIVGTVTLTICMMSMNMFTGNNKICGWNYECPKFEEDVLSSDIIILTITRCIAILYIYFQFQNLRQLGSKYILGIAGLFTIFSSFVFSTVVIHFLDKELTGLNEALPFFLLLIDLSRASTLAKFALSSNSQDEVRENIARGMAILGPTFTLDALVECLVIGVGTMSGVRQLEIMCCFGCMSVLANYFVFMTFFPACVSLVLELSRESREGRPIWQLSHFARVLEEEENKPNPVTQRVKMIMSLGLVLVHAHSRWIADPSPQNSTADTSKVSLGLDENVSKRIEPSVSLWQFYLSKMISMDIEQVITLSLALLLAVKYIFFEQTETESTLSLKNPITSPVVTQKKVPDNCCRREPMLVRNNQKCDSVEEETGINRERKVEVIKPLVAETDTPNRATFVVGNSSLLDTSSVLVTQEPEIELPREPRPNEECLQILGNAEKGAKFLSDAEIIQLVNAKHIPAYKLETLMETHERGVSIRRQLLSKKLSEPSSLQYLPYRDYNYSLLGGGASSRVLADGMTRGPVVRLPRACDSAEVKAWLETSEGFAVIKEAFDSTSRFARLQKLHTSIAGRNLYIRFQSRSGDAMGMNMISKGTEKALSKLHEYFPEMQILAVSGNYCTDKKPAAINWIEGRGKSVVCEAVIPAKVVREVLKTTTEAMIEVNINKNLVGSAMAGSIGGYNAHAANIVTAIYIACGQDAAQNVGSSNCITLMEASGPTNEDLYISCTMPSIEIGTVGGGTNLLPQQACLQMLGVQGACKDNPGENARQLARIVCGTVMAGELSLMAALAAGHLVKSHMIHNRSKINLQDLQGACTKKTA

SEQ ID NO: 6327 - protein, 776 aa, Homo sapiens
MAEPRQEFEVMEDHAGTYGLGDRKDQGGYTMHQDQEGDTDAGLKESPLQTPTEDGSEEPGSETSDAKSTPTAEDVTAPLVDEGAPGKQAAAQPHTEIPEGTTAEEAGIGDTPSLEDEAAGHVTQEPESGKVVQEGFLREPGPPGLSHQLMSGMPGAPLLPEGPREATRQPSGTGPEDTEGGRHAPELLKHQLLGDLHQEGPPLKGAGGKERPGSKEEVDEDRDVDESSPQDSPPSKASPAQDGRPPQTAAREATSIPGFPAEGAIPLPVDFLSKVSTEIPASEPDGPSVGRAKGQDAPLEFTFHVEITPNVQKEQAHSEEHLGRAAFPGAPGEGPEARGPSLGEDTKEADLPEPSEKQPAAAPRGKPVSRVPQLKARMVSKSKDGTGSDDKKAKTSTRSSAKTLKNRPCLSPKHPTPGSSDPLIQPSSPAVCPEPPSSPKYVSSVTSRTGSSGAKEMKLKGADGKTKIATPRGAAPPGQKGQANATRIPAKTPPAPKTPPSSATKQVQRRPPPAGPRSERGEPPKSGDRSGYSSPGSPGTPGSRSRTPSLPTPPTREPKKVAVVRTPPKSPSSAKSRLQTAPVPMPDLKNVKSKIGSTENLKHQPGGGKVQIINKKLDLSNVQSKCGSKDNIKHVPGGGSVQIVYKPVDLSKVTSKCGSLGNIHHKPGGGQVEVKSEKLDFKDRVQSKIGSLDNITHVPGGGNKKIETHKLTFRENAKAKTDHGAEIVYKSPVVSGDTSPRHLSNVSSTGSIDMVDSPQLATLADEVSASLAKQGL

SEQ ID NO: 6328 - protein, 836 aa, Homo sapiens
MTATAEVETPKMEKSASKEEKQQPKQDSTEQGNADSEEWMSSESDPEQISLKSSDNSKSCQPRDGQLKKKEMHSKPHRQLCRSPCLDRPSFSQSSILQDGKLDLEKEYQAKMEFALKLGYAEEQIQSVLNKLGPESLINDVLAELVRLGNKGDSEGQINLSLLVPRGPSSREIASPELSLEDEIDNSDNLRPVVIDGSNVAMSHGNKEEFSCRGIQLAVDWFLDKGHKDITVFVPAWRKEQSRPDAPITDQDILRKLEKEKILVFTPSRRVQGRRVVCYDDRFIVKLAFDSDGIIVSNDNYRDLQVEKPEWKKFIEERLLMYSFVNDKFMPPDDPLGRHGPSLENFLRKRPIVPEHKKQPCPYGKKCTYGHKCKYYHPERANQPQRSVADELRISAKLSTVKTMSEGTLAKCGTGMSSAKGEITSEVKRVAPKRQSDPSIRSVAMEPEEWLSIARKPEASSVPSLVTALSVPTIPPPKSHAVGALNTRSASSPVPGSSHFPHQKASLEHMASMQYPPILVTNSHGTPISYAEQYPKFESMGDHGYYSMLGDFSKLNINSMHNREYYMAEVDRGVYARNPNLCSDSRVSHTRNDNYSSYNNVYLAVADTHPEGNLKLHRSASQNRLQPFPHGYHEALTRVQSYGPEDSKQGPHKQSVPHLALHAQHPSTGTRSSCPADYPMPPNIHPGATPQPGRALVMTRMDSISDSRLYESNPVRQRRPPLCREQHASWDPLPCTTDSYGYHSYPLSNSLMQPCYEPVMVRSVPEKMEQLWRNPWVGMCNDSREHMIPEHQYQTYKNLCNIFPSNIVLAVMEKNPHTADAQQLAALIVAKLRAAR

SEQ ID NO: 6329 - protein, 766 aa, Homo sapiens
MDNITRQNQFYDTQVIKQENESGYERRPLEMEQQQAYRPEMKTEMKQGAPTSFLPPEASQLKPDRQQFQSRKRPYEENRGRGYFEHREDRRGRSPQPPAEEDEDDFDDTLVAIDTYNCDLHFKVARDRSSGYPLTIEGFAYLWSGARASYGVRRGRVCFEMKINEEISVKHLPSTEPDPHVVRIGWSLDSCSTQLGEEPFSYGYGGTGKKSTNSRFENYGDKFAENDVIGCFADFECGNDVELSFTKNGKWMGIAFRIQKEALGGQALYPHVLVKNCAVEFNFGQRAEPYCSVLPGFTFIQHLPLSERIRGTVGPKSKAECEILMMVGLPAAGKTTWAIKHAASNPSKKYNILGTNAIMDKMRVMGLRRQRNYAGRWDVLIQQATQCLNRLIQIAARKKRNYILDQTNVYGSAQRRKMRPFEGFQRKAIVICPTDEDLKDRTIKRTDEEGKDVPDHAVLEMKANFTLPDVGDFLDEVLFIELQREEADKLVRQYNEEGRKAGPPPEKRFDNRGGGGFRGRGGGGGFQRYENRGPPGGNRGGFQNRGGGSGGGGNYRGGFNRSGGGGYSQNRWGNNNRDNNNSNNRGSYNRAPQQQPPPQQPPPPQPPPQQPPPPPSYSPARNPPGASTYNKNSNIPGSSANTSTPTVSSYSPPQSFGFFPSTFQPSYSQPPYNQGGYSQGYTAPPPPPPPPPAYNYGSYGGYNPAPYTPPPPPTAQTYPQPSYNQYQQYAQQWNQYYQNQGQWPPYYGNYDYGSYSGNTQGGTSTQ

SEQ ID NO: 6330 - protein, 57 aa, Homo sapiens
MSRSVALAVLALLSLSGLERELKKWSIQTCLSARTGLSISCTTLNSPPLKKMSMPAV

SEQ ID NO: 6331 - protein, 483 aa, Homo sapiens
MGRKKIQITRIMDERNRQVTFTKRKFGLMKKAYELSVLCDCEIALIIFNSTNKLFQYASTDMDKVLLKYTEYNEPHESRTNSDIVETLRKKGLNGCDSPDPDADDSALNKKENKGCESPDPDSSYALTPRTEEKYKKINEEFDNMIKSHKIPAVPPPNFEMPVSIPVSSHNSLVYSNPVSSLGNPNLLPLAHPSLQRNSMSPGVTHRPPSAGNTGGLMGGDLTSGAGTSAGNGYGNPRNSPGLLVSPGNLNKNMQAKSPPPMNLGMNNRKPDLRVLIPPGSKNTMPSVNQRINNSQSAQSLATPVVSVATPTLPGQGMGGYPSAISTTYGTEYSLSSADLSSLSGFNTASALHLGSVTGWQQQHLHNMPPSALSQLGACTSTHLSQSSNLSLPSTQSLNIKSEPVSPPRDRTTTPSRYPQHTRHEAGRSPVDSLSSCSSSYDGSDREDHRNEFHSPIGLTRPSPDERESPSVKRMRLSEGWAT

SEQ ID NO: 6332 - protein, 1196 aa, Homo sapiens
MEPRPTAPSSGAPGLAGVGETPSAAALAAARVELPGTAVPSVPEDAAPASRDGGGVRDEGPAAAGDGLGRPLGPTPSQSRFQVDLVSENAGRAAAAAAAAAAAAAAAGAGAGAKQTPADGEASGESEPAKGSEEAKGRFRVNFVDPAASSSAEDSLSDAAGVGVDGPNVSFQNGGDTVLSEGSSLHSGGGGGSGHHQHYYYDTHTNTYYLRTFGHNTMDAVPRIDHYRHTAAQLGEKLLRPSLAELHDELEKEPFEDGFANGEESTPTRDAVVTYTAESKGVVKFGWIKGVLVRCMLNIWGVMLFIRLSWIVGQAGIGLSVLVIMMATVVTTITGLSTSAIATNGFVRGGGAYYLISRSLGPEFGGAIGLIFAFANAVAVAMYVVGFAETVVELLKEHSILMIDEINDIRIIGAITVVILLGISVAGMEWEAKAQIVLLVILLLAIGDFVIGTFIPLESKKPKGFFGYKSEIFNENFGPDFREEETFFSVFAIFFPAATGILAGANISGDLADPQSAIPKGTLLAILITTLVYVGIAVSVGSCVVRDATGNVNDTIVTELTNCTSAACKLNFDFSSCESSPCSYGLMNNFQVMSMVSGFTPLISAGIFSATLSSALASLVSAPKIFQALCKDNIYPAFQMFAKGYGKNNEPLRGYILTFLIALGFILIAELNVIAPIISNFFLASYALINFSVFHASLAKSPGWRPAFKYYNMWISLLGAILCCIVMFVINWWAALLTYVIVLGLYIYVTYKKPDVNWGSSTQALTYLNALQHSIRLSGVEDHVKNFRPQCLVMTGAPNSRPALLHLVHDFTKNVGLMICGHVHMGPRRQAMKEMSIDQAKYQRWLIKNKMKAFYAPVHADDLREGAQYLMQAAGLGRMKPNTLVLGFKKDWLQADMRDVDMYINLFHDAFDIQYGVVVIRLKEGLDISHLQGQEELLSSQEKSPGTKDVVVSVEYSKKSDLDTSKPLSEKPITHKESKGPIVPLNVADQKLLEASTQFQKKQGKNTIDVWWLFDDGGLTLLIPYLLTTKKKWKDCKIRVFIGGKINRIDHDRRAMATLLSKFRIDFSDIMVLGDINTKPKKENIIAFEEIIEPYRLHEDDKEQDIADKMKEDEPWRITDNELELYKTKTYRQIRLNELLKEHSSTANIIVMSLPVARKGAVSSALYMAWLEALSKDLPPILLVRGNHQSVLTFYS

SEQ ID NO: 6333 - protein, 394 aa, Homo sapiens
MMMMALSKTFGQKPVKFQLEDDGEFYMIGSEVGNYLRMFRGSLYKRYPSLWRRLATVEERKKIVASSHDHGYTTLATSVTLLKASEVEEILDGNDEKYKAVSISTEPPTYLREQKAKRNSQWVPTLPNSSHHLDAVPCSTTINRNRMGRDKKRTFPLWCGCIAALTLRADSALVLHFDDHDPAVIHENASQPEVLVPIRLDMEIDGQKLRDAFTWNMNEKLMTPEMFSEILCDDLDLNPLTFVPAIASAIRQQIESYPTDSILEDQSDQRVIIKLNIHVGNISLVDQFEWDMSEKENSPEKFALKLCSELGLGGEFVTTIAYSIRGQLSWHQKTYAFSENPLPTVEIAIRNTGDADQWCPLLETLTDAEMEKKIRDQDRNTRRMRRLANTAPAW

SEQ ID NO: 6334 - protein, 906 aa, Homo sapiens
MICQKFCVVLLHWEFIYVITAFNLSYPITPWRFKLSCMPPNSTYDYFLLPAGLSKNTSNSNGHYETAVEPKFNSSGTHFSNLSKTTFHCCFRSEQDRNCSLCADNIEGKTFVSTVNSLVFQQIDANWNIQCWLKGDLKLFICYVESLFKNLFRNYNYKVHLLYVLPEVLEDSPLVPQKGSFQMVHCNCSVHECCECLVPVPTAKLNDTLLMCLKITSGGVIFQSPLMSVQPINMVKPDPPLGLHMEITDDGNLKISWSSPPLVPFPLQYQVKYSENSTTVIREADKIVSATSLLVDSILPGSSYEVQVRGKRLDGPGIWSDWSTPRVFTTQDVIYFPPKILTSVGSNVSFHCIYKKENKIVPSKEIVWWMNLAEKIPQSQYDVVSDHVSKVTFFNLNETKPRGKFTYDAVYCCNEHECHHRYAELYVIDVNINISCETDGYLTKMTCRWSTSTIQSLAESTLQLRYHRSSLYCSDIPSIHPISEPKDCYLQSDGFYECIFQPIFLLSGYTMWIRINHSLGSLDSPPTCVLPDSVVKPLPPSSVKAEITINIGLLKISWEKPVFPENNLQFQIRYGLSGKEVQWKMYEVYDAKSKSVSLPVPDLCAVYAVQVRCKRLDGLGYWSNWSNPAYTVVMDIKVPMRGPEFWRIINGDTMKKEKNVTLLWKPLMKNDSLCSVQRYVINHHTSCNGTWSEDVGNHTKFTFLWTEQAHTVTVLAINSIGASVANFNLTFSWPMSKVNIVQSLSAYPLNSSCVIVSWILSPSDYKLMYFIIEWKNLNEDGEIKWLRISSSVKKYYIHDHFIPIEKYQFSLYPIFMEGVGKPKIINSFTQDDIEKHQSDAGLYVIVPVIISSSILLLGTLLISHQRMKKLFWEDVPNPKNCSWAQGLNFQKKMPGTKELLGGGWLT

SEQ ID NO: 6335 - protein, 628 aa, Homo sapiens
MAAAGAGPGQEAGAGPGPGAVANATGAEEGEMKPVAAGAAAPPGEGISAAPTVEPSSGEAEGGEANLVDVSGGLETESSNGKDTLEGAGDTSEVMDTQAGSVDEENGRQLGEVELQCGICTKWFTADTFGIDTSSCLPFMTNYSFHCNVCHHSGNTYFLRKQANLKEMCLSALANLTWQSRTQDEHPKTMFSKDKDIIPFIDKYWECMTTRQRPGKMTWPNNIVKTMSKERDVFLVKEHPDPGSKDPEEDYPKFGLLDQDLSNIGPAYDNQKQSSAVSTSGNLNGGIAAGSSGKGRGAKRKQQDGGTTGTTKKARSDPLFSAQRLPPHGYPLEHPFNKDGYRYILAEPDPHAPDPEKLELDCWAGKPIPGDLYRACLYERVLLALHDRAPQLKISDDRLTVVGEKGYSMVRASHGVRKGAWYFEITVDEMPPDTAARLGWSQPLGNLQAPLGYDKFSYSWRSKKGTKFHQSIGKHYSSGYGQGDVLGFYINLPEDTETAKSLPDTYKDKALIKFKSYLYFEEKDFVDKAEKSLKQTPHSEIIFYKNGVNQGVAYKDIFEGVYFPAISLYKSCTVSINFGPCFKYPPKDLTYRPMSDMGWGAVVEHTLADVLYHVETEVDGRRSPPWEP

SEQ ID NO: 6336 - protein, 1907 aa, Homo sapiens
MAAAPGLLVWLLVLRLPWRVPGQLDPSTGRRFSEHKLCADDECSMLMYRGEALEDFTGPDCRFVNFKKGDPVYVYYKLARGWPEVWAGSVGRTFGYFPKDLIQVVHEYTKEELQVPTDETDFVCFDGGRDDFHNYNVEELLGFLELYNSAATDSEKAVEKTLQDMEKNPELSKEREPEPEPVEANSEESDSVFSENTEDLQEQFTTQKHHSHANSQANHAQGEQASFESFEEMLQDKLKVPESENNKTSNSSQVSNEQDKIDAYKLLKKEMTLDLKTKFGSTADALVSDDETTRLVTSLEDDFDEELDTEYYAVGKEDEENQEDFDELPLLTFTDGEDMKTPAKSGVEKYPTDKEQNSNEEDKVQLTVPPGIKNDDKNILTTWGDTIFSIVTGGEETRDTMDLESSSSEEEKEDDDDALVPDSKQGKPQSATDYSDPDNVDDGLFIVDIPKTNNDKEVNAEHHIKGKGRGVQESKRGLVQDKTELEDENQEGMTVHSSVHSNNLNSMPAAEKGKDTLKSAYDDTENDLKGAAIHISKGMLHEEKPGEQILEGGSESESAQKAAGNQMNDRKIQQESLGSAPLMGDDHPNASRDSVEGDALVNGAKLHTLSVEHQREELKEELVLKTQNQPRFSSPDEIDLPRELEDEVPILGRNLPWQQERDVAATASKQMSEKIRLSEGEAKEDSLDEEFFHHKAMQGTEVGQTDQTDSTGGPAFLSKVEEDDYPSEELLEDENAINAKRSKEKNPGNQGRQFDVNLQVPDRAVLGTIHPDPEIEESKQETSMILDSEKTSETAAKGVNTGGREPNTMVEKERPLADKKAQRPFERSDFSDSIKIQTPELGEVFQNKDSDYLKNDNPEEHLKTSGLAGEPEGELSKEDHENTEKYMGTESQGSAAAEPEDDSFHWTPHTSVEPGHSDKREDLLIISSFFKEQQSLQRFQKYFNVHELEALLQEMSSKLKSAQQESLPYNMEKVLDKVFRASESQILSIAEKMLDTRVAENRDLGMNENNIFEEAAVLDDIQDLIYFVRYKHSTAEETATLVMAPPLEEGLGGAMEEMQPLHEDNFSREKTAELNVQVPEEPTHLDQRVIGDTHASEVSQKPNTEKDLDPGPVTTEDTPMDAIDANKQPETAAEEPASVTPLENAILLIYSFMFYLTKSLVATLPDDVQPGPDFYGLPWKPVFITAFLGIASFAIFLWRTVLVVKDRVYQVTEQQISEKLKTIMKENTELVQKLSNYEQKIKESKKHVQETRKQNMILSDEAIKYKDKIKTLEKNQEILDDTAKNLRVMLESEREQNVKNQDLISENKKSIEKLKDVISMNASEFSEVQIALNEAKLSEEKVKSECHRVQEENARLKKKKEQLQQEIEDWSKLHAELSEQIKSFEKSQKDLEVALTHKDDNINALTNCITQLNLLECESESEGQNKGGNDSDELANGEVGGDRNEKMKNQIKQMMDVSRTQTAISVVEEDLKLLQLKLRASVSTKCNLEDQVKKLEDDRNSLQAAKAGLEDECKTLRQKVEILNELYQQKEMALQKKLSQEEYERQEREHRLSAADEKAVSAAEEVKTYKRRIEEMEDELQKTERSFKNQIATHEKKAHENWLKARAAERAIAEEKREAANLRHKLLELTQKMAMLQEEPVIVKPMPGKPNTQNPPRRGPLSQNGSFGPSPVSGGECSPPLTVEPPVRPLSATLNRRDMPRSEFGSVDGPLPHPRWSAEASGKPSPSDPGSGTATMMNSSSRGSSPTRVLDEGKVNMAPKGPPPFPGVPLMSTPMGGPVPPPIRYGPPPQLCGPFGPRPLPPPFGPGMRPPLGLREFAPGVPPGRRDLPLHPRGFLPGHAPFRPLGSLGPREYFIPGTRLPPPTHGPQEYPPPPAVRDLLPSGSRDEPPPASQSTSQDCSQALKQSP

SEQ ID NO: 6337 - protein, 653 aa, Homo sapiens
MLLFVEQVASKGTGLNPNAKVWQEIAPGNTDATPVTHGTESSWHEIAATSGAHPEGNAELSEDICKEYEVMYSSSCETTRNTTGIEESTDGMILGPEDLSYQIYDVSGESNSAVSTEDLKECLKKQLEFCFSRENLSKDLYLISQMDSDQFIPIWTVANMEEIKKLTTDPDLILEVLRSSPMVQVDEKGEKVRPSHKRCIVILREIPETTPIEEVKGLFKSENCPKVISCEFAHNSNWYITFQSDTDAQQAFKYLREEVKTFQGKPIMAPFPNGSFVNGFNSPGSYKTNAAAMNMGRPFQKNRVKPQFRSSGGSEHSTEGSVSLGDGQLNRYSSRNFPAERHNPTVTGHQEQTYLQKETSTLQVEQNGDYGRGRRTLFRGRRRREDDRISRPHPSTAESKAPTPKFDLLASNFPPLPGSSSRMPGELVLENRMSDVVKGVYKEKDNEELTISCPVPADEQTECTSAQQLNMSTSSPCAAELTALSTTQQEKDLIEDSSVQKDGLNQTTIPVSPPSTTKPSRASTASPCNNNINAATAVALQEPRKLSYAEVCQKPPKEPSSVLVQPLRELRSNVVSPTKNEDNGAPENSVEKPHEKPEARASKDYSGFRGNIIPRGAAGKIREQRRQFSHRAIPQGVTRRNGKEQYVPPRSPK

SEQ ID NO: 6338 - protein, 241 aa, Homo sapiens
MAEPSAATQSHSISSSSFGAEPSAPGGGGSPGACPALGTKSCSSSCAVHDLIFWRDVKKTGFVFGTTLIMLLSLAAFSVISVVSYLILALLSVTISFRIYKSVIQAVQKSEEGHPFKAYLDVDITLSSEAFHNYMNAAMVHINRALKLIIRLFLVEDLVDSLKLAVFMWLMTYVGAVFNGITLLILAELLIFSVPIVYEKYKDPSKTPWNRQKKGRISTWKPEMQQLLKHHLIVITSLLVL

SEQ ID NO: 6339 - protein, 412 aa, Homo sapiens
MDLAKSGIKILVPKSPVKSRTAVDGFQSESPEKLDPVEQGQEDTVAPEVAAEKPVGALLGPGAERARMGSRPRIHPLVPQVPGPVTAAMATGLAVNGKGTSPFMDALTANGTTNIQTSVTGVTASKRKFIDDRRDQPFDKRLRFSVRQTESAYRYRDIVVRKQDGFTHILLSTKSSENNSLNPEVMREVQSALSTAAADDSKLVLLSAVGSVFCCGLDFIYFIRRLTDDRKRESTKMAEAIRNFVNTFIQFKKPIIVAVNGPAIGLGASILPLCDVVWANEKAWFQTPYTTFGQSPDGCSTVMFPKIMGGASANEMLLSGRKLTAQEACGKGLVSQVFWPGTFTQEVMVRIKELASCNPVVLEESKALVRCNMKMELEQANERECEVLKKIWGSAQGMDSMLKYLQRKIDEF

SEQ ID NO: 6340 - protein, 931 aa, Homo sapiens
MSQSPAFGPRRGSSPRGAAGAAARRNESQDYLLMDSELGEDGCPQAPLPCYGYYPCFRGSDNRLAHRRQTVLREKGRRLANRGPAYMFSDRSTSLSIEEERFLDAAEYGNIPVVRKMLEECHSLNVNCVDYMGQNALQLAVANEHLEITELLLKKENLSRVGDALLLAISKGYVRIVEAILSHPAFAEGKRLATSPSQSELQQDDFYAYDEDGTRFSHDVTPIILAAHCQEYEIVHTLLRKGARIERPHDYFCKCNDCNQKQKHDSFSHSRSRINAYKGLASPAYLSLSSEDPVMTALELSNELAVLANIEKEFKNDYKKLSMQCKDFVVGLLDLCRNTEEVEAILNGDVETLQSGDHGRPNLSRLKLAIKYEVKKFVAHPNCQQQLLSIWYENLSGLRQQTMAVKFLVVLAVAIGLPFLALIYWFAPCSKMGKIMRGPFMKFVAHAASFTIFLGLLVMNAADRFEGTKLLPNETSTDNAKQLFRMKTSCFSWMEMLIISWVIGMIWAECKEIWTQGPKEYLFELWNMLDFGMLAIFAASFIARFMAFWHASKAQSIIDANDTLKDLTKVTLGDNVKYYNLARIKWDPSDPQIISEGLYAIAVVLSFSRIAYILPANESFGPLQISLGRTVKDIFKFMVIFIMVFVAFMIGMFNLYSYYIGAKQNEAFTTVEESFKTLFWAIFGLSEVKSVVINYNHKFIENIGYVLYGVYNVTMVIVLLNMLIAMINSSFQEIEDDADVEWKFARAKLWFSYFEEGRTLPVPFNLVPSPKSLFYLLLKLKKWISELFQGHKKGFQEDAEMNKINEEKKLGILGSHEDLSKLSLDKKQVGHNKQPSIRSSEDFHLNSFNNPPRQYQKIMKRLIKRYVLQAQIDKESDEVNEGELKEIKQDISSLRYELLEEKSQNTEDLAELIRELGEKLSMEPNQEETNR

SEQ ID NO: 6341 - protein, 590 aa, Homo sapiens
MSGDYEDDLCRRALILVSDLCARVRDADTNDRCQEFNDRIRGYPRGPDADISVSLLSVIVTFCGIVLLGVSLFVSWKLCWVPWRDKGGSAVGGGPLRKDLGPGVGLAGLVGGGGHHLAAGLGGHPLLGGPHHHAHAAHHPPFAELLEPGSLGGSDTPEPSYLDMDSYPEAAAAAVAAGVKPSQTSPELPSEGGAGSGLLLLPPSGGGLPSAQSHQQVTSLAPTTRYPALPRPLTQQTLTSQPDPSSEERPPALPLPLPGGEEKAKLIGQIKPELYQGTGPGGRRSGGGPGSGEAGTGAPCGRISFALRYLYGSDQLVVRILQALDLPAKDSNGFSDPYVKIYLLPDRKKKFQTKVHRKTLNPVFNETFQFSVPLAELAQRKLHFSVYDFDRFSRHDLIGQVVLDNLLELAEQPPDRPLWRDIVEGGSEKADLGELNFSLCYLPTAGRLTVTIIKASNLKAMDLTGFSDPYVKASLISEGRRLKKRKTSIKKNTLNPTYNEALVFDVAPESVENVGLSIAVVDYDCIGHNEVIGVCRVGPDAADPHGREHWAEMLANPRKPVEHWHQLVEEKTVTSFTKGSKGLSEKENSE

SEQ ID NO: 6342 - protein, 1170 aa, Homo sapiens
MTNPSDRVLPANSMAESREGDFGCTVMELRKLMELRSRDALTQINVHYGGVQNLCSRLKTSPVEGLSGNPADLEKRRQVFGHNVIPPKKPKTFLELVWEALQDVTLIILEIAAIISLVLSFYRPAGEENELCGQVATTPEDENEAQAGWIEGAAILFSVIIVVLVTAFNDWSKEKQFRGLQCRIEQEQKFSIIRNGQLIQLPVAEIVVGDIAQVKYGDLLPADGILIQGNDLKIDESSLTGESDHVKKSLDKDPMLLSGTHVMEGSGRMVVTAVGVNSQTGIILTLLGVNEDDEGEKKKKGKKQGVPENRNKAKTQDGVALEIQPLNSQEGIDNEEKDKKAVKVPKKEKSVLQGKLTRLAVQIGKAGLLMSALTVFILILYFVIDNFVINRRPWLPECTPIYIQYFVKFFIIGITVLVVAVPEGLPLAVTISLAYSVKKMMKDNNLVRHLDACETMGNATAICSDKTGTLTMNRMTVVQAYIGGIHYRQIPSPDVFLPKVLDLIVNGISINSAYTSKILPPEKEGGLPRQVGNKTECALLGFVTDLKQDYQAVRNEVPEEKLYKVYTFNSVRKSMSTVIRNPNGGFRMYSKGASEIILRKCNRILDRKGEAVPFKNKDRDDMVRTVIEPMACDGLRTICIAYRDFDDTEPSWDNENEILTELTCIAVVGIEDPVRPEVPDAIAKCKQAGITVRMVTGDNINTARAIATKCGILTPGDDFLCLEGKEFNRLIRNEKGEVEQEKLDKIWPKLRVLARSSPTDKHTLVKGIIDSTVGEHRQVVAVTGDGTNDGPALKKADVGFAMGIAGTDVAKEASDIILTDDNFTSIVKAVMWGRNVYDSISKFLQFQLTVNVVAVIVAFTGACITQDSPLKAVQMLWVNLIMDTFASLALATEPPTESLLKRRPYGRNKPLISRTMMKNILGHAFYQLIVIFILVFAGEKFFDIDSGRKAPLHSPPSQHYTIVFNTFVLMQLFNEINSRKIHGEKNVFSGIYRNIIFCSVVLGTFICQIFIVEFGGKPFSCTSLSLSQWLWCLFIGIGELLWGQFISAIPTRSLKFLKEAGHGTTKEEITKDAEGLDEIDHAEMELRRGQILWFRGLNRIQTQIDVINTFQTGASFKGVLRRQNMGQHLDVKLVPSSSYVAVAPVKSSPTTSVPAVSSPPMGNQSGQSVP

SEQ ID NO: 6343 - protein, 232 aa, Homo sapiens
MESETEPEPVTLLVKSPNQRHRDLELSGDRGWSVGHLKAHLSRVYPERPRPEDQRLIYSGKLLLDHQCLRDLLPKEKRHVLHLVCNVKSPSKMPEINAKVAESTEEPAGSNRGQYPEDSSSDGLRQREVLRNLSSPGWENISRHHVGWFPFRPRPVQNFPNDGPPPDVVNQDPNNNLQEGTDPETEDPNHLPPDRDVLDGEQTSPSFMSTAWLVFKTFFASLLPEGPPAIAN

SEQ ID NO: 6344 - protein, 513 aa, Homo sapiens
MKISILLMFLWGLSCALPVTRYQNNESEDSEEWKGHLAQAPTPPLESSESSEGSKVSSEEQANEDPSDSTQSEEGLGSDDHQYIYRLAGGFSRSTGKGGDDKDDDEDDSGDDTFGDDDSGPGPKDRQEGGNSRLGSDEDSDDTIQASEESAPQGQDSAQDTTSESRELDNEDRVDSKPEGGDSTQESESEEHWVGGGSDGESSHGDGSELDDEGMQSDDPESIRSERGNSRMNSAGMKSKESGENSEQANTQDSGGSQLLEHPSRKIFRKSRISEEDDRSELDDNNTMEEVKSDSTENSNSRDTGLSQPRRDSKGDSQEDSKENLSQEESQNVDGPSSESSQEANLSSQENSSESQEEVVSESRGDNPDPTTSYVEDQEDSDSSEEDSSHTLSHSKSESREEQADSESSESLNFSEESPESPEDENSSSQEGLQSHSSSAESQSEESHSEEDDSDSQDSSRSKEDSNSTESKSSSEEDGQLKNIEIESRKLTVDAYHNKPIGDQDDNDCQDGY

SEQ ID NO: 6345 - protein, 593 aa, Homo sapiens [sequence omitted]

SEQ ID NO: 6346 - protein, 397 aa, Homo sapiens
MLLWTAVLLFVPCVGKTVWLYLQAWPNPVFEGDALTLRCQGWKNTPLSQVKFYRDGKFLHFSKENQTLSMGAATVQSRGQYSCSGQVMYIPQTFTQTSETAMVQVQELFPPPVLSAIPSPEPREGSLVTLRCQTKLHPLRSALRLLFSFHKDGHTLQDRGPHPELCIPGAKEGDSGLYWCEVAPEGGQVQKQSPQLEVRVQAPVSRPVLTLHHGPADPAVGDMVQLLCEAQRGSPPILYSFYLDEKIVGNHSAPCGGTTSLLFPVKSEQDAGNYSCEAENSVSRERSEPKKLSLKGSQVLFTPASNWLVPWLPASLLGLMVIAAALLVYVRSWRKAGPLPSQIPPTAPGGEQCPLYANVHHQKGKDEGVVYSVVHRTSKRSEGQFYHLCGGEMPAAQ

SEQ ID NO: 6347 - protein, 147 aa, Homo sapiens
MKTLFLGVTLGLAAALSFTLEEEDEGGSVHPEENPDAEDGGAWQIQRLWGQEAHIPAGAARDGRLRLLLQRPAPWGPALHGKACGICSLQGRAAVPTLAHLATSPAGRNPNTNLEALEEFKKLVQHKGLSEEDIFMPLQTGSCVLEH

SEQ ID NO: 6348 - protein, 572 aa, Homo sapiens
MRRHMVTYAWQLLKKELGLYQLAMDIIIMIRVCKMFRQGLRGFREYQIIETAHWKHPIFSFWDKKMQSRVTFDTMDFIAEEGHFPPKAIQIMQKKPSWRTEDEIQAVCNILQVLDSYRNYAEPLQLLLAKVMRFERFGRRRVIIKKGQKGNSFYFIYLGTVAITKDEDGSSAFLDPHPKLLHKGSCFGEMDVLHASVRRSTIVCMEETEFLVVDREDFFANKLDQEVQKDAQYRFEFFRKMELFASWSDEKLWQLVAMAKIERFSYGQLISKDFGESPFIMFISKGSCEVLRLLDLGASPSYRRWIWQHLELIDGRPLKTHLSEYSPMERFKEFQIKSYPLQDFSSLKLPHLKKAWGLQGTSFSRKIRTSGDTLPKMLGPKIQSRPAQSIKCAMINIKPGELPKEAAVGAYVKVHTVEQGEILAFLPEGECDTRPLILMSLGNELIRIRKEIFYELIDNDDEMIKKLLKLNIAFPSDEDMCQKFLQQNSWNIFRKDLLQLLVEPCQSQLFTPNRPKKREIYNPKSVVLDLCSINKTTKPRYPIFMAPQKYLPPLRIVQAIKAPRYKIRELLA

SEQ ID NO: 6349 - protein, 501 aa, Homo sapiens
METNESTEGSRSRSRSLDIQPSSEGLGPTSEPFPSSDDSPRSALAAATAAAAAAASAAAATAAFTTAKAAALSTKTPAPCSEFMEPSSDPSLLGEPCAGPGFTHNIAHGSLGFEPVYVSCIAQDTCTTTDHSSNPGPVPGSSSGPVLGSSSGAGHGSGSGSGPGCGSVPGSGSGPGPGSGPGSGPGHGSGSHPGPASGPGPDTGPDSELSPCIPPGFRNLVADRVPNYTSWSQHCPWEPQKQPPWEFLQVLEPGARGLWKPPDIKGKLMVCYETLPRGQCLLYNWEEERATNHLDQVPSMQDGSESFFFRHGHRGLLTMQLKSPMPSSTTQKDSYQPPGNVYWPLRGKREAMLEMLLQHQICKEVQAEQEPTRKLFEVESVTHHDYRMELAQAGTPAPTKPHDYRQEQPETFWIQRAPQLPTWWPLPTQVPAAEDYLTWKEWGFTGVQEVLSALLRATPGEYSVNICGMNEHPVCSRTWTNRLCHQEMGSKKTVTQEDRGW

SEQ ID NO: 6350 - protein, 940 aa, Homo sapiens
MISAHCNLRLLCSSDSSASASQVAGTTEVVENLVTNDNSPNIPEAIDRLFSDIANINRESMAEITDIQIEEMAVNLWNWALTIGGGWLVNEEQKIRLHYVACKLLSMCEASFASEQSIQRLIMMNMRIGKEWLDAGNFLIADECFQAAVASLEQLYVKLIQRSSPEADLTMEKITVESDHFRVLSYQAESAVAQGDFQRASMCVLQCKDMLMRLPQMTSSLHHLCYNFGVETQKNNKYEESSFWLSQSYDIGKMDKKSTGPEMLAKVLRLLATNYLDWDDTKYYDKALNAVNLANKEHLSSPGLFLKMKILLKGETSNEELLEAVMEILHLDMPLDFCLNIAKLLMDHERESVGFHFLTIIHERFKSSENIGKVLILHTDMLLQRKEELLAKEKIEEIFLAHQTGRQLTAESMNWLHNILWRQAASSFEVQNYTDALQWYYYSLRFYSTDEMDLDFTKLQRNMACCYLNLQQLDKAKEAVAEAERHDPRNVFTQFYIFKIAVIEGNSERALQAIITLENILTDEESEDNDLVAERGSPTMLLSLAAQFALENGQQIVAEKALEYLAQHSEDQEQVLTAVKCLLRFLLPKIAEMPESEDKKKEMDRLLTCLNRAFVKLSQPFGEEALSLESRANEAQWFRKTAWNLAVQCDKDPVMMREFFILSYKMSQFCPSDQVILIARKTCLLMAVAVDLEQGRKASTAFEQTMFLSRALEEIQTCNDIHNFLKQTGTFSNDSCEKLLLLYEFEVRAKLNDPLLESFLESVWELPHLETKTFETIAIIAMEKPAHYPLIALKALKKALLLYKKEEPIDISQYSKCMHNLVNLSVPDGASNVELCPLEEVWGYFEDALSHISRTKDYPEMEILWLMVKSWNTGVLMFSRSKYASAEKWCGLALRFLNHLTSFKESYETQMNMLYSQLVEALSNNKGPVFHEHGYWSKSD

SEQ ID NO: 6351 - protein, 628 aa, Homo sapiens
MGSCARLLLLWGCTVVAAGLSGVAGVSSRCEKACNPRMGNLALGRKLWADTTCGQNATELYCFYSENTDLTCRQPKCDKCNAAYPHLAHLPSAMADSSFRFPRTWWQSAEDVHREKIQLDLEAEFYFTHLIVMFKSPRPAAMVLDRSQDFGKTWKPYKYFATNCSATFGLEDDVVKKGAICTSKYSSPFPCTGGEVIFKALSPPYDTENPYSAKVQEQLKITNLRVQLLKRQSCPCQRNDLNEEPQHFTHYAIYDFIVKGSCFCNGHADQCIPVHGFRPVKAPGTFHMVHGKCMCKHNTAGSHCQHCAPLYNDRPWEAADGKTGAPNECRTCKCNGHADTCHFDVNVWEASGNRSGGVCDDCQHNTEGQYCQRCKPGFYRDLRRPFSAPDACKPCSCHPVGSAVLPANSVTFCDPSNGDCPCKPGVAGRRCDRCMVGYWGFGDYGCRPCDCAGSCDPITGDCISSHTDIDWYHEVPDFRPVHNKSEPAWEWEDAQGFSALLHSGKCECKEQTLGNAKAFCGMKYSYVLKIKILSAHDKGTHVEVNVKIKKVLKSTKLKIFRGKRTLYPESWTDRGCTCPILNPGLEYLVAGHEDIRTGKLIVNMKSFVQHWKPSLGRKVMDILKRECK

SEQ ID NO: 6352 - protein, 647 aa, Homo sapiens
MPLVDFFCETCSKPWLVGWWDQFKRMLNRELTHLSEMSRSGNQVSEYISTTFLDKQNEVEIPSPTMKEREKQQAPRPRPSQPPPPPVPHLQPMSQITGLKKLMHSNSLNNSNIPRFGVKTDQEELLAQELENLNKWGLNIFCVSDYAGGRSLTCIMYMIFQERDLLKKFRIPVDTMVTYMLTLEDHYHADVAYHNSLHAADVLQSTHVLLATPALDAVFTDLEILAALFAAAIHDVDHPGVSNQFLINTNSELALMYNDESVLENHHLAVGFKLLQEDNCDIFQNLSKRQRQSLRKMVIDMVLATDMSKHMTLLADLKTMVETKKVTSSGVLLLDNYSDRIQVLRNMVHCADLSNPTKPLELYRQWTDRIMAEFFQQGDRERERGMEISPMCDKHTASVEKSQVGFIDYIVHPLWETWADLVHPDAQEILDTLEDNRDWYYSAIRQSPSPPPEEESRGPGHPPLPDKFQFELTLEEEEEEEISMAQIPCTAQEALTAQGLSGVEEALDATIAWEASPAQESLEVMAQEASLEAELEAVYLTQQAQSTGSAPVAPDEFSSREEFVVAVSHSSPSALALQSPLLPAWRTLSVSEHAPGLPGLPSTAAEVEAQREHQAAKRACSACAGTFGEDTSALPAPGGGGSGGDPT

SEQ ID NO: 6353 - protein, 138 aa, Homo sapiens
MQLPPFDMWKDYFNLSQVVWALIASRGQRLETQEIEEPSPGPPLGQDQGLGAPGANGGLGTLCNFCKHNGESRHVYSSHQLKTPDGVVVCPILRHYVCPVCGATGDQAHTLKYCPLNGGQQSLYRRSGRNSAGRRVKR

SEQ ID NO: 6354 - protein, 763 aa, Homo sapiens
MDHLNEATQGKEHSEMSNNVSDPKGPPAKIARLEQNGSPLGRGRLGSTGAKMQGVPLKHSGHLMKTNLRKGTMLPVFCVVEHYENAIEYDCKEEHAEFVLVRKDMLFNQLIEMALLSLGYSHSSAAQAKGLIQVGKWNPVPLSYVTDAPDATVADMLQDVYHVVTLKIQLHSCPKLEDLPPEQWSHTTVRNALKDLLKDMNQSSLAKECPLSQSMISSIVNSTYYANVSAAKCQEFGRWYKHFKKTKDMMVEMDSLSELSQQGANHVNFGQQPVPGNTAEQPPSPAQLSHGSQPSVRTPLPNLHPGLVSTPISPQLVNQQLVMAQLLNQQYAVNRLLAQQSLNQQYLNHPPPVSRSMNKPLEQQVSTNTEVSSEIYQWVRDELKRAGISQAVFARVAFNRTQGLLSEILRKEEDPKTASQSLLVNLRAMQNFLQLPEAERDRIYQDERERSLNAASAMGPAPLISTPPSRPPQVKTATIATERNGKPENNTMNINASIYDEIQQEMKRAKVSQALFAKVAATKSQGWLCELLRWKEDPSPENRTLWENLSMIRRFLSLPQPERDAIYEQESNAVHHHGDRPPHIIHVPAEQIQQQQQQQQQQQQQQQAPPPPQPQQQPQTGPRLPPRQPTVASPAESDEENRQKTRPRTKISVEALGILQSFIQDVGLYPDEEAIQTLSAQLDLPKYTIIKFFQNQRYYLKHHGKLKDNSGLEVDVAEYKEEELLKDLEESVQDKNTNTLFSVKLEEELSVEGNTDINTDLKD

SEQ ID NO: 6355 - protein, 916 aa, Homo sapiens
MAEGGGCRERPDAETQKSELGPLMRTTLQRGAQWYLIDSRWFKQWKKYVGFDSWDMYNVGEHNLFPGPIDNSGLFSDPESQTLKEHLIDELDYVLVPTEAWNKLLNWYGCVEGQQPIVRKVVEHGLFVKHCKVEVYLLELKLCENSDPTNVLSCHFSKADTIATIEKEMRKLFNIPAERETRLWNKYMSNTYEQLSKLDNTVQDAGLYQGQVLVIEPQNEDGTWPRQTLQSNGSGFSASYNCQEPPSSHIQPGLCGLGNLGNTCFMNSALQCLSNTAPLTDYFLKDEYEAEINRDNPLGMKGEIAEAYAELIKQMWSGRDAHVAPRMFKTQVGRFAPQFSGYQQQDSQELLAFLLDGLHEDLNRVKKKPYLELKDANGRPDAVVAKEAWENHRLRNDSVIVDTFHGLFKSTLVCPECAKVSVTFDPFCYLTLPLPLKKDRVMEVFLVPADPHCRPTQYRVTVPLMGAVSDLCEALSRLSGIAAENMVVADVYNHRFHKIFQMDEGLNHIMPRDDIFVYEVCSTSVDGSECVTLPVYFRERKSRPSSTSSASALYGQPLLLSVPKHKLTLESLYQAVCDRISRYVKQPLPDEFGSSPLEPGACNGSRNSCEGEDEEEMEHQEEGKEQLSETEGSGEDEPGNDPSETTQKKIKGQPCPKRLFTFSLVNSYGTADINSLAADGKLLKLNSRSTLAMDWDSETRRLYYDEQESEAYEKHVSMLQPQKKKKTTVALRDCIELFTTMETLGEHDPWYCPNCKKHQQATKKFDLWSLPKILVVHLKRFSYNRYWRDKLDTVVEFPIRGLNMSEFVCNLSARPYVYDLIAVSNHYGAMGVGHYTAYAKNKLNGKWYYFDDSNVSLASEDQIVTKAAYVLFYQRRDDEFYKTPSLSSSGSSDGGTRPSSSQQGFGDDEACSMDTN

SEQ ID NO: 6356 - protein, 569 aa, Homo sapiens
MATEGGGKEMNEIKTQFTTREGLYKLLPHSEYSRPNRVPFNSQGSNPVRVSFVNLNDQSGNGDRLCFNVGRELYFYIYKGVRKAADLSKPIDKRIYKGTQPTCHDFNHLTATAESVSLLVGFSAGQVQLIDPIKKETSKLFNEERLIDKSRVTCVKWVPGSESLFLVAHSSGNMYLYNVEHTCGTTAPHYQLLKQGESFAVHTCKSKSTRNPLLKWTVGEGALNEFAFSPDGKFLACVSQDGFLRVFNFDSVELHGTMKSYFGGLLCVCWSPDGKYIVTGGEDDLVTVWSFVDCRVIARGHGHKSWVSVVAFDPYTTSVEEGDPMEFSGSDEDFQDLLHFGRDRANSTQSRLSKRNSTDSRPVSVTYRFGSVGQDTQLCLWDLTEDILFPHQPLSRARTHTNVMNATSPPAGSNGNSVTTPGNSVPPPLPRSNSLPHSAVSNAGSKSSVMDGAIASGVSKFATLSLHDRKERHHEKDHKRNHSMGHISSKSSDKLNLVTKTKTDPAKTLGTPLCPRMEDVPLLEPLICKKIAHERLTVLIFLEDCIVTACQEGFICTWGRPGKVVSFNP

SEQ ID NO: 6357 - protein, 2458 aa, Homo sapiens
MVLLLCLSCLIFSCLTFSWLKIWGKMTDSKPITKSKSEANLIPSQEPFPASDNSGETPQRNGEGHTLPKTPSQAEPASHKGPKDAGRRRNSLPPSHQKPPRNPLSSSDAAPSPELQANGTGTQGLEATDTNGLSSSARPQGQQAGSPSKEDKKQANIKRQLMTNFILGSFDDYSSDEDSVAGSSRESTRKGSRASLGALSLEAYLTTGEAETRVPTMRPSMSGLHLVKRGREHKKLDLHRDFTVASPAEFVTRFGGDRVIEKVLIANNGIAAVKCMRSIRRWAYEMFRNERAIRFVVMVTPEDLKANAEYIKMADHYVPVPGGPNNNNYANVELIVDIAKRIPVQAVWAGWGHASENPKLPELLCKNGVAFLGPPSEAMWALGDKIASTVVAQTLQVPTLPWSGSGLTVEWTEDDLQQGKRISVPEDVYDKGCVKDVDEGLEAAERIGFPLMIKASEGGGGKGIRKAESAEDFPILFRQVQSEIPGSPIFLMKLAQHARHLEVQILADQYGNAVSLFGRDCSIQRRHQKIVEEAPATIAPLAIFEFMEQCAIRLAKTVGYVSAGTVEYLYSQDGSFHFLELNPRLQVEHPCTEMIADVNLPAAQLQIAMGVPLHRLKDIRLLYGESPWGVTPISFETPSNPPLARGHVIAARITSENPDEGFKPSSGTVQELNFRSSKNVWGYFSVAATGGLHEFADSQFGHCFSWGENREEAISNMVVALKELSIRGDFRTTVEYLINLLETESFQNNDIDTGWLDYLIAEKVQAEKPDIMLGVVCGALNVADAMFRTCMTDFLHSLERGQVLPADSLLNLVDVELIYGGVKYILKVARQSLTMFVLIMNGCHIEIDAHRLNDGGLLLSYNGNSYTTYMKEEVDSYRITIGNKTCVFEKENDPTVLRSPSAGKLTQYTVEDGGHVEAGSSYAEMEVMKMIMTLNVQERGRVKYIKRPGAVLEAGCVVARLELDDPSKVHPAEPFTGELPAQQTLPILGEKLHQVFHSVLENLTNVMSGFCLPEPVFSIKLKEWVQKLMMTLRHPSLPLLELQEIMTSVAGRIPAPVEKSVRRVMAQYASNITSVLCQFPSQQIATILDCHAATLQRKADREVFFINTQSIVQLVQRYRSGIRGYMKTVVLDLLRRYLRVEHHFQQAHYDKCVINLREQFKPDMSQVLDCIFSHAQVAKKNQLVIMLIDELCGPDPSLSDELISILNELTQLSKSEHCKVALRARQILIASHLPSYELRHNQVESIFLSAIDMYGHQFCPENLKKLILSETTIFDVLPTFFYHANKVVCMASLEVYVRRGYIAYELNSLQHRQLPDGTCVVEFQFMLPSSHPNRMTVPISITNPDLLRHSTELFMDSGFSPLCQRMGAMVAFRRFEDFTRNFDEVISCFANVPKDTPLFSEARTSLYSEDDCKSLREEPIHILNVSIQCADHLEDEALVPILRTFVQSKKNILVDYGLRRITFLIAQEKEFPKFFTFRARDEFAEDRIYRHLEPALAFQLELNRMRNFDLTAVPCANHKMHLYLGAAKVKEGVEVTDHRFFIRAIIRHSDLITKEASFEYLQNEGERLLLEAMDELEVAFNNTSVRTDCNHIFLNFVPTVIMDPFKIEESVRYMVMRYGSRLWKLRVLQAEVKINIRQTTTGSAVPIRLFITNESGYYLDISLYKEVTDSRSGNIMFHSFGNKQGPQHGMLINTPYVTKDLLQAKRFQAQTLGTTYIYDFPEMFRQALFKLWGSPDKYPKDILTYTELVLDSQGQLVEMNRLPGGNEVGMVAFKMRFKTQEYPEGRDVIVIGNDITFRIGSFGPGEDLLYLRASEMARAEGIPKIYVAANSGARIGMAEEIKHMFHVAWVDPEDPHKGFKYLYLTPQDYTRISSLNSVHCKHIEEGGESRYMITDIIGKDDGLGVENLRGSGMIAGESSLAYEEIVTISLVTCRAIGIGAYLVRLGQRVIQVENSHIILTGASALNKVLGREVYTSNNQLGGVQIMHYNGVSHITVPDDFEGVYTILEWLSYMPKDNHSPVPIITPTDPIDREIEFLPSRAPYDPRWMLAGRPHPTLKGTWQSGFFDHGSFKEIMAPWAQTVVTGRARLGGIPVGVIAVETRTVEVAVPADPANLDSEAKIIQQAGQVWFPDSAYKTAQAVKDFNREKLPLMIFANWRGFSGGMKDMYDQVLKFGAYIVDGLRQYKQPILIYIPPYAELRGGSWVVIDATINPLCIEMYADKESRGGVLEPEGTVEIKFRKKDLIKSMRRIDPAYKKLMEQLGEPDLSDKDRKDLEGRLKAREDLLLPIYHQVAVQFADFHDTPGRMLEKGVISDILEWKTARTFLYWRLRRLLLEDQVKQEILQASGELSHVHIQSMLRRWFVETEGAVKAYLWDNNQVVVQWLEQHWQAGDGPRSTIRENITYLKHDSVLKTIRGLVEENPEVAVDCVIYLSQHISPAERAQVVHLLSTMDSPAST

SEQ ID NO: 6358 - protein, 530 aa, Homo sapiens
MSLKWTSVFLLIQLSCYFSSGSCGKVLVWPTEYSHWINMKTILEELVQRGHEVTVLTSSASTLVNASKSSAIKLEVYPTSLTKNYLEDSLLKILDRWIYGVSKNTFWSYFSQLQELCWEYYDYSNKLCKDAVLNKKLMMKLQESKFDVILADALNPCGELLAELFNIPFLYSLRFSVGYTFEKNGGGFLFPPSYVPVVMSELSDQMIFMERIKNMIHMLYFDFWFQIYDLKKWDQFYSEVLGRPTTLFETMGKAEMWLIRTYWDFEFPRPFLPNVDFVGGLHCKPAKPLPKEMEEFVQSSGENGIVVFSLGSMISNMSEESANMIASALAQIPQKVLWRFDGKKPNTLGSNTRLYKWLPQNDLLGHPKTKAFITHGGTNGIYEAIYHGIPMVGIPLFADQHDNIAHMKAKGAALSVDIRTMSSRDLLNALKSVINDPVYKENVMKLSRIHHDQPMKPLDRAVFWIEFVMRHKGAKHLRVAAHNLTWIQYHSLDVIAFLLACVATVIFIITKFCLFCFRKLAKKGKKKKRD

SEQ ID NO: 6359 - protein, 455 aa, Homo sapiens
MLHPETSPGRGHLLAVLLALLGTTWAEVWPPQLQEQAPMAGALNRKESFLLLSLHNRLRSWVQPPAADMRRLDWSDSLAQLAQARAALCGIPTPSLASGLWRTLQVGWNMQLLPAGLASFVEVVSLWFAEGQRYSHAAGECARNATCTHYTQLVWATSSQLGCGRHLCSAGQTAIEAFVCAYSPGGNWEVNGKTIIPYKKGAWCSLCTASVSGCFKAWDHAGGLCEVPRNPCRMSCQNHGRLNISTCHCHCPPGYTGRYCQVRCSLQCVHGRFREEECSCVCDIGYGGAQCATKVHFPFHTCDLRIDGDCFMVSSEADTYYRARMKCQRKGGVLAQIKSQKVQDILAFYLGRLETTNEVIDSDFETRNFWIGLTYKTAKDSFRWATGEHQAFTSFAFGQPDNHGLVWLSAAMGFGNCVELQASAAFNWNDQRCKTRNRYICQFAQEHISRWGPGS

SEQ ID NO: 6360 - protein, 558 aa, Homo sapiens
MDSSTAMNQCSCRGMEENKERPKRQRQNNFPMFPSPKAWNFRGRKRKQSTQDEDAVSLCSLDISEPSNKRVKPLSRVTSLANLIPPVKATPLKRFSQTLQRSISFRSESRPDILAPRPWSRNAAPSSTKRRDSKLWSETFDVCVNQMLTSKEIKRQEAIFELSQGEEDLIEDLKLAKKAYHDPMLKLSIMTEQELNQIFGTLDSLIPLHEELLSQLRDVRKPDGSTEHVGPILVGWLPCLSSYDSYCSNQVAAKALLDHKKQDHRVQDFLQRCLESPFSRKLDLWNFLDIPRSRLVKYPLLLREILRHTPNDNPDQQHLEEAINIIQGIVAEINTKTGESECRYYKERLLYLEEGQKDSLIDSSRVLCCHGELKNNRGVKLHVFLFQEVLVITRAVTHNEQLCYQLYRQPIPVKDLLLEDLQDGEVRLGGSLRGAFSNNERIKNFFRVSFKNGSQSQTHSLQANDTFNKQQWLNCIRQAKETVLCAAGQAGVLDSEGSFLNPTTGSRELQGETKLEQMDQSDSESDCSMDTSEVSLDCERMEQTDSSCGNSRHGESNV

SEQ ID NO: 6361 - protein, 1047 aa, Homo sapiens
MALPSLLLLVAALAGGVRPPGARNLTLAVVLPEHNLSYAWAWPRVGPAVALAVEALGRALPVDLRFVSSELEGACSEYLAPLSAVDLKLYHDPDLLLGPGCVYPAASVARFASHWRLPLLTAGAVASGFSAKNDHYRTLVRTGPSAPKLGEFVVTLHGHFNWTARAALLYLDARTDDRPHYFTIEGVFEALQGSNLSVQHQVYAREPGGPEQATHFIRANGRIVYICGPLEMLHEILLQAQRENLTNGDYVFFYLDVFGESLRAGPTRATGRPWQDNRTREQAQALREAFQTVLVITYREPPNPEYQEFQNRLLIRAREDFGVELGPSLMNLIAGCFYDGILLYAEVLNETIQEGGTREDGLRIVEKMQGRRYHGVTGLVVMDKNNDRETDFVLWAMGDLDSGDFQPAAHYSGAEKQIWWTGRPIPWVKGAPPSDNPPCAFDLDDPSCDKTPLSTLAIVALGTGITFIMFGVSSFLIFRKLMLEKELASMLWRIRWEELQFGNSERYHKGAGSRLTLSLRGSSYGSLMTAHGKYQIFANTGHFKGNVVAIKHVNKKRIELTRQVLFELKHMRDVQFNHLTRFIGACIDPPNICIVTEYCPRGSLQDILENDSINLDWMFRYSLINDLVKGMAFLHNSIISSHGSLKSSNCVVDSRFVLKITDYGLASFRSTAEPDDSHALYAKKLWTAPELLSGNPLPTTGMQKADVYSFGIILQEIALRSGPFYLEGLDLSPKEIVQKVRNGQRPYFRPSIDRTQLNEELVLLMERCWAQDPAERPDFGQIKGFIRRFNKEGGTSILDNLLLRMEQYANNLEKLVEERTQAYLEEKRKAEALLYQILPHSVAEQLKRGETVQAEAFDSVTIYFSDIVGFTALSAESTPMQVVTLLNDLYTCFDAIIDNFDVYKVETIGDAYMVVSGLPGRNGQRHAPEIARMALALLDAVSSFRIRHRPHDQLRLRIGVHTGPVCAGVVGLKMPRYCLFGDTVNTASRMESNGQALKIHVSSTTKDALDELGCFQLELRGDVEMKGKGKMRTYWLLGERKGPPGLL

SEQ ID NO: 6362 - protein, 1393 aa, Homo sapiens
MGCTTSVILFKGIRTVFERNCAYMCKQQGENNALEYTAYNWTKEDSELLISSWLAKPKLIEPLDYENVIVQKKTQILNDCLREMLLFPYDDFQTAILRRQGRYICSTVPAKAEEEAQSLFVTECIKTYNSDWHLVNYKYEDYSGEFRQLPNKVVKLDKLPVHVYEVDEEVDKDEDAASLGSQKGGITKHGWLYKGNMNSAISVTMRSFKRRFFHLIQLGDGSYNLNFYKDEKISKEPKGSIFLDSCMGVVQNNKVRRFAFELKMQDKSSYLLAADSEVEMEEWITILNKILQLNFEAAMQEKRNGDSHEDDEQSKLEGSGSGLDSYLPELAKSAREAEIKLKSESRVKLFYLDPDAQKLDFSSAEPEVKSFEEKFGKRILVKCNDLSFNLQCCVAENEEGPTTNVEPFFVTLSLFDIKYNRKISADFHVDLNHFSVRQMLATTSPALMNGSGQSPSVLKGILHEAAMQYPKQGIFSVTCPHPDIFLVARIEKVLQGSITHCAEPYMKSSDSSKVAQKVLKNAKQACQRLGQYRMPFAWAARTLFKDASGNLDKNARFSAIYRQDSNKLSNDDMLKLLADFRKPEKMAKLPVILGNLDITIDNVSSDFPNYVNSSYIPTKQFETCSKTPITFEVEEFVPCIPKHTQPYTIYTNHLYVYPKYLKYDSQKSFAKARNIAICIEFKDSDEEDSQPLKCIYGRPGGPVFTRSAFAAVLHHHQNPEFYDEIKIELPTQLHEKHHLLLTFFHVSCDNSSKGSTKKRDVVETQVGYSWLPLLKDGRVVTSEQHIPVSANLPSGYLGYQELGMGRHYGPEIKWVDGGKPLLKISTHLVSTVYTQDQHLHNFFQYCQKTESGAQALGNELVKYLKSLHAMEGHVMIAFLPTILNQLFRVLTRATQEEVAVNVTRVIIHVVAQCHEEGLESHLRSYVKYAYKAEPYVASEYKTVHEELTKSMTTILKPSADFLTSNKLLKYSWFFFDVLIKSMAQHLIENSKVKLLRNQRFPASYHHAVETVVNMLMPHITQKFRDNPEASKNANHSLAVFIKRCFTFMDRGFVFKQINNYISCFAPGDPKTLFEYKFEFLRVVCNHEHYIPLNLPMPFGKGRIQRYQDLQLDYSLTDEFCRNHFLVGLLLREVGTALQEFREVRLIAISVLKNLLIKHSFDDRYASRSHQARIATLYLPLFGLLIENVQRINVRDVSPFPVNAGMTVKDESLALPAVNPLVTPQKGSTLDNSLHKDLLGAISGIASPYTTSTPNINSVRNADSRGSLISTDSGNSLPERNSEKSNSLDKHQQSSTLGNSVVRCDKLDQSEIKSLLMCFLYILKSMSDDALFTYWNKASTSELMDFFTISEVCLHQFQYMGKRYIASLTKCVALLLPAWNRNDACQIAAAGQPG

SEQ ID NO: 6363 - protein, 2179 aa, Homo sapiens
MVNENTRMYIPEENHQGSNYGSPRPAHANMNANAAAGLAPEHIPTPGAALSWQAAIDAARQAKLMGSAGNATISTVSSTQRKRQQYGKPKKQGSTTATRPPRALLCLTLKNPIRRACISIVEWKPFEIIILLTIFANCVALAIYIPFPEDDSNATNSNLERVEYLFLIIFTVEAFLKVIAYGLLFHPNAYLRNGWNLLDFIIVVVGLFSAILEQATKADGANALGGKGAGFDVKALRAFRVLRPLRLVSGVPSLQVVLNSIIKAMVPLLHIALLVLFVIIIYAIIGLELFMGKMHKTCYNQEGIADVPAEDDPSPCALETGHGRQCQNGTVCKPGWDGPKHGITNFDNFAFAMLTVFQCITMEGWTDVLYWVNDAVGRDWPWIYFVTLIIIGSFFVLNLVLGVLSGEFSKEREKAKARGDFQKLREKQQLEEDLKGYLDWITQAEDIDPENEDEGMDEEKPRNMSMPTSETESVNTENVAGGDIEGENCGARLAHRISKSKFSRYWRRWNRFCRRKCRAAVKSNVFYWLVIFLVFLNTLTIASEHYNQPNWLTEVQDTANKALLALFTAEMLLKMYSLGLQAYFVSLFNRFDCFVVCGGILETILVETKIMSPLGISVLRCVRLLRIFKITRYWNSLSNLVASLLNSVRSIASLLLLLFLFIIIFSLLGMQLFGGKFNFDEMQTRRSTFDNFPQSLLTVFQILTGEDWNSVMYDGIMAYGGPSFPGMLVCIYFIILFICGNYILLNVFLAIAVDNLADAESLTSAQKEEEEEKERKKLARTASPEKKQELVEKPAVGESKEEKIELKSITADGESPPATKINMDDLQPNENEDKSPYPNPETTGEEDEEEPEMPVGPRPRPLSELHLKEKAVPMPEASAFFIFSSNNRFRLQCHRIVNDTIFTNLILFFILLSSISLAAEDPVQHTSFRNHILFYFDIVFTTIFTIEIALKMTAYGAFLHKGSFCRNYFNILDLLVVSVSLISFGIQSSAINVVKILRVLRVLRPLRAINRAKGLKHVVQCVFVAIRTIGNIVIVTTLLQFMFACIGVQLFKGKLYTCSDSSKQTEAECKGNYITYKDGEVDHPIIQPRSWENSKFDFDNVLAAMMALFTVSTFEGWPELLYRSIDSHTEDKGPIYNYRVEISIFFIIYIIIIAFFMMNIFVGFVIVTFQEQGEQEYKNCELDKNQRQCVEYALKARPLRRYIPKNQHQYKVWYVVNSTYFEYLMFVLILLNTICLAMQHYGQSCLFKIAMNILNMLFTGLFTVEMILKLIAFKPKHYFCDAWNTFDALIVVGSIVDIAITEVNPAEHTQCSPSMGPSCSHPPLAVLTAPPVADGFQNAEENSRISITFFRLFRVMRLVKLLSRGEGIRTLLWTFIKSFQALPYVALLIVMLFFIYAVIGMQVFGKIALNDTTEINRNNNFQTFPQAVLLLFRCATGEAWQDIMLACMPGKKCAPESEPSNSTEGETPCGSSFAVFYFISFYMLCAFLIINLFVAVIMDNFDYLTRDWSILGPHHLDEFKRIWAEYDPEAKGRIKHLDVVTLLRRIQPPLGFGKLCPHRVACKRLVSMNMPLNSDGTVMFNATLFALVRTALRIKTEEGPSPSEAHQGAEDPFRPAGNLEQANEELRAIIKKIWKRTSMKLLDQVVPPAGDDEVTVGKFYATFLIQEYFRKFKKRKEQGLVGKPSQRNALSLQAGLRTLHDIGPEIRRAISGDLTAEEELDKAMKEAVSAASEDDIFRRAGGLFGNHVSYYQSDGRSAFPQTFTTQRPLHINKAGSSQGDTESPSHEKLVDSTFTPSSYSSTGSNANINNANNTALGRLPRPAGYPSTVSTVEGHGPPLSPAIRVQEVAWKLSSNRCHSRESQAAMAGQEETSQDETYEVKMNHDTEACSEPSLLSTEMLSYQDDENRQLTLPEEDKRDIRQSPKRGFLRSASLGRRASFHLECLKRQKDRGGDISQKTVLPLHLVHHQALAVAGLSPLLQRSHSPASFPRPFATPPATPGSRGWPPQPVPTLRLEGVESSEKLNSSFPSIHCGSWAETTPGGGGSSAARRVRPVSLMVPSQAGAPGRQFHGSASSLVEAVLISEGLGQFAQDPKFIEVTTQELADACDMTIEEMESAADNILSGGAPQSPNGALLPFVNCRDAGQDRAGGEEDAGCVRARGRPSEEELQDSRVYVSSL

SEQ ID NO: 6364 - protein, 3396 aa, Homo sapiens
MTAWLISLMSIEVLLLAVRHLSLHIEPEEGSLAGGTWITVIFDGLELGVLYPNNGSQLEIHLVNVNMVVPALRSVPCDVFPVFLDLPVVTCRTRSVLSEAHEGLYFLEAYFGGQLVSSPNPGPRDSCTFKFSKAQTPIVHQVYPPSGVPGKLIHVYGWIITGRLETFDFDAEYIDSPVILEAQGDKWVTPCSLINRQMGSCYPIQEDHGLGTLQCHVEGDYIGSQNVSFSVFNKGKSMVHKKAWLISAKQDLFLYQTHSEILSVFPETGSLGGRTNITITGDFFDNSAQVTIAGIPCDIRHVSPRKIECTTRAPGKDVRLTTPQPGNRGLLFEVGDAVEGLELTEATPGYRWQIVPNASSPFGFWSQEGQPFRARLSGFFVAPETNNYTFWIQADSQASLHFSWSEEPRTKVKVASISVGTADWFDSWEQNRDEGTWQQKTPKLELLGGAMYYLEAEHHGIAPSRGMRIGVQIHNTWLNPDVVTTYLREKHQIRVRAQRLPEVQVLNVSGRGNFFLTWDNVSSQPIPANATAHLIQTTIEELLAVKCKLEPLWSNILLRLGFERGPEVSNSDGDLTSGTEPFCGRFSLRQPRHLVLTPPAAQKGYRLDQYTHLCLAYKGHMNKILKMIVSFTIGFQNMVKNTTCDWSLTRTSPESWQFDCTDLWETCVRCFGDLQPPPANSPVLVHQINLLPLAQETGLFYVDEIIIADTNVTVSQADSGTARPGGNLVESVSVVGSPPVYSVTSWLAGCGTELPLITARSVPTEGTEEGSGLVLVTTQRRQRTSPPLGGHFRIQLPNTVISDVPVQISAHHLHQLLQNNADDFTSRYLNASDFTVKEDLYTCYEHVWTLSWSTQIGDLPNFIRVSDENLTGVNPAAATRVVYDGGVFLGPIFGDMLATANQHTQVVVRVNDVPAHCPGSCSFQYLQGSTPCVHSVWYSIDGDINLMIYITGTGFSGDSQFLQVTVNKTSCKVIFSNQTNVVCQTDLLPVGMHRILMLVRPSGLAISATGEDLFLNVKPRLDMVEPSRAADIGGLWATIRGSSLEGVSLILFGSYSCAINVATSNSSRIQCKVPPRGKDGRIVNVTVIRGDYSAVLPRAFTYVSSLNPVIVTLSRNISNIAGGETLVIGVARLMNYTDLDVEVHVQDALAPVHTQSAWGLEVALPPLPAGLHRISVSINGVSIHSQGVDLHIQYLTEVFSIEPCCGSLLGGTILSISGIGFSRDPALVWVLVGNRSCDIVNLTEASIWCETLPAPQIPDAGAPTVPAAVEVWAGNRFFARGPSPSLVGKGFTFMYEAAATPVVTAMQGEITNSSLSLHVGGSNLSNSVILLGNLNCDVETQSFQGNVSLSGCSIPLHSLEAGIYPLQVRQKQMGFANMSVVLQQFAVMPRIMAIFPSQGSACGGTILTVRGLLLNSRRRSVRVDLSGPFTCVILSLGDHTILCQVSLEGDPLPGASFSLNVTVLVNGLTSECQGNCTLFIREEASPVMDALSTNTSGSLTTVLIRGQRLATTADEPMVFVDDQLPCNVTFFNASHVVCQTRDLAPGPHYLSVFYTRNGYACSGNVSRHFYIMPQVFHYFPKNFSLHGGSLLTIEGTGLRGQNTTSVYIDQQTCLTVNIGAELIRCIVPTGNGSVALEIEVDGLWYHIGVIGYNKAFTPELISISQSDDILTFAVAQISGAANIDIFIGMSPCVGVSGNHTVLQCVVPSLPAGEYHVRGYDCIRGWASSALVFTSRVIITAVTENFGCLGGRLVHVFGAGFSPGNVSAAVCGAPCRVLANATVSAFSCLVLPLDVSLAFLCGLKREEDSCEAARHTYVQCDLTVAMATEQLLESWPYLYICEESSQCLFVPDHWAESMFPSFSGLFISPKLERDEVLIYNSSCNITMETEAEMECETPNQPITVKITEIRKRWGQNTQGNFSLQFCRRWSRTHSWFPERLPQDGDNVTVENGQLLLLDTNTSILNLLHIKGGKLIFMAPGPIELRAHAILVSDGGELRIGSEDKPFQGRAQITLYGSSYSTPFFPYGVKFLAVRNGTLSLHGSLPEVIVTCLRATAHALDTVLALEDAVDWNPGDEVVIISGTGVKGAKPMEEIVTVETVQDTDLYLKSPLRYSHNFTENWVAGEHHILKATVALLSRSITIQGNLTNEREKLLVSCQEANAPEGNLQHCLYSMSEKMLGSRDMGARVIVQSFPEEPSQVQLKGVQFQVLGQAFHKHLSSLTLVGAMRESFIQGCTVRNSFSRGLSMCGTLGLKVDSNVFYNILGHALLVGTCTEMRYISWEAIHGRKDDWSGHGNIIRNNVIIQVSGAEGLSNPEMLTPSGIYICSPTNVIEGNRVCGAGYGYFFHLMTNQTSQAPLLSFTQNIAHSCTRYGLFVYPKFQPPWDNVTGTTLFQSFTVWESAGGAQIFRSSNLRLKNFKVYSCRDFGIDVLESDANTSVTDSLLLGHFAHKGSLCMSSGIKTPKRWELMVSNTTFVNFDLINCVAIRTCSDCSQGQGGFTVKTSQLKFTNSSNLVAFPFPHAAILEDLDGSLSGKNRSHILASMETLSASCLVNSSFGRVVHGSACGGGVLFHRMSIGLANTPEVSYDLTMTDSRNKTTTVNYVRDTLSNPRGWMALLLDQETYSLQSENLWINRSLQYSATFDNFAPGNYLLLVHTDLPPYPDILLRCGSRVGLSFPFLPSPGQNQGCDWFFNSQLRQLTYLVSGEGQVQVILRVKEGMPPTISASTSAPESALKWSLPETWQGVEEGWGGYNNTIPGPGDDVLILPNRTVLVDTDLPFFKGLYVMGTLDFPVDRSNVLSVACMVIAGGELKVGTLENPLEKEQKLLILLRASEGVFCDRMNGIHIDPGTIGVYGKVHLYSAYPKNSWTHLGADIASGNERIIVEDAVDWRPHDKIVLSSSSYEPHEAEVLTVKEVKGHHVRIYERLKHRHIGSVHVTEDGRHIRLAAEVGLLTRNIQIQPDVSCRGRLFVGSFRKSSREEFSGVLQLLNVEIQNFGSPLYSSVEFSNVSAGSWIISSTLHQSCGGGIHAAASHGVLLNDNIVFGTAGHGIDLEGQAYTVTNNLVVLMTQPAWSTIWVAGIKVNQVKDINLHGNVVAGSERLGFHIRGHKCSSCELLWSDNVAHSSLHGLHLYKESGLDNCTRISGFLAFKNFDYGAMLHVENSVEIENITLVDNTIGLLAVVYVFSAPQNSVKKVQIVLRNSVIVATSSSFDCIQDKVKPHSANLTSTDRAPSNPRGGRIGILWPVFTSEPNQWPQEPWHKVRNDHSISGIMKLQDVTFSSFVKSCYSDDLDVCILPNAENSGIMHPITAERTRMLKIKDKNKFYFPSLQPRKDLGKVVCPELDCASPRKYLFKDLDGRALGLPPPVSVFPKTEAEWTASFFNAVTTEQALKISE

SEQ ID NO: 6365 - protein, 1158 aa, Homo sapiens
MSADSSPLVGSTPTGYGTLTIGTSIDPLSSSVSSVRLSGYCGSPWRVIGYHVVVWMMAGIPLLLFRWKPLWGVRLRLRPCNLAHAETLVIEIRDKEDSSWQLFTVQVQTEAIGEGSLEPSPQSQAEDGRSQAAVGAVPEGAWKDTAQLHKSEEAKRVLRYYLFQGQRYIWIETQQAFYQVSLLDHGRSCDDVHRSRHGLSLQDQMVRKAIYGPNVISIPVKSYPQLLVDEALNPYYGFQAFSIALWLADHYYWYALCIFLISSISICLSLYKTRKQSQTLRDMVKLSMRVCVCRPGGEEEWVDSSELVPGDCLVLPQEGGLMPCDAALVAGECMVNESSLTGESIPVLKTALPEGLGPYCAETHRRHTLFCGTLILQARAYVGPHVLAVVTRTGFCTAKGGLVSSILHPRPINFKFYKHSMKFVAALSVLALLGTIYSIFILYRNRVPLNEIVIRALDLVTVVVPPALPAAMTVCTLYAQSRLRRQGIFCIHPLRINLGGKLQLVCFDKTGTLTEDGLDVMGVVPLKGQAFLPLVPEPRRLPVGPLLRALATCHALSRLQDTPVGDPMDLKMVESTGWVLEEEPAADSAFGTQVLAVMRPPLWEPQLQAMEEPPVPVSVLHRFPFSSALQRMSVVVAWPGATQPEAYVKGSPELVAGLCNPETVPTDFAQMLQSYTAAGYRVVALASKPLPTVPSLEAAQQLTRDTVEGDLSLLGLLVMRNLLKPQTTPVIQALRRTRIRAVMVTGDNLQTAVTVARGCGMVAPQEHLIIVHATHPERGQPASLEFLPMESPTAVNGVKVLVQGTVFARMAPEQKTELVCELQKLQYCVGMCGDGANDCGALKAADVGISLSQAEASVVSPFTSSMASIECVPMVIREGRCSLDTSFSVFKYMALYSLTQFISVLILYTINTNLGDLQFLAIDLVITTTVAVLMSRTGPALVLGRVRPPGALLSVPVLSSLLLQMVLVTGVQLGGYFLTLAQPWFVPLNRTVAAPDNLPNYENTVVFSLSSFQYLILAAAVSKGAPFRRPLYTNERARPVPPRLPAPPPAQAGLQEALQAAGTRAGRAALAAAARRPPEVVQAHGHPRHWNSLPLSHQLDPSPATPPPPPPTSLRLATVYTPPPRPPPPWGSVDYCPLPWTIPRRGGSPQLPSVLLSV

SEQ ID NO: 6366 - protein, 1665 aa, Homo sapiens
MSAGGRDEERRKLADIIHHWNANRLDLFEISQPTEDLEFHGVMRFYFQDKAAGNFATKCIRVSSTATTQDVIETLAEKFRPDMRMLSSPKYSLYEVHVSGERRLDIDEKPLVVQLNWNKDDREGRFVLKNENDAIPPKKAQSNGPEKQEKEGVIQNFKRTLSKKEKKEKKKREKEALRQASDKDDRPFQGEDVENSRLAAEVYKDMPETSFTRTISNPEVVMKRRRQQKLEKRMQEFRSSDGRPDSGGTLRIYADSLKPNIPYKTILLSTTDPADFAVAEALEKYGLEKENPKDYCIARVMLPPGAQHSDEKGAKEIILDDDECPLQIFREWPSDKGILVFQLKRRPPDHIPKKTKKHLEGKTPKGKERADGSGYGSTLPPEKLPYLVELSPGRRNHFAYYNYHTYEDGSDSRDKPKLYRLQLSVTEVGTEKLDDNSIQLFGPGIQPHHCDLTNMDGVVTVTPRSMDAETYVEGQRISETTMLQSGMKVQFGASHVFKFVDPSQDHALAKRSVDGGLMVKGPRHKPGIVQETTFDLGGDIHSGTALPTSKSTTRLDSDRVSSASSTAERGMVKPMIRVEQQPDYRRQESRTQDASGPELILPASIEFRESSEDSFLSAIINYTNSSTVHFKLSPTYVLYMACRYVLSNQYRPDISPTERTHKVIAVVNKMVSMMEGVIQKQKNIAGALAFWMANASELLNFIKQDRDLSRITLDAQDVLAHLVQMAFKYLVHCLQSELNNYMPAFLDDPEENSLQRPKIDDVLHTLTGAMSLLRRCRVNAALTIQLFSQLFHFINMWLFNRLVTDPDSGLCSHYWGAIIRQQLGHIEAWAEKQGLELAADCHLSRIVQATTLLTMDKYAPDDIPNINSTCFKLNSLQLQALLQNYHCAPDEPFIPTDLIENVVTVAENTADELARSDGREVQLEEDPDLQLPFLLPEDGYSCDVVRNIPNGLQEFLDPLCQRGFCRLIPHTRSPGTWTIYFEGADYESHLLRENTELAQPLRKEPEIITVTLKKQNGMGLSIVAAKGAGQDKLGIYVKSVVKGGAADVDGRLAAGDQLLSVDGRSLVGLSQERAAELMTRTSSVVTLEVAKQGAIYHGLATLLNQPSPMMQRISDRRGSGKPRPKSEGFELYNNSTQNGSPESPQLPWAEYSEPKKLPGDDRLMKNRADHRSSPNVANQPPSPGGKSAYASGTTAKITSVSTGNLCTEEQTPPPRPEAYPIPTQTYTREYFTFPASKSQDRMAPPQNQWPNYEEKPHMHTDSNHSSIAIQRVTRSQEELREDKAYQLERHRIEAAMDRKSDSDMWINQSSSLDSSTSSQEHLNHSSKSVTPASTLTKSGPGRWKTPAAIPATPVAVSQPIRTDLPPPPPPPPVHYAGDFDGMSMDLPLPPPPSANQIGLPSAQVAAAERRKREEHQRWYEKEKARLEEERERKRREQERKLGQMRTQSLNPAPFSPLTAQQMKPEKPSTLQRPQETVIRELQPQQQPRTIERRDLQYITVSKEELSSGDSLSPDPWKRDAKEKLEKQQQMHIVDMLSKEIQELQSKPDRSAEESDRLRKLMLEWQFQKRLQESKQKDEDDEEEEDDDVDTMLIMQRLEAERRARQTAMPAISVLDLLQDEERRRQQQLEEMRKREAEDRARQEEERRRQEEERTKRDAEEKVMVL

SEQ ID NO: 6367 - protein, 918 aa, Homo sapiens
MTTESGSDSESKPDQEAEPQEAAGAQGRAGAPVPEPPKEEQQQALEQFAAAAAHSTPVRREVTDKEQEFAARAAKQLEYQQLEDDKLSQKSSSSKLSRSPLKIVKKPKSMQCKVILLDGSEYTCDVEKRSRGQVLFDKVCEHLNLLEKDYFGLTYRDAENQKNWLDPAKEIKKQVRSGAWHFSFNVKFYPPDPAQLSEDITRYYLCLQLRDDIVSGRLPCSFVTLALLGSYTVQSELGDYDPDECGSDYISEFRFAPNHTKELEDKVIELHKSHRGMTPAEAEMHFLENAKKLSMYGVDLHHAKDSEGVEIMLGVCASGLLIYRDRLRINRFAWPKVLKISYKRNNFYIKIRPGEFEQFESTIGFKLPNHRAAKRLWKVCVEHHTFFRLLLPEAPPKKFLTLGSKFRYSGRTQAQTRRASALIDRPAPYFERSSSKRYTMSRSLDGASVNENHEIYMKDSMSAAEVGTGQYATTKGISQTNLITTVTPEKKAEEERDEEEDKRRKGEEVTPISAIRHEGKTDSERTDTAADGETTATESDQEEDAELKAQELEKTQDDLMKHQTNISELKRTFLETSTDTAVTNEWEKRLSTSPVRLAARQEDAPMIEPLVPEETKQSSGEKLMDGSEIFSLLESARKPTEFIGGVTSTSQSWVQKMETKTESSGIETEPTVHHLPLSTEKVVQETVLVEERRVVHASGDASYSAGDSGDAAAQPAFTGIKGKEGSALTEGAKEEGGEEVAKAVLEQEETAAASRERQEEQSAAIHISETLEQKPHFESSTVKTETISFGSVSPGGVKLEISTKEVPVVHTETKTITYESSQVDPGTDLEPGVLMSAQTITSETTSTTTTTHITKTVKGGISETRIEKRIVITGDADIDHDQALAQAIKEAKEQHPDMSVTKVVVHKETEITPEDGED

SEQ ID NO: 6368 - protein, 1709 aa, Homo sapiens
MGFLPKLLLLASFFPAGQASWGVSSPQDVQGVKGSCLLIPCIFSFPADVEVPDGITAIWYYDYSGQRQVVSHSADPKLVEARFRGRTEFMGNPEHRVCNLLLKDLQPEDSGSYNFRFEISEVNRWSDVKGTLVTVTEEPRVPTIASPVELLEGTEVDFNCSTPYVCLQEQVRLQWQGQDPARSVTFNSQKFEPTGVGHLETLHMAMSWQDHGRILRCQLSVANHRAQSEIHLQVKYAPKGVKILLSPSGRNILPGELVTLTCQVNSSYPAVSSIKWLKDGVRLQTKTGVLHLPQAAWSDAGVYTCQAENGVGSLVSPPISLHIFMAEVQVSPAGPILENQTVTLVCNTPNEAPSDLRYSWYKNHVLLEDAHSHTLRLHLATRADTGFYFCEVQNVHGSERSGPVSVVVNHPPLTPVLTAFLETQAGLVGILHCSVVSEPLATLVLSHGGHILASTSGDSDHSPRFSGTSGPNSLRLEIRDLEETDSGEYKCSATNSLGNATSTLDFHANAARLLISPAAEVVEGQAVTLSCRSGLSPTPDARFSWYLNGALLHEGPGSSLLLPAASSTDAGSYHCRARDGHSASGPSSPAVLTVLYPPRQPTFTTRLDLDAAGAGAGRRGLLLCRVDSDPPARLQLLHKDRVVATSLPSGGGCSTCGGCSPRMKVTKAPNLLRVEIHNPLLEEEGLYLCEASNALGNASTSATFNGQATVLAIAPSHTLQEGTEANLTCNVSREAAGSPANFSWFRNGVLWAQGPLETVTLLPVARTDAALYACRILTEAGAQLSTPVLLSVLYPPDRPKLSALLDMGQGHMALFICTVDSRPLALLALFHGEHLLATSLGPQVPSHGRFQAKAEANSLKLEVRELGLGDSGSYRCEATNVLGSSNTSLFFQVRGAWVQVSPSPELQEGQAVVLSCQVHTGVPEGTSYRWYRDGQPLQESTSATLRFAAITLTQAGAYHCQAQAPGSATTSLAAPISLHVSYAPRHVTLTTLMDTGPGRLGLLLCRVDSDPPAQLRLLHGDRLVASTLQGVGGPEGSSPRLHVAVAPNTLRLEIHGAMLEDEGVYICEASNTLGQASASADFDAQAVNVQVWPGATVREGQLVNLTCLVWTTHPAQLTYTWYQDGQQRLDAHSIPLPNVTVRDATSYRCGVGPPGRAPRLSRPITLDVLYAPRNLRLTYLLESHGGQLALVLCTVDSRPPAQLALSHAGRLLASSTAASVPNTLRLELRGPQPRDEGFYSCSARSPLGQANTSLELRLEGVRVILAPEAAVPEGAPITVTCADPAAHAPTLYTWYHNGRWLQEGPAASLSFLVATRAHAGAYSCQAQDAQGTRSSRPAALQVLYAPQDAVLSSFRDSRARSMAVIQCTVDSEPPAELALSHDGKVLATSSGVHSLASGTGHVQVARNALRLQVQDVPAGDDTYVCTAQNLLGSISTIGRLQVEGARVVAEPGLDVPEGAALNLSCRLLGGPGPVGNSTFAWFWNDRRLHAEPVPTLAFTHVARAQAGMYHCLAELPTGAAASAPVMLRVLYPPKTPTMMVFVEPEGGLRGILDCRVDSEPLASLTLHLGSRLVASSQPQGAPAEPHIHVLASPNALRVDIEALRPSDQGEYICSASNVLGSASTSTYFGVRALHRLHQFQQLLWVLGLLVGLLLLLLGLGACYTWRRRRVCKQSMGENSVEMAFQKETTQLIDPDAATCETSTCAPPLG

SEQ ID NO: 6369 - protein, 783 aa, Homo sapiens
MSQVKSSYSYDAPSDFINFSSLDDEGDTQNIDSWFEEKANLENKLLGKNGTGGLFQGKTPLRKANLQQAIVTPLKPVDNTYYKEAEKENLVEQSIPSNACSSLEVEAAISRKTPAQPQRRSLRLSAQKDLEQKEKHHVKMKAKRCATPVIIDEILPSKKMKVSNNKKKPEEEGSAHQDTAEKNASSPEKAKGRHTVPCMPPAKQKFLKSTEEQELEKSMKMQQEVVEMRKKNEEFKKLALAGIGQPVKKSVSQVTKSVDFHFRTDERIKQHPKNQEEYKEVNFTSELRKHPSSPARVTKGCTIVKPFNLSQGKKRTFDETVSTYVPLAQQVEDFHKRTPNRYHLRSKKDDIKTGSCSVTQAGVQWRDHGSLQCPTPGLKQSSCLSLPNLLPSKSSVTKICRDPQTPVLQTKHRARAVTCKSTAELEAEELEKLQQYKFKARELDPRILEGGPILPKKPPVKPPTEPIGFDLEIEKRIQERESKKKTEDEHFEFHSRPCPTKILEDVVGVPEKKVLPITVPKSPAFALKNRIRMPTKEDEEEDEPVVIKAQPVPHYGVPFKPQIPEARTVEICPFSFDSRDKERQLQKEKKIKELQKGEVPKFKALPLPHFDTINLPEKKVKNVTQIEPFCLETDRRGALKAQTWKHQLEEELRQQKEAACFKARPNTVISQEPFVPKKEKKSVAEGLSGSLVQEPFQLATEKRAKERQELEKRMAEVEAQKAQQLEEARLQEEEQKKEELARLRRELVHKANPIRKYQGLEIKSSDQPLTVPVSPKFSTRFHC

SEQ ID NO: 6370 - protein, 558 aa, Homo sapiens
MPWRRRRNRVSALEGGREEEAPPEAAAVPPALLTSPQQTEAAAERILLRGIFEIGRDSCDVVLSERALRWRPIQPERPAGDSKYDLLCKEEFIELKDIFSVKLKRRCSVKQQRSGTLLGITLFICLKKEQNKLKNSTLDLINLSEDHCDIWFRQFKKILAGFPNRPKSLKILLNPQSHKKEATQVYYEKVEPLLKLAGIKTDVTIMEYEGHALSLLKECELQGFDGGHRKPLFAIHWSVQRLFTGMQTLEPSVVCVGGDGSASEVAHALLLRAQKNAGMETDRILTPVRAQLPLGLIPAGSTNVLAHSLHGVPHVITATLHIIMGHVQLVDVCTFSTAGKLLRFGFSAMFGFGGRTLALAEKYRWMSPNQRRDFAVVKALAKLKAEDCEISFLPFNSSDDVQERRAQGSPKSDCNDQWQMIQGQFLNVSIMAIPCLCSVAPRGLAPNTRLNNGSMALIIARNTSRPEFIKHLKRYASVKNQFNFPFVETYTVEEVKVHPRNNTGGYNPEEEEDETASENCFPWNVDGDLMEVASEVHIRLHPRLISLYGGSMEEMIPK

SEQ ID NO: 6371 - protein, 442 aa, Homo sapiens
MYQRMLRCGAELGSPGGGGGGGGGGGAGGRLALLWIVPLTLSGLLGVAWGASSLGAHHIHHFHGSSKHHSVPIAIYRSPASLRGGHAGTTYIFSKGGGQITYKWPPNDRPSTRADRLAIGFSTVQKEAVLVRVDSSSGLGDYLELHIHQGKIGVKFNVGTDDIAIEESNAIINDGKYHVVRFTRSGGNATLQVDSWPVIERYPAGRQLTIFNSQATIIIGGKEQGQPFQGQLSGLYYNGLKVLNMAAENDANIAIVGNVRLVGEVPSSMTTESTATAMQSEMSTSIMETTTTLATSTARRGKPPTKEPISQTTDDILVASAECPSDDEDIDPCEPSSGGLANPTRAGGREPYPGSAEVIRESSSTTGMVVGIVAAAALCILILLYAMYKYRNRDEGSYHVDESRNYISNSAQSNGAVVKEKQPSSAKSSNKNKKNKDKEYYV

SEQ ID NO: 6372 - protein, 1065 aa, Homo sapiens
MAAAYLDPNLNHTPNSSTKTHLGTGMERSPGAMERVLKVFHYFESNSEPTTWASIIRHGDATDVRGIIQKIVDSHKVKHVACYGFRLSHLRSEEVHWLHVDMGVSSVREKYELAHPPEEWKYELRIRYLPKGFLNQFTEDKPTLNFFYQQVKSDYMLEIADQVDQEIALKLGCLEIRRSYWEMRGNALEKKSNYEVLEKDVGLKRFFPKSLLDSVKAKTLRKLIQQTFRQFANLNREESILKFFEILSPVYRFDKECFKCALGSSWIISVELAIGPEEGISYLTDKGCNPTHLADFTQVQTIQYSNSEDKDRKGMLQLKIAGAPEPLTVTAPSLTIAENMADLIDGYCRLVNGTSQSFIIRPQKEGERALPSIPKLANSEKQGMRTHAVSVSETDDYAEIIDEEDTYTMPSTRDYEIQRERIELGRCIGEGQFGDVHQGIYMSPENPALAVAIKTCKNCTSDSVREKFLQEALTMRQFDHPHIVKLIGVITENPVWIIMELCTLGELRSFLQVRKYSLDLASLILYAYQLSTALAYLESKRFVHRDIAARNVLVSSNDCVKLGDFGLSRYMEDSTYYKASKGKLPIKWMAPESINFRRFTSASDVWMFGVCMWEILMHGVKPFQGVKNNDVIGRIENGERLPMPPNCPPTLYSLMTKCWAYDPSRRPRFTELKAQLSTILEEEKAQQEERMRMESRRQATVSWDSGGSDEAPPKPSRPGYPSPRSSEGFYPSPQHMVQTNHYQVSGYPGSHGITAMAGSIYPGQASLLDQTDSWNHRPQEIAMWQPNVEDSTVLDLRGIGQVLPTHLMEERLIRQQQEMEEDQRWLEKEERFLKPDVRLSRGSIDREDGSLQGPIGNQHIYQPVGKPGKEEKNWAERNPAAPPKKPPRPGAPGHLGSLASLSSPADSYNEGVKPWRLQPQEISPPPTANLDRSNDKVYENVTGLVKAVIEMSSKIQPAPPEEYVPMVKEVGLALRTLLATVDETIPLLPASTHREIEMAQKLLNSDLGELINKMKLAQQYVMTSLQQEYKKQMLTAAHALAVDAKNLLDVIDQARLKMLGQTRPH

SEQ ID NO: 6373 - protein, 418 aa, Homo sapiens
MQDDKTGGVPIRTVKSFLSKIPSVVTGTDIVQWLMKNLSIEDPVEAIHLGSLIAAQGYIFPISDHVLTMKDDGTFYRFQAPYFWPSNCWEPENTDYAIYLCKRTMQNKARLELADYEAENLARLQRAFARKWEFIFMQAEAQVKIDRKKDKTERKILDSQERAFWDVHRPVPGCVNTTEMDIRKCRRLKNPQKVKKSVYGVTEESQAQSPVHVLSQPIRKTTKEDIRKQITFLNAQIDRHCLKMSKVAESKEPSQQRVKRWGFSFDEILKDQVGRDQFLRFLESEFSSENLRFWLAVQDLKKQPLQDVAKRVEEIWQEFLAPGAPSAINLDSHSYEITSQNVKDGGRYTFEDAQEHIYKLMKSDSYARFLRSNAYQDLLLAKKKPESEQGRRTSLEKFTRSVGKSLAGKRLTGLMQSS

SEQ ID NO: 6374 - protein, 386 aa, Homo sapiens
MLLPKKMKLLLFLVSQMAILALFFHMYSHNISSLSMKAQPERMHVLVLSSWRSGSSFVGQLFGQHPDVFYLMEPAWHVWMTFKQSTAWMLHMAVRDLIRAVFLCDMSVFDAYMEPGPRRQSSLFQWENSRALCSAPACDIIPQDEIIPRAHCRLLCSQQPFEVVEKACRSYSHVVLKEVRFFNLQSLYPLLKDPSLNLHIVHLVRDPRAVFRSRERTKGDLMIDSRIVMGQHEQKLKKEDQPYYVMQVICQSQLEIYKTIQSLPKALQERYLLVRYEDLARAPVAQTSRMYEFVGLEFLPHLQTWVHNITRGKGMGDHAFHTNARDALNVSQAWRWSLPYEKVSRLQKACGDAMNLLGYRHVRSEQEQRNLLLDLLSTWTVPEQIH

SEQ ID NO: 6375 - protein, 794 aa, Homo sapiens
MAGWIQAQQLQGDALRQMQVLYGQHFPIEVRHYLAQWIESQPWDAIDLDNPQDRAQATQLLEGLVQELQKKAEHQVGEDGFLLKIKLGHYATQLQKTYDRCPLELVRCIRHILYNEQRLVREANNCSSPAGILVDAMSQKHLQINQTFEELRLVTQDTENELKKLQQTQEYFIIQYQESLRIQAQFAQLAQLSPQERLSRETALQQKQVSLEAWLQREAQTLQQYRVELAEKHQKTLQLLRKQQTIILDDELIQWKRRQQLAGNGGPPEGSLDVLQSWCEKLAEIIWQNRQQIRRAEHLCQQLPIPGPVEEMLAEVNATITDIISALVTSTFIIEKQPPQVLKTQTKFAATVRLLVGGKLNVHMNPPQVKATIISEQQAKSLLKNENTRNECSGEILNNCCVMEYHQATGTLSAHFRNMSLKRIKRADRRGAESVTEEKFTVLFESQFSVGSNELVFQVKTLSLPVVVIVHGSQDHNATATVLWDNAFAEPGRVPFAVPDKVLWPQLCEALNMKFKAEVQSNRGLTKENLVFLAQKLFNNSSSHLEDYSGLSVSWSQFNRENLPGWNYTFWQWFDGVMEVLKKHHKPHWNDGAILGFVNKQQAHDLLINKPDGTFLLRFSDSEIGGITIAWKFDSPERNLWNLKPFTTRDFSIRSLADRLGDLSYLIYVFPDRPKDEVFSKYYTPVLAKAVDGYVKPQIKQVVPEFVNASADAGGSSATYMDQAPSPAVCPQAPYNMYPQNPDHVLDQDGEFDLDETMDVARHVEELLRRPMDSLDSRLSPPAGLFTSARGSLS

SEQ ID NO: 6376 - protein, 1484 aa, Homo sapiens
MCPEEGGAAGLGELRSWWEVPAIAHFCSLFRTAFRLPDFEIEELEAALHRDDVEFISDLIACLLQGCYQRRDITPQTFHSYLEDIINYRWELEEGKPNPLREASFQDLPLRTRVEILHRLCDYRLDADDVFDLLKGLDADSLRVEPLGEDNSGALYWYFYGTRMYKEDPVQGKSNGELSLSRESEGQKNVSSIPGKTGKRRGRPPKRKKLQEEILLSEKQEENSLASEPQTRHGSQGPGQGTWWLLCQTEEEWRQVTESFRERTSLRERQLYKLLSEDFLPEICNMIAQKGKRPQRTKAELHPRWMSDHLSIKPVKQEETPVLTRIEKQKRKEEEEERQILLAVQKKEQEQMLKEERKRELEEKVKAVEGMCSVRVVWRGACLSTSRPVDRAKRRKLREERAWLLAQGKELPPELSHLDPNSPMREEKKTKDLFELDDDFTAMYKVLDVVKAHKDSWPFLEPVDESYAPNYYQIIKAPMDISSMEKKLNGGLYCTKEEFVNDMKTMFRNCRKYNGESSEYTKMSDNLERCFHRAMMKHFPGEDGDTDEEFWIREDEKREKRRSRAGRSGGSHVWTRSRDPEGSSRKQQPMENGGKSLPPTRRAPSSGDDQSSSSTQPPREVGTSNGRGFSHPLHCGGTPSQAPFLNQMRPAVPGTFGPLRGSDPATLYGSSGVPEPHPGEPVQQRQPFTMQPPVGINSLRGPRLGTPEEKQMCGGLTHLSNMGPHPGSLQLGQISGPSQDGSMYAPAQFQPGFIPPRHGGAPARPPDFPESSEIPPSHMYRSYKYLNRVHSAVWNGNHGATNQGPLGPDEKPHLGPGPSHQPRTLGHVMDSRVMRPPVPPNQWTEQSGFLPHGVPSSGYMRPPCKSAGHRLQPPPVPAPSSLFGAPAQALRGVQGGDSMMDSPEMIAMQQLSSRVCPPGVPYHPHQPAHPRLPGPFPQVAHPMSVTVSAPKPALGNPGRAPENSEAQEPENDQAEPLPGLEEKPPGVGTSEGVYLTQLPHPTPPLQTDCTRQSSPQERETVGPELKSSSSESADNCKAMKGKNPWPSDSSYPGPAAQGCVRDLSTVADRGALSENGVIGEASPCGSEGKGLGSSGSEKLLCPRGRTLQETMPCTGQNAATPPSTDPGLTGGTVSQFPPLYMPGLEYPNSAAHYHISPGLQGVGPVMGGKSPASHPQHFPPRGFQSNHPHSGGFPRYRPPQGMRYSYHPPPQPSYHHYQRTPYYACPQSFSDWQRPLHPQGSPSGPPASQPPPPRSLFSDKNAMASLQGCETLNAALTSPTRMDAVAAKVPNDGQNPGPEEEKLDESMERPESPKEFLDLDNHNAATKRQSSLSASEYLYGTPPPLSSGMGFGSSAFPPHSVMLQTGPPYTPQRPASHFQPRAYSSPVAALPPHHPGATQPNGLSQEGPIYRCQEEGLGHFQAVMMEQIGTRSGIRGPFQEMYRPSGMQMHPVQSQASFPKTPTAATSQEEVPPHKPPTLPLDQS

SEQ ID NO: 6377 - protein, 515 aa, Homo sapiens
MGLLAFRDVALEFSPEEWECLDPAQRSLYRDVMLENYRNLISLGEDSFNMQFLFHSLAMSKPELIICLEARKEPWNVNTEKTARHSVLSSYLTEDILPEQGLQVSFQKVMLRRYERCCLEKLRLRNDWEIVGEWKGQKASYNGLDLCSATTHSKNFQCNKCVKGFSKFANLNKCKISHTGEKPFKCKECGNVSCMSLIMTQQQRIHIGENPYQCKKCGKAFNECSCFTDCKRIHVGEKHCKCEECNNIFKSCSSLAVVEKNHTEKKTYRCEECGKAFNLCSVLTKHKKIHTGEKPYKCEECGKSFKLFPYLTQHKRIHSREKPYKCEECGKVFKLLSYLTQHRRIHTGEKTFRCEECGKAFNQSSHLTEHRRIHTGEKPYKCEECGKAFTWFSYLIQHKRIHTGQKPYKCEECGKAFTWFSYLTQHKRIHTGEKPYKCDECGKAFNWFSYLTNHKRIHTGEKPYKCEECGKAFGQSSHLSKHKTIHTREKPYKCEECGKAFNHSAQLAVHEKTHT

SEQ ID NO: 6378 - protein, 424 aa, Homo sapiens
MAQGNNYGQTSNGVADESPNMLVYRKMEDVIARMQDEKNGIPIRTVKSFLSKIPSVFSGSDIVQWLIKNLTIEDPAVYLCKRTMQNKARLELADYEAESLARLQRAFARKWEFIFMQAEAQAKVDKKRDKIERKILDSQERAFWDVHRPVPGCVNTTEVDIKKSSRMRNPHKTRKSVYGLQNDIRSHSPTHTPTPETKPPTEDELQQQIKYWQIQLDRHRLKMSKVADSLLSYTEQYLEYDPFLLPPDPSNPWLSDDTTFWELEASKEPSQQRVKRWGFGMDEALKDPVGREQFLKFLESEFSSENLRFWLAVEDLKKRPIKEVPSRVQEIWQEFLAPGAPSAINLDSKSYDKTTQNVKEPGRYTFEDAQEHIYKLMKSDSYPRFIRSSAYQELLQAKKKGRNIPIFPCHKNCTPTLRASTNLL

SEQ ID NO: 6379 - protein, 628 aa, Homo sapiens
MDSGSSSSDSAPDCWDQVDMESPGSAPSGDGVSSAVAEAQREPLSSAFSRKLNVNAKPFVPNVHAAEFVPSFLRGPTQPPTLPAGSGSNDETCTGAGYPQGKRMGRGAPVEPSREEPLVSLEGSNSAVTMELSEPVVENGEVEMALEESWEHSKEVSEAEPGGGSSGDSGPPEESGQEMMEEKEEIRKSKSVIVPSGAPKKEHVNVVFIGHVDAGKSTIGGQIMFLTGMVDKRTLEKYEREAKEKNRETWYLSWALDTNQEERDKGKTVEVGRAYFETERKHFTILDAPGHKSFVPNMIGGASQADLAVLVISARKGEFETGFEKGGQTREHAMLAKTAGVKHLIVLINKMDDPTVNWSIERYEECKEKLVPFLKKVGFSPKKDIHFMPCSGLTGANIKEQSDFCPWYTGLPFIPYLDNLPNFNRSIDGPIRLPIVDKYKDMGTVVLGKLESGSIFKGQQLVMMPNKHNVEVLGILSDDTETDFVAPGENLKIRLKGIEEEEILPGFILCDPSNLCHSGRTFDVQIVIIEHKSIICPGYNAVLHIHTCIEEVEITALISLVDKKSGEKSKTRPRFVKQDQVCIARLRTAGTICLETFKDFPQMGRFTLRDEGKTIAIGKVLKLVPEKD

SEQ ID NO: 6380 - protein, 423 aa, Homo sapiens
MAQAVWSRLGRILWLACLLPWAPAGVAAGLYELNLTTDSPATTGAVVTISASLVAKDNGSLALPADAHLYRFHWIHTPLVLTGKMEKGLSSTIRVVGHVPGEFPVSVWVTAADCWMCQPVARGFVVLPITEFLVGDLVVTQNTSLPWPSSYLTKTVLKVSFLLHDPSNFLKTALFLYSWDFGDGTQMVTEDSVVYYNYSIIGTFTVKLKVVAEWEEVEPDATRAVKQKTGDFSASLKLQETLRGIQVLGPTLIQTFQKMTVTLNFLGSPPLTVCWRLKPECLPLEEGECHPVSVASTAYNLTHTFRDPGDYCFSIRAENIISKTHQYHKIQVWPSRIQPAVFAFPCATLITVMLAFIMYMTLRNATQQKDMVENPEPPSGVRCCCQMCCGPFLLETPSEYLEIVRENHGLLPPLYKSVKTYTV

SEQ ID NO: 6381 - protein, 1246 aa, Homo sapiens [sequence omitted]

SEQ ID NO: 6382 - protein, 445 aa, Homo sapiens
MREIVHLQAGQCGNQIGAKFWEVISDEHGIDPTGTYHGDSDLQLERINVYYNEATGGKYVPRAVLVDLEPGTMDSVRSGPFGQIFRPDNFVFGQSGAGNNWAKGHYTEGAELVDSVLDVVRKEAESCDCLQGFQLTHSLGGGTGSGMGTLLISKIREEYPDRIMNTFSVVPSPKVSDTVVEPYNATLSVHQLVENTDETYCIDNEALYDICFRTLKLTTPTYGDLNHLVSATMSGVTTCLRFPGQLNADLRKLAVNMVPFPRLHFFMPGFAPLTSRGSQQYRALTVPELTQQMFDAKNMMAACDPRHGRYLTVAAVFRGRMSMKEVDEQMLNVQNKNSSYFVEWIPNNVKTAVCDIPPRGLKMSATFIGNSTAIQELFKRISEQFTAMFRRKAFLHWYTGEGMDEMEFTEAESNMNDLVSEYQQYQDATAEEEGEFEEEAEEEVA

SEQ ID NO: 6383 - protein, 316 aa, Homo sapiens
MEETNNSSEKGFLLLGFSDQPQLERFLFAIILYFYVLSLLGNTALILVCCLDSRLHTPMYFFLSNLSCVDICFTTSVAPQLLVTMNKKDKTMSYGGCVAQLYVAMGLGSSECILLAVMAYDRYAAVCRPLRYIAIMHPRFCASLAGGAWLSGLITSLIQCSLTVQLPLCGHRTLDHIFCEVPVLIKLACVDTTFNEAELFVASVVFLIVPVLLILVSYGFITQAVLRIKSAAGRQKAFGTCSSHLVVVIIFYGTIIFMYLQPANRRSKNQGKFVSLFYTIVTPLLNPIIYTLRNKDVKGALRTLILGSAAGQSHKD

SEQ ID NO: 6384 - protein, 2634 aa, Homo sapiens
MSGGAAEKQSSTPGSLFLSPPAPAPKNGSSSDSSVGEKLGAAAADAVTGRTEEYRRRRHTMDKDSRGAAATTTTTEHRFFRRSVICDSNATALELPGLPLSLPQPSIPAAVPQSAPPEPHREETVTATATSQVAQQPPAAAAPGEQAVAGPAPSTVPSSTSKDRPVSQPSLVGSKEEPPPARSGSGGGSAKEPQEERSQQQDDIEELETKAVGMSNDGRFLKFDIEIGRGSFKTVYKGLDTETTVEVAWCELQDRKLTKSERQRFKEEAEMLKGLQHPNIVRFYDSWESTVKGKKCIVLVTELMTSGTLKTYLKRFKVMKIKVLRSWCRQILKGLQFLHTRTPPIIHRDLKCDNIFITGPTGSVKIGDLGLATLKRASFAKSVIGTPEFMAPEMYEEKYDESVDVYAFGMCMLEMATSEYPYSECQNAAQIYRRVTSGVKPASFDKVAIPEVKEIIEGCIRQNKDERYSIKDLLNHAFFQEETGVRVELAEEDDGEKIAIKLWLRIEDIKKLKGKYKDNEAIEFSFDLERDVPEDVAQEMVESGYVCEGDHKTMAKAIKDRVSLIKRKREQRQLVREEQEKKKQEESSLKQQVEQSSASQTGIKQLPSASTGIPTASTTSASVSTQVEPEEPEADQHQQLQYQQPSISVLSDGTVDSGQGSSVFTESRVSSQQTVSYGSQHEQAHSTGTVPGHIPSTVQAQSQPHGVYPPSSVPRRGRSMSVCVPIFLLLPLCPASLPVLFHPTASTVCTSFSFPPPDCPEETFAEKLSKALESVLPMHSASQRKHRRSSLPSLFVSTPQSMAHPCGGTPTYPESQIFFPTIHERPVSFSPPPTCPPKVAISQRRKSTSFLEAQTHHFQPLLRTVGQSLLPPGGSPTNWTPEAVVMLGTTASRVTGESCEIQVHPMFEPSQVYSDYRPGLVLPEEAHYFIPQEAVYVAGVHYQARVAEQYEGIPYNSSVLSSPMKQIPEQKPVQGGPTSSSVFEFPSGQAFLVGHLQNLRLDSGLGPGSPLSSISAPISTDATRLKFHPVFVPHSAPAVLTHNNESRSNCVFEFHVHTPSSSSGEGGGILPQRVYRNRQVAVDLNQEELPPQSVGLHGYLQPVTEEKHNYHAPELTVSVVEPIGQNWPIGSPEYSSDSSQITSSDPSDFQSPPPTGGAAAPFGSDVSMPFIHLPQTVLQESPLFFCFPQGTTSQQVLTASFSSGGSALHPQAQGQSQGQPSSSSLTGVSSSQPIQHPQQQQGIQQTAPPQQTVQYSLSQTSTSSEATTAQPVSQPQAPQVLPQVSAGKQSTQGVSQVAPAEPVAVAQTQATQPTTLASSVDSAHSDVASGMSDGNENVPSSSGRHEGRTTKRHYRKSVRSRSRHEKTSRPKLRILNVSNKGDRVVECQLETHNRKMVTFKFDLDGDNPEEIATIMVNNDFILAIERESFVDQVREIIEKADEMLSEDVSVEPEGDQGLESLQGKDDYGFSGSQKLEGEFKQPIPASSMPQQIGIPTSSLTQVVHSAGRRFIVSPVPESRLRESKVFPSEITDTVAASTAQSPGMNLSHSASSLSLQQAFSELRRAQMTEGPNTAPPNFSHTGPTFPVVPPFLSSIAGVPTTAAATAPVPATSSPPNDISTSVIQSEVTVPTEEGIAGVATSTGVVTSGGLPIPPVSESPVLSSVVSSITIPAVVSISTTSPSLQVPTSTSEIVVSSTALYPSVTVSATSASAGGSTATPGPKPPAVVSQQAAGSTTVGATLTSVSTTTSFPSTASQLCIQLSSSTSTPTLAETVVVSAHSLDKTSHSSTTGLAFSLSAPSSSSSPGAGVSSYISQPGGLHPLVIPSVIASTPILPQAAGPTSTPLLPQVPSIPPLVQPVANVPAVQQTLIHSQPQPALLPNQPHTHCPEVDSDTQPKAPGIDDIKTLEEKLRSLFSEHSSSGAQHASVSLETSLVIESTVTPGIPTTAVAPSKLLTSTTSTCLPPTNLPLGTVALPVTPVVTPGQVSTPVSTTTSGVKPGTAPSKPPLTKAPVLPVGTELPAGTLPSEQLPPFPGPSLTQSQQPLEDLDAQLRRTLSPEMITVTSAVGPVSMAAPTAITEAGTQPQKGVSQVKEGPVLATSSGAGVFKMGRFQVSVAADGAQKEGKNKSEDAKSVHFESSTSESSVLSSSSPESTLVKPEPNGITIPGISSDVPESAHKTTASEAKSDTGQPTKVGRFQVTTTANKVGRFSVSKTEDKITDTKKEGPVASPPFMDLEQAVLPAVIPKKEKPELSEPSHLNGPSSDPEAAFLSRDVDDGSGSPHSPHQLSSKSLPSQNLSQSLSNSFNSSYMSSDNESDIEDEDLKLELRRLRDKHLKEIQDLQSRQKHEIESLYTKLGKVPPAVIIPPAAPLSGRRRRPTKSKGSKSSRSSSLGNKSPQLSGNLSGQSAASVLHPQQTLHPPGNIPESGQNQLLQPLKPSPSSDNLYSAFTSDGAISVPSLSAPGQGTSSTNTVGATVNSQAAQAQPPAMTSSRKGTFTDDLHKLVDNWARDAMNLSGRRGSKGHMNYEGPGMARKFSAPGQLCISMTSNLGGSAPISAASATSLGHFTKSMCPPQQYGFPATPFGAQWSGTGGPAPQPLGQFQPVGTASLQNFNISNLQKSISNPPGSNLRTT

SEQ ID NO: 6385 - protein, 431 aa, Homo sapiens
MDPAVALVLCLSCLFLLSLWRQSSGRGRLPSGPTPLPIIGNILQLDVKDMSKSLTNFSKVYGPVFTVYFGLKPIVVLHGYEAVKEALIDHGEEFSGRGSFPVAEKVNKGLGILFSNGKRWKEIRRFCLMTLRNFGMGKRSIEDRVQEEARCLVEELRKTNASPCDPTFILGCAPCNVICSVIFHDRFDYKDQRFLNLMEKFNENLRILSSPWIQEKHNQQSEFTVESLIATVTDMFGAGTETTSTTLRYGLLLLLKYPEVTAKVQEEIECVVGRNRSPCMQDRSHMPYTDAVVHEIQRYIDLLPTNLPHAVTCDVKFKNYLIPKGTTIITSLTSVLHNDKEFPNPEMFDPGHFLDKSGNFKKSDYFMPFSAGKRMCMGEGLARMELFLFLTTILQNFNLKSQVDPKDIDITPIANAFGRVPPLYQLCFIPV

SEQ ID NO: 6386 - protein, 429 aa, Homo sapiens
MAQPGTLNLNNEVVKMRKEVKRIRVLVIRKLVRSVGRLKSKKGTEDALLKNQRRAQRLLEEIHAMKELKPDIVTKSALGDDINFEKIFKKPDSTATERAIARLAVHPLLKKKIDVLKAAVQAFKEARQNVAEVESSKNASEDNHSENTLYSNDNGSNLQREATVISEQKVKETKILAKKPIHNSKEKIAKMEHGPKAVTIANSPSKPSEKDSVVSLESQKTPADPKLKTLSQTKKNKGSDSSLSGNSDGGEEFCEEEKEYFDDSTEERFYKQSSMSEDSDSGDDFFIGKVRRTRKKESSCHSSVKEQKPLEKVFLKEDTGETHGDTRNDKIKPSTETRKLESVFFHSLSGSKSSRRNFKEQAPKTRSLDFPQNEPQIKNQFNKKLSGRLENTKQQLQLPLHPSWEASRRRKEQQSNIAVFQGKKITFDD

SEQ ID NO: 6387 - protein, 1351 aa, Homo sapiens
MELLPPLPQSFLLLLLLPAKPAAGEDWQCPRTPYAASRDFDVKYVVPSFSAGGLVQAMVTYEGDRNESAVFVAIRNRLHVLGPDLKSVQSLATGPAGDPGCQTCAACGPGPHGPPGDTDTKVLVLDPALPALVSCGSSLQGRCFLHDLEPQGTAVHLAAPACLFSAHHNRPDDCPDCVASPLGTRVTVVEQGQASYFYVASSLDAAVAASFSPRSVSIRRLKADASGFAPGFVALSVLPKHLVSYSIEYVHSFHTGAFVYFLTVQPASVTDDPSALHTRLARLSATEPELGDYRELVLDCRFAPKRRRRGAPEGGQPYPVLRVAHSAPVGAQLATELSIAEGQEVLFGVFVTGKDGGPGVGPNSVVCAFPIDLLDTLIDEGVERCCESPVHPGLRRGLDFFQSPSFCPNPPGLEALSPNTSCRHFPLLVSSSFSRVDLFNGLLGPVQVTALYVTRLDNVTVAHMGTMDGRILQVELVRSLNYLLYVSNFSLGDSGQPVQRDVSRLGDHLLFASGDQVFQVPIQGPGCRHFLTCGRCLRAWHFMGCGWCGNMCGQQKECPGSWQQDHCPPKLTEFHPHSGPLRGSTRLTLCGSNFYLHPSGLVPEGTHQVTVGQSPCRPLPKDSSKLRPVPRKDFVEEFECELEPLGTQAVGPTNVSLTVTNMPPGKHFRVDGTSVLRGFSFMEPVLIAVQPLFGPRAGGTCLTLEGQSLSVGTSRAVLVNGTECLLARVSEGQLLCATPPGATVASVPLSLQVGGAQVPGSWTFQYREDPVVLSISPNCGYINSHITICGQHLTSAWHLVLSFHDGLRAVESRCERQLPEQQLCRLPEYVVRDPQGWVAGNLSARGDGAAGFTLPGFRFLPPPHPPSANLVPLKPEEHAIKFEVCVDGECHILGRVVRPGPDGVPQSTLLGILLPLLLLVAALATALVFSYWWRRKQLVLPPNLNDLASLDQTAGATPLPILYSGSDYRSGLALPAIDGLDSTTCVHGASFSDSEDESCVPLLRKESIQLRDLDSALLAEVKDVLIPHERVVTHSDRVIGKGHFGVVYHGEYIDQAQNRIQCAIKSLSRITEMQQVEAFLREGLLMRGLNHPNVLALIGIMLPPEGLPHVLLPYMCHGDLLQFIRSPQRNPTVKDLISFGLQVARGMEYLAEQKFVHRDLAARNCMLDESFTVKVADFGLARDILDREYYSVQQHRHARLPVKWMALESLQTYRFTTKSDVWSFGVLLWELLTRGAPPYRHIDPFDLTHFLAQGRRLPQPEYCPDSLYQVMQQCWEADPAVRPTFRVLVGEVEQIVSALLGDHYVQLPATYMNLGPSTSHEMNVRPEQPQFSPMPGNVRRPRPLSEPPRPT

SEQ ID NO: 6388 - protein, 440 aa, Homo sapiens
MAENNENISKNVDVRPKTSRSRSADRKDGYVWSGKKLSWSKKSESYSDAETVNGIEKTEVSLRNQERKHSCSSIELDLDHSCGHRFLGRSLKQKLQDAVGQCFPIKNCSSRHSSGLPSKRKIHISELMLDKCPFPPRSDLAFRWHFIKRHTAPINSKSDEWVSTDLSQTELRDGQLKRRNMEENINCFSHTNVQPCVITTDNALCREGPMTGSVMNLVSNNSIEDSDMDSDDEILTLCTSSRKRNKPKWDLDDEILQLETPPKYHTQIDYVHCLVPDLLQINNNPCYWGVMDKYAAEALLEGKPEGTFLLRDSAQEDYLFSVSFRRYSRSLHARIEQWNHNFSFDAHDPCVFHSPDITGLLEHYKDPSACMFFEPLLSTPLIRTFPFSLQHICRTVICNCTTYDGIDALPIPSSMKLYLKEYHYKSKVRVLRIDAPEQQC

SEQ ID NO: 6389 - protein, 621 aa, Homo sapiens
MLMAGQRGAWTMGDVVEKSLEGPLAPSTDEPSQKTGDLVEILNGEKVKFDDAGLSLILQNGLETLRMENALTDVILCVDIQEFSCHRVVLAAASNYFRAMFCNDLKEKYEKRIIIKGVDAETMHTLLDYTYTSKALITKQNVQRVLEAANLFQFLRMVDACASFLTEALNPENCVGILRLADTHSLDSLKKQVQSYIIQNFVQILNSEEFLDLPVDTLHHILKSDDLYVTEEAQVFETVMSWVRHKPSERLCLLPYVLENVRLPLLDPWYFVETVEADPLIRQCPEVFPLLQEARMYHLSGNEIISERTKPRMHEFQSEVFMIIGGCTKDERFVAEVTCLDPLRRSRLEVAKLPLTEHELESENKKWVEFACVTLKNEVYISGGKETQHDVWKYNSSINKWIQIEYLNIGRWRHKMVVLGGKVYVIGGFDGLQRINNVETYDPFHNCWSEAAPLLVHVSSFAATSHKKKLYVIGGGPNGKLATDKTQCYDPSTNKWSLKAAMPVEAKCINAVSFRDRIYVVGGAMRALYAYSPLEDSWCLVTQLSHERASCGIAPCNNRLYITGGRDEKNEVIATVLCWDPEAQKLTEECVLPRGVSHHGSVTIRKSYTHIRRIVPGAVSV

SEQ ID NO: 6390 - protein, 639 aa, Homo sapiens
MEPAMEPETLEARINRATNPLNKELDWASINGFCEQLNEDFEGPPLATRLLAHKIQSPQEWEAIQALTVLETCMKSCGKRFHDEVGKFRFLNELIKVVSPKYLGSRTSEKVKNKILELLYSWTVGLPEEVKIAEAYQMLKKQGIVKSDPKLPDDTTFPLPPPRPKNVIFEDEEKSKMLARLLKSSHPEDLRAANKLIKEMVQEDQKRMEKISKRVNAIEEVNNNVKLLTEMVMSHSQGGAAAGSSEDLMKELYQRCERMRPTLFRLASDTEDNDEALAEILQANDNLTQVINLYKQLVRGEEVNGDATAGSIPGSTSALLDLSGLDLPPAGTTYPAMPTRPGEQASPEQPSASVSLLDDELMSLGLSDPTPPSGPSLDGTGWNSFQSSDATEPPAPALAQAPSMESRPPAQTSLPASSGLDDLDLLGKTLLQQSLPPESQQVRWEKQQPTPRLTLRDLQNKSSSCSSPSSSATSLLHTVSPEPPRPPQQPVPTELSLASITVPLESIKPSNILPVTVYDQHGFRILFHFARDPLPGRSDVLVVVVSMLSTAPQPIRNIVFQSAVPKVMKVKLQPPSGTELPAFNPIVHPSAITQVLLLANPQKEKVRLRYKLTFTMGDQTYNEMGDVDQFPPPETWGSL

SEQ ID NO: 6391 - protein, 418 aa, Homo sapiens
MAKLLQPPPKFLPSEWHIANKNQYHRADAQRSRSERLVAESQRLVDEIEKTTRKSQSDVNKKLEQRLEEVQFWKKELDDKLEQLVNVTDDLLIYKIRLEKALETLKEPLHITETCLAYREKRIGIDLVHDTVEHELIKEAEIIQGIMALLTRTLEEASEQIRMNRSAKYNLEKDLKDKFVALTIDDICFSLNNNSPNIRYSENAVRIEPNSVSLEDWLDFSSTNVEKADKQRNNSLMLKALVDRILSQTANDLRKQCDVVDTAFKNGLKDTKDARDKLADHLAKVMEEIASQEKNITALEKAILDQEGPAKVAHTRLETRTHRPNVELCRDVAQYRLMKEVQEITHNVARLKETLAQAQAELKGLHRRQLALQEEIQVKENTIYIDEVLCMQMRKSIPLRDGEDHGVWAGGLRPDAVC

SEQ ID NO: 6392 - protein, 973 aa, Homo sapiens
MSPVRRWGSPCLFPLQLFSLCWVLSVAQSKTVRYSTFEEDAPGTVIGTLAEDLHMKVSGDTSFRLMKQFNSSLLRVREGDGQLTVGDAGLDRERLCGQAPQCVLAFDVVSFSQEQFRLVHVEVEVRDVNDHAPRFPRAQIPVEVSEGAAVGTRIPLEVPVDEDVGANGLQTVRLAEPHSPFRVELQTRADGAQCADLVLLQELDRESQAAYSLELVAQDGGRPPRSATAALSVRVLDANDHSPAFPQGAVAEVELAEDAPVGSLLLDLDAADPDEGPNGDVVFAFGARTPPEARRLFRLDPRSGRLTLAGPVDYERQDTYELDVRAQDRGPGPRAATCKVIVRIRDVNDNAPDIAITPLAAPGAPATSPFAAAAAAAALGGADASSPAGAGTPEAGATSLVPEGAARESLVALVSTSDRDSGANGQVRCALYGHEHFRLQPAYAGSYLVVTAASLDRERIAEYNLTLVAEDRGAPPLRTVRPYTVRVGDENDNAPLFTRPVYEVSVRENNPPGAYLATVAARDRDLGRNGQVTYRLLEAEVGRAGGAVSTYVSVDPATGAIYALRSFDYETLRQLDVRIQASDGGSPQLSSSALVQVRVLDQNDHAPVLVHPAPANGSLEVAVPGRTAKDTVVARVQARDADEGANGELAFELQQQEPREAFAIGRRTGEILLTGDLSQEPPGRVFRALLVISDGGRPPLTTTATVSFVVTAGGGRGPAAPASAGSPERSRPPGSRLGVSGSVLQWDTPLIVIIVLAGSCTLLLAAIIAIATTCNRRKKEPYGASPGFGKEPAPPVAVWKGHSFNTISGREAEKFSGKDSGKGDSDFNDSDSDISGDALKKDLINHMQSGLWACTAECKILGHSDRCWSPSCSGPNAHPSPHPPAQMSTFCKSTSLPRDPLRRDNYYQAQLPKTVGLQSVYEKVLHRDYDRTVTLLSPPRPGRLPDLQEIGVPLYQSPPGRYLSPKKGANENV

SEQ ID NO: 6393 - protein, 1166 aa, Homo sapiens
MDGRTPRPQDAPARRKPKAKAPLPPAETKYTDVSSAADSVESTAFIMEQKENMIDKDVELSVVLPGDIIKSTTVHGSKPMMDLLIFLCAQYHLNPSSYTIDLLSAEQNHIKFKPNTPIGMLEVEKVILKPKMLDKKKPTPIIPEKTVRVVINFKKTQKTIVRVSPHASLQELAPIICSKCEFDPLHTLLLKDYQSQEPLDLTKSLNDLGLRELYAMDVNRESCQISQNLDIMKEKENKGFFSFFQRSKKKRDQTASAPATPLVNKHRPTFTRSNTISKPYISNTLPSDAPKKRRAPLPPMPASQSVPQDLAHIQERPASCIVKSMSVDETDKSPCEAGRVRAGSLQLSSMSAGNSSLRRTKRKAPSPPSKIPPHQSDENSRVTALQPVDGVPPDSASEANSPEELSSPETFHPGLSSQEQCTAPKLMEETSVFECPGTPEAAITSLTSGISSDYSLEEIDEKEELSEVPKVEAENISPKSQDIPFVSTDIINTLKNDPDSALGNGSGEFSQNSMEEKQETKSTDGQEPHSVVYDTSNGKKVVDSIRNLKSLGPNQENVQNEIIVYPENTEDNMKNGVKKTEINVEGVAKNNNIDMEVERPSNSEAHETDTAISYKENHLAASSVPDQKLNQPSAEKTKDAAIQTTPSCNSFDGKHQDHNLSDSKVEECVQTSNNNISTQHSCLSSQDSVNTSREFRSQGTLIIHSEDPLTVKDPICAHGNDDLLPPVDRIDKNSTASYLKNYPLYRQDYNPKPKPSNEITREYIPKIGMTTYKIVPPKSLEISKDWQSETIEYKDDQDMHALGKKHTHENVKETAIQTEDSAISESPEEPLPNLKPKPNLRTEHQVPSSVSSPDDAMVSPLKPAPKMTRDTGTAPFAPNLEEINNILESKFKSRASNAQAKPSSFFLQMQKRVSGHYVTSAAAKSVHAAPNPAPKELTNKEAERDMLPSPEQTLSPLSKMPHSVPQPLVEKTDDDVIGQAPAEASPPPIAPKPVTIPASQVSTQNLKTLKTFGAPRPYSSSGPSPFALAVVKRSQSFSKERTESPSASALVQPPANTEEGKTHSVNKFVDIPQLGVSDKENNSAHNEQNSQIPTPTDGPSFTVMRQSSLTFQSSDPEQMRQSLLTAIRSGEAAAKLKRVTIPSNTISVNGRSRLSHSMSPDAQDGH

SEQ ID NO: 6394 - protein, 1188 aa, Homo sapiens
MKKKQTVQGTFSKLFGKKHTTTPSTSLYATNPPWIFTQEAPEEGTGGFDGIYYGDNRFNTVSESGTATLKARPRVRPLLTFLPLNAQENHGLAVPTPSVPDDFADKEVTGTSSLVNGNLRLYSSVGDLRPGQYGQDLLIPPPPPGPAPGPPQDISEPPGGSPLPSPPSTAPPPPPLLLEPPPPPSMAPPPPPVLEALSPPHTLSSPSIPTPPDFIPPAPPLAFLAPPPPPVPAPAPPAPASPHTVGTRLFPPGGVTKWKSDVALNGRQAEATRASPPRSPAEPKGSALGPNPEPHLTFPRSFKVPPPTPVRTSSIPVQEAQEAPRKEEGATKKAPSRLPLPPSFHIRPASQVYPDRAPEPDCPGELKATAPASPRLGQSQSQADERAGTPPPAPPLPPPAPPLPPPAPPLPPAAPPLPCAQKAAHPPAGFTKTPKSSSPALKPKPNPPSPENTASSAPVDWRDPSQMEKLRNELAAYLCGSRREDRFLSHRPGPTVAPQSKEGKKGPRLPEKETLLSLPAKDTPPGVPEKSLGGSSLTETEAAPSLTLPSVDYIPQDSPTPSVRQIRNELEARLSSAAEKEAKPSIGSLPPKPRLEGGRICENGADDDKLSKPVAKNLPPQSTTLLPTTSLQPKAMLGPAIPPKATPEPAIPPKATLWPATPPKATLGPATPLKATSGPTTPLKATSGPAIASTATTLPTTTSQLMAEKDSGPAGQPEKPASQEVSTPSQARGEGSPSEATRLPTQGARSSAAFPPKTSPGGGEVPCLYKPHCHQSSLSREVAVVMPTLARGGAAGPGEPVEVKEPPGLPAKPPASAQPTDELLRHPVTGEVVERGSPMALLLAARQRAQKGRSVGAALGRSSLPGSLRDHSHQAEASSDSIFHSQGTPNSFTVVPKLPKEAEKDSPLTTEIPNKWGPRLGRDAEGTELSRRHNWTKPEPQAPVAWERVAPSNLPQGHPLPKSFSSPPSPSNKREEEEEEFNFEVIPPPPEFSNDPEPPAPALQYLGRQSSPPRNNYSDLRQLPNAGPGAPPALGFSRFPAGARYAGAGGLERFSGGGRSLIKKRLYVGEPHRGPGLPHGGTGRSLSSPNCFGPQPGGPEMRRVNSAGRAPPGGLHAPRLSLEGAARGAAEAKHKAPGSADYGFAPAAGRSPYTTTRYGSPINTFTVRPGTRHPISYVCSGAHRKATS

SEQ ID NO: 6395 - protein, 580 aa, Homo sapiens
MARELYHEEFARAGKQAGLQVWRIEKLELVPVPQSAHGDFYVGDAYLVLHTAKTSRGFTYHLHFWLGKECSQDESTAAAIFTVQMDDYLGGKPVQNRELQGYESNDFVSYFKGGLKYKAGGVASGLNHVLTNDLTAKRLLHVKGRRVVRATEVPLSWDSFNKGDCFIIDLGTEIYQWCGSSCNKYERLKANQVATGIRYNERKGRSELIVVEEGSEPSELIKVLGEKPELPDGGDDDDIIADISNRKMAKLYMVSDASGSMRVTVVAEENPFSMAMLLSEECFILDHGAAKQIFVWKGKDANPQERKAAMKTAEEFLQQMNYSKNTQIQVLPEGGETPIFKQFFKDWRDKDQSDGFGKVYVTEKVAQIKQIPFDASKLHSSPQMAAQHNMVDDGSGKVEIWRVENNGRIQVDQNSYGEFYGGDCYIILYTYPRGQIIYTWQGANATRDELTTSAFLTVQLDRSLGGQAVQIRVSQGKEPVHLLSLFKDKPLIIYKNGTSKKGGQAPAPPTRLFQVRRNLASITRIVERSSGIPLEGKKTTRPHHYWKPRLKTIHLGFTAALTKLEDLLLKRFQESSPRMI

SEQ ID NO: 6396 - protein, 1288 aa, Homo sapiens
MPRKGTQPSTARRREEGPPPPSPDGASSDAEPEPPSGRTESPATAAETASEELDNRSLEEILNSIPPPPPPAMTNEAGAPRLMITHIVNQNFKSYAGEKILGPFHKRFSCIIGPNGSGKSNVIDSMLFVFGYRAQKIRSKKLSVLIHNSDEHKDIQSCTVEVHFQKIIDKEGDDYEVIPNSNFYVSRTACRDNTSVYHISGKKKTFKDVGNLLRSHGIDLDHNRFLILQGEVEQIAMMKPKGQTEHDEGMLEYLEDIIGCGRLNEPIKVLCRRVEILNEHRGEKLNRVKMVEKEKDALEGEKNIAIEFLTLENEIFRKKNHVCQYYIYELQKRIAEMETQKEKIHEDTKEINEKSNILSNEMKAKNKDVKDTEKKLNKITKFIEENKEKFTQLDLEDVQVREKLKHATSKAKKLEKQLQKDKEKVEEFKSIPAKSNNIINETTTRNNALEKEKEKEEKKLKEVMDSLKQETQGLQKEKESREKELMGFSKSVNEARSKMDVAQSELDIYLSRHNTAVSQLTKAKEALIAASETLKERKAAIRDIEGKLPQTEQELKEKEKELQKLTQEETNFKSLVHDLFQKVEEAKSSLAMNRSRGKVLDAIIQEKKSGRIPGIYGRLGDLGAIDEKYDVAISSCCHALDYIVVDSIDIAQECVNFLKRQNIGVATFIGLDKMAVWAKKMTEIQTPENTPRLFDLVKVKDEKIRQAFYFALRDTLVADNLDQATRVAYQKDRRWRVVTLQGQIIEQSGTMTGGGSKVMKGRMGSSLVIEISEEEVNKMESQLQNDSKKAMQIQEQKVQLEERVVKLRHSEREMRNTLEKFTASIQRLIEQEEYLNVQVKELEANVLATAPDKKKQKLLEENVSAFKTEYDAVAEKAGKVEAEVKRLHNTIVEINNHKLKAQQDKLDKINKQLDECASAITKAQVAIKTADRNLQKAQDSVLRTEKEIKDTEKEVDDLTAELKSLEDKAAEVVKNTNAAEESLPEIQKEHRNLLQELKVIQENEHALQKDALSIKLKLEQIDGHIAEHNSKIKYWHKEISKISLHPIEDNPIEEISVLSPEDLEAIKNPDSITNQIALLEARCHEMKPNLGAIAEYKKKEELYLQRVAELDKITYERDSFRQAYEDLRKQRLNEFMAGFYIITNKLKENYQMLTLGGDAELELVDSLDPFSEGIMFSVRPPKKSWKKIFNLSGGEKTLSSLALVFALHHYKPTPLYFMDEIDAALDFKNVSIVAFYIYEQTKNAQFIIISLRNNMFEISDRLIGIYKTYNITKSVAVNPKEIASKGLC

SEQ ID NO: 6397 - protein, 984 aa, Homo sapiens
METKGYHSLPEGLDMERRWGQVSQAVERSSLGPTERTDENNYMEIVNVSCVSGAIPNNSTQGSSKEKQELLPCLQQDNNRPGILTSDIKTELESKELSATVAESMGLYMDSVRDADYSYEQQNQQGSMSPAKIYQNVEQLVKFYKGNGHRPSTLSCVNTPLRSFMSDSGSSVNGGVMRAVVKSPIMCHEKSPSVCSPLNMTSSVCSPAGINSVSSTTASFGSFPVHSPITQGTPLTCSPNVENRGSRSHSPAHASNVGSPLSSPLSSMKSSISSPPSHCSVKSPVSSPNNVTLRSSVSSPANINNSRCSVSSPSNTNNRSTLSSPAASTVGSICSPVNNAFSYTASGTSAGSSTLRDVVPSPDTQEKGAQEVPFPKTEEVESAISNGVTGQLNIVQYIKPEPDGAFSSSCLGGNSKINSDSSFSVPIKQESTKHSCSGTSFKGNPTVNPFPFMDGSYFSFMDDKDYYSLSGILGPPVPGFDGNCEGSGFPVGIKQEPDDGSYYPEASIPSSAIVGVNSGGQSFHYRIGAQGTISLSRSARDQSFQHLSSFPPVNTLVESWKSHGDLSSRRSDGYPVLEYIPENVSSSTLRSVSTGSSRPSKICLVCGDEASGCHYGVVTCGSCKVFFKRAVEGQHNYLCAGRNDCIIDKIRRKNCPACRLQKCLQAGMNLGARKSKKLGKLKGIHEEQPQQQQPPPPPPPPQSPEEGTTYIAPAKEPSVNTALVPQLSTISRALTPSPVMVLENIEPEIVYAGYDSSKPDTAENLLSTLNRLAGKQMIQVVKWAKVLPGFKNLPLEDQITLIQYSWMCLSSFALSWRSYKHTNSQFLYFAPDLVFNEEKMHQSAMYELCQGMHQISLQFVRLQLTFEEYTIMKVLLLLSTIPKDGLKSQAAFEEMRTNYIKELRKMVTKCPNNSGQSWQRFYQLTKLLDSMHDLVSDLLEFCFYTFRESHALKVEFPAMLVEIISDQLPKVESGNAKPLYFHRK

SEQ ID NO: 6398 - protein, 470 aa, Homo sapiens
MAQRYDELPHYGGMDGVGVPASMYGDPHAPRPIPPVHHLNHGPPLHATQHYGAHAPHPNVMPASMGSAVNDALKRDKDAIYGHPLFPLLALVFEKCELATCTPREPGVAGGDVCSSDSFNEDIAVFAKQVRAEKPLFSSNPELDNLMIQAIQVLRFHLLELEKVHELCDNFCHRYISCLKGKMPIDLVIDERDGSSKSDHEELSGSSTNLADHNPSSWRDHDDATSTHSAGTPGPSSGGHASQSGDNSSEQGDGLDNSVASPGTGDDDDPDKDKKRQKKRGIFPKVATNIMRAWLFQHLTHPYPSEEQKKQLAQDTGLTILQVNNWFINARRRIVQPMIDQSNRAVSQGAAYSPEGQPMGSFVLDGQQHMGIRPAGLQSMPGDYVSQGGPMGMSMAQPSYTPPQMTPHPTQLRHGPPMHSYLPSHPHHPAMMMHGGPPTHPGMTMSAQSPTMLNSVDPNVGGQVMDIHAQ

SEQ ID NO: 6399 - protein, 563 aa, Homo sapiens
MAAAAVTGQRPETAAAEEASRPQWAPPDHCQAQAAAGLGDGEDAPVRPLCKPRGICSRAYFLVLMVFVHLYLGNVLALLLFVHYSNGDESSDPGPQHRAQGPGPEPTLGPLTRLEGIKVGHERKVQLVTDRDHFIRTLSLKPLLFEIPGFLTDEECRLIIHLAQMKGLQRSQILPTEEYEEAMSTMQVSQLDLFRLLDQNRDGHLQLREVLAQTRLGNGWWMTPESIQEMYAAIKADPDGDGVLSLQEFSNMDLRDFHKYMRSHKAESSELVRNSHHTWLYQGEGAHHIMRAIRQRVLRLTRLSPEIVELSEPLQVVRYGEGGHYHAHVDSGPVYPETICSHTKLVANESVPFETSCRQVSPNWGLPSILRPGTPMTQAQPCTVGVPLGMGPGDHWVIPVSPWEHPQLGTCSVPPLPYSYMTVLFYLNNVTGGGETVFPVADNRTYDEMSLIQDDVDLRDTRRHCDKGNLRVKPQQGTAVFWYNYLPDGQGWVGDVDDYSLHGGCLVTRGTKWIANNWINVDPSRARQALFQQEMARLAREGGTDSQPEWALDRAYRDARVEL

SEQ ID NO: 6400 - protein, 1006 aa, Homo sapiens
MLRTAGRDGLCRLSTYLEELEAVELKKFKLYLGTATELGEGKIPWGSMEKAGPLEMAQLLITHFGPEEAWRLALSTFERINRKDLWERGQREDLVRDTPPGGPSSLGNQSTCLLEVSLVTPRKDPQETYRDYVRRKFRLMEDRNARLGECVNLSHRYTRLLLVKEHSNPMQVQQQLLDTGRGHARTVGHQASPIKIETLFEPDEERPEPPRTVVMQGAAGIGKSMLAHKVMLDWADGKLFQGRFDYLFYINCREMNQSATECSMQDLIFSCWPEPSAPLQELIRVPERLLFIIDGFDELKPSFHDPQGPWCLCWEEKRPTELLLNSLIRKKLLPELSLLITTRPTALEKLHRLLEHPRHVEILGFSEAERKEYFYKYFHNAEQAGQVFNYVRDNEPLFTMCFVPLVCWVVCTCLQQQLEGGGLLRQTSRTTTAVYMLYLLSLMQPKPGAPRLQPPPNQRGLCSLAADGLWNQKILFEEQDLRKHGLDGEDVSAFLNMNIFQKDINCERYYSFIHLSFQEFFAAMYYILDEGEGGAGPDQDVTRLLTEYAFSERSFLALTSRFLFGLLNEETRSHLEKSLCWKVSPHIKMDLLQWIQSKAQSDGSTLQQGSLEFFSCLYEIQEEEFIQQALSHFQVIVVSNIASKMEHMVSSFCLKRCRSAQVLHLYGATYSADGEDRARCSAGAHTLLVQLRPERTVLLDAYSEHLAAALCTNPNLIELSLYRNALGSRGVKLLCQGLRHPNCKLQNLRLKRCRISSSACEDLSAALIANKNLTRMDLSGNGVGFPGMMLLCEGLRHPQCRLQMIQLRKCQLESGACQEMASVLGTNPHLVELDLTGNALEDLGLRLLCQGLRHPVCRLRTLWLKICRLTAAACDELASTLSVNQSLRELDLSLNELGDLGVLLLCEGLRHPTCKLQTLRLGICRLGSAACEGLSVVLQANHNLRELDLSFNDLGDWGLWLLAEGLQHPACRLQKLWWLFGMDLNKMTHSRLAALRVTKPYLDIGC

SEQ ID NO: 6401 - protein, 425 aa, Homo sapiens
MAAGGDHGSPDSYRSPLASRYASPEMCFVFSDRYKFRTWRQLWLWLAEAEQTLGLPITDEQIQEMKSNLENIDFKMAAEEEKRLRHDVMAHVHTFGHCCPKAAGIIHLGATSCYVGDNTDLIILRNALDLLLPKLARVISRLADFAKERASLPTLGFTHFQPAQLTTVGKRCCLWIQDLCMDLQNLKRVRDDLRFRGVKGTTGTQASFLQLFEGDDHKVEQLDKMVTEKAGFKRAFIITGQTYTRKVDIEVLSVLASLGASVHKICTDIRLLANLKEMEEPFEKQQIGSSAMPYKRNPMRSERCCSLARHLMTLVMDPLQTASVQWFERTLDDSANRRICLAEAFLTADTILNTLQNISEGLVVYPKVIERRIRQELPFMATENIIMAMVKAGGSRQVQRFLEEEVYPLLKPYESVMKVKAELCL

SEQ ID NO: 6402 - protein, 536 aa, Homo sapiens
MCSKPEDPVEYLESCLQKVKELGGCDKVKWDTFVSQEKKTLPPLNGGQSRRSFLRNVMPENSNFPYRRYDRLPPIHQFSIESDTDLSETAELIEEYEVFDPTRPRPKIILVIGGPGSGKGTQSLKIAERYGFQYISVGELLRKKIHSTSSNRKWSLIAKIITTGELAPQETTITEIKQKLMQIPDEEGIVIDGFPRDVAQALSFEDQICTPDLVVFLACANQRLKERLLKRAEQQGRPDDNVKATQRRLMNFKQNAAPLVKYFQEKGLIMTFDADRDEDEVFYDISMAVDNKLFPNKEAAAGSSDLDPSMILDTGEIIDTGSDYEDQGDDQLNVFGEDTMGGFMEDLRKCKIIFIIGGPGSGKGTQCEKLVEKYGFTHLSTGELLREELASESERSKLIRDIMERGDLVPSGIVLELLKEAMVASLGDTRGFLIDGYPREVKQGEEFGRRIGDPQLVICMDCSADTMTNRLLQRSRSSLPVDDTTKTIAKRLEAYYRASIPVIAYYETKTQLHKINAEGTPEDVFLQLCTAIDSIF

SEQ ID NO: 6403 - protein, 147 aa, Homo sapiens
MGGCMHSTQDKSLHLEGDPNPSAAPTSTCAPRKMPKRISISKQLASVKALRKCSDLEKAIATTALIFRNSSDSDGKLEKAIAKDLLQTQFRNFAEGQETKPKYREILSELDEHTENKLDFEDFMILLLSITVMSDLLQNIRNVKIMK

SEQ ID NO: 6404 - protein, 170 aa, Homo sapiens
MDEQPRLMHSHAGVGMAGHPGLSQHLQDGAGGTEGEGGRKQDIGDILQQIMTITDQSLDEAQARKHALNCHRMKPALFNVLCEIKEKTVLSIRGAQEEEPTDPQLMRLDNMLLAEGVAGPEKGGGSAAAAAAAAASGGAGSDNSVEHSDYRAKLSQIRQIYHTELEKYEQ

SEQ ID NO: 6405 - protein, 1044 aa, Homo sapiens
MLKPQPLQQPSQPQQPPPTQQAVARRPPGGTSPPNGGLPGPLATSAAPPGPPAAASPCLGPVAAAGSGLRRGAEGILAPQPPPPQQHQERPGAAAIGSARGQSTGKGPPQSPVFEGVYNNSRMLHFLTAVVGSTCDVKVKNGTTYEGIFKTLSSKFELAVDAVHRKASEPAGGPRREDIVDTMVFKPSDVMLVHFRNVDFNYATKDKFTDSAIAMNSKVNGEHKEKVLQRWEGGDSNSDDYDLESDMSNGWDPNEMFKFNEENYGVKTTYDSSLSSYTVPLEKDNSEEFRQRELRAAQLAREIESSPQYRLRIAMENDDGRTEEEKHSAVQRQGSGRESPSLASREGKYIPLPQRVREGPRGGVRCSSSRGGRPGLSSLPPRGPHHLDNSSPGPGSEARGINGGPSRMSPKAQRPLRGAKTLSSPSNRPSGETSVPPPPAVGRMYPPRSPKSAAPAPISASCPEPPIGSAVPTSSASIPVTSSVSDPGVGSISPASPKISLAPTDVKELSTKEPGRTLEPQELARIAGKVPGLQNEQKRFQLEELRKFGAQFKLQPSSSPENSLDPFPPRILKEEPKGKEKEVDGLLTSEPMGSPVSSKTESVSDKEDKPPLAPSGGTEGPEQPPPPCPSQTGSPPVGLIKGEDKDEGPVAEQVKKSTLNPNAKEFNPTKPLLSVNKSTSTPTSPGPRTHSTPSIPVLTAGQSGLYSPQYISYIPQIHMGPAVQAPQMYPYPVSNSVPGQQGKYRGAKGSLPPQRSDQHQPASAPPMMQAAAAAGPPLVAATPYSSYIPYNPQQFPGQPAMMQPMAHYPSQPVFAPMLQSNPRMLTSGSHPQAIVSSSTPQYPSAEQPTPQALYATVHQSYPHHATQLHAHQPQPATTPTGSQPQSQHAAPSPVQHQAGQAPHLGSGQPQQNLYHPGALTGTPPSLPPGPSAQSPQSSFPQPAAVYAIHHQQLPHGFTNMAHVTQAHVQTGITAAPPPHPGAPHPPQVMLLHPPQSHGGPPQGAVPQSGVPALSASTPSPYPYIGHPQVQSHPSQQLPFHPPGN

SEQ ID NO: 6406 - protein, 735 aa, Homo sapiens
MAEPLLRKTFSRLRGREKLPRKKSDAKERGHPAQRPEPSPPEPEPQAPEGSQAGAEGPSSPEASRSPARGAYLQSLEPSSRRWVLGGAKPAEDTSLGPGVPGTGEPAGEIWYNPIPEEDPRPPAPEPPGPQPGSAESEGLAPQGAAPASPPTKASRTKSPGPARRLSIKMKKLPELRRRLSLRGPRAGRERERAAPAGSVISRYHLDSSVGGPGPAAGPGGTRSPRAGYLSDGDSPERPAGPPSPTSFRPYEVGPAARAPPAALWGRLSLHLYGLGGLRPAPGATPRDLCCLLQVDGEARARTGPLRGGPDFLRLDHTFHLELEAARLLRALVLAWDPGVRRHRPCAQGTVLLPTVFRGCQAQQLAVRLEPQGLLYAKLTLSEQQEAPATAEPRVFGLPLPLLVERERPPGQVPLIIQKCVGQIERRGLRVVGLYRLCGSAAVKKELRDAFERDSAAVCLSEDLYPDINVITGILKDYLRELPTPLITQPLYKVVLEAMARDPPNRVPPTTEGTRGLLSCLPDVERATLTLLLDHLRLVSSFHAYNRMTPQNLAVCFGPVLLPARQAPTRPRARSSGPGLASAVDFKHHIEVLHYLLQSWPDPRLPRQSPDVAPYLRPKRQPPLHLPLADPEVVTRPRGRGGPESPPSNRYAGDWSVCGRDFLPCGRDFLSGPDYDHVTGSDSEDEDEEVGEPRVTGDFEDDFDAPFNPHLNLKDFDALILDLERELSKQINVCL

SEQ ID NO: 6407 - protein, 321 aa, Homo sapiens
MAAGWLTTWSQNSVTFQEVAVDFSQEEWALLDPAQKNLYKDVMLENFRNLASVGYQLCRHSLISKVDQEQLKTDERGILQGDCADWETQLKPKDTIAMQNIPGGKTSNGINTNCVRTHSGEMPYECSDCGKAFIFQSSLKKHMRSHTGEKPYECDHCGKSFSQSSHLNVHKRTHTGEKPYDCKECGKAFTVPSSLQKHVRTHTGEKPYECSDCGKAFIDQSSLKKHTRSHTGEKPYECNQCGKSFSTGSYLIVHKRTHTGEKTYECKECGKAFRNSSCLRVHVRTHTGEKPYKCIQCEKAFSTSTNLIMHKRIHNGQKLHE

SEQ ID NO: 6408 - protein, 584 aa, Homo sapiens
MDGWRRPLQSVGKVCEKNMKTSEMHTMSGAQTGRKEKGDPLNIAIDKMTKKTRDLRRQLRKAVMDHISDSFLETNVPLLVLIEAAKSGNEKEVKEYAQVFREHANKLVEVANLACSISNNEEGVKLVRMAATQIDSLCPQVINAALTLAARPQSKVAQDNMDVFKDQWEKQVRVLTEAVDDITSVDDFLSVSENHILEDVNKCVIALQEGDVDTLDRTAGAIRGRAARVIHIINAEMENYEAGVYTEKVLEATKLLSETVMPRFAEQVEVAIEALSANVPQPFEENEFIDASRLVYDGVRDIRKAVLMIRTPEELEDDSDFEQEDYDVRSRTSVQTEDDQLIAGQSARAIMAQLPQEEKAKIAEQVEIFHQEKSKLDAEVAKWDDSGNDIIVLAKQMCMIMMEMTDFTRGKGPLKNTSDVINAAKKIAEAGSRMDKLARAVADQCPDSACKQDLLAYLQRIALYCHQLNICSKVKAEVQNLGGELIVSGLDSATSLIQAAKNLMNAVVLTVKASYVASTKYQKVYGTAAVNSPVVSWKMKAPEKKPLVKREKPEEFQTRVRRGSQKKHISPVQALSEFKAMDSF

SEQ ID NO: 6409 - protein, 641 aa, Homo sapiens
MVHGSVTFRDVAIDFSQEEWECLQPDQRTLYRDVMLENYSHLISLGSSISKPDVITLLEQEKEPWMVVRKETSRRYPDLELKYGPEKVSPENDTSEVNLPKQVIKQISTTLGIEAFYFRNDSEYRQFEGLQGYQEGNINQKMISYEKLPTHTPHASLICNTHKPYECKECGKYFSRSANLIQHQSIHTGEKPFECKECGKAFRLHIQFTRHQKFHTGEKPFECNECGKAFSLLTLLNRHKNIHTGEKLFECKECGKSFNRSSNLVQHQSIHSGVKPYECKECGKGFNRGAHLIQHQKIHSNEKPFVCKECGMAFRYHYQLIEHCQIHTGEKPFECKECGKAFTLLTKLVRHQKIHTGEKPFECRECGKAFSLLNQLNRHKNIHTGEKPFECKECGKSFNRSSNLVQHQSIHAGIKPYECKECGKGFNRGAHLIQHQKIHSNEKPFVCRECEMAFRYHCQLIEHSRIHTGDKPFECQDCGKAFNRGSSLVQHQSIHTGEKPYECKECGKAFRLYLQLSQHQKTHTGEKPFECKECGKFFRRGSNLNQHRSIHTGKKPFECKECGKAFRLHMHLIRHQKLHTGEKPFECKECGKAFRLHMQLIRHQKLHTGEKPFECKECGKVFSLPTQLNRHKNIHTGEKAS

SEQ ID NO: 6410 - protein, 405 aa, Homo sapiens
MKVAPDKTCMQFSIRRPKLPSSETHPEESMYKRLGVSAWLNHLNELGQVEEEYKLRKAIFFGGIDVSIRGEVWPFLLRYYSHESTSEEREALRLQKRKEYSEIQQKRLSMTPEEHRAFWRNVQFTVDKDVVRTDRNNQFFRGEDNPNVESMRRILLNYAVYNPAVGYSQGMSDLVAPILAEVLDESDTFWCFVGLMQNTIFVSSPRDEDMEKQLLYLRELLRLTHVRFYQHLVSLGEDGLQMLFCHRWLLLCFKREFPEAEALRIWEACWAHYQTDYFHLFICVAIVAIYGDDVIEQQLATDQMLLHFGNLAMHMNGELVLRKARSLLYQFRLLPRIPCSLHDLCKLCGSGMWDSGSMPAVECTGHHPGSESCPYGGTVEMPSPKSLREGKKGPKTPQDGFGFRR

SEQ ID NO: 6411 - protein, 500 aa, Homo sapiens
MQTKGGQTWARRALLLGILWATAHLPLSGTSLPQRLPRATGNSTQCVISPSSEFPEGFFTRQERRDGGIIIYFLIIVYMFMAISIVCDEYFLPSLEIISESLGLSQDVAGTTFMAAGSSAPELVTAFLGVFITKGDIGISTILGSAIYNLLGICAACGLLSNTVSTLSCWPLFRDCAAYTISAAAVLGIIYDNQVYWYEGALLLLIYGLYVLVLCFDIKINQYIIKKCSPCCACLAKAMERSEQQPLMGWEDEGQPFIRRQSRTDSGIFYEDSGYSQLSISLHGLSQVSEDPPSVFNMPEADLKRIFWVLSLPIITLLFLTTPDCRKKFWKNYFVITFFMSAIWISAFTYILVWMVTITGETLEIPDTVMGLTLLAAGTSIPDTIASVLVARKGKGDMAMSNIVGSNVFDMLCLGIPWFIKTAFINGSAPAEVNSRGLTYITISLNISIIFLFLAVHFNGWKLDRKLGIVCLLSYLGLATLSVLYELGIIGNNKIRGCGG

SEQ ID NO: 6412 - protein, 552 aa, Homo sapiens
MDNMSITNTPTSNDACLSIVHSLMCHRQGGESETFAKRAIESLVKKLKEKKDELDSLITAITTNGAHPSKCVTIQRTLDGRLQVAGRKGFPHVIYARLWRWPDLHKNELKHVKYCQYAFDLKCDSVCVNPYHYERVVSPGIDLSGLTLQSNAPSSMMVKDEYVHDFEGQPSLSTEGHSIQTIQHPPSNRASTETYSTPALLAPSESNATSTANFPNIPVASTSQPASILGGSHSEGLLQIASGPQPGQQQNGFTGQPATYHHNSTTTWTGSRTAPYTPNLPHHQNGHLQHHPPMPPHPGHYWPVHNELAFQPPISNHPAPEYWCSIAYFEMDVQVGETFKVPSSCPIVTVDGYVDPSGGDRFCLGQLSNVHRTEAIERARLHIGKGVQLECKGEGDVWVRCLSDHAVFVQSYYLDREAGRAPGDAVHKIYPSAYIKVFDLRQCHRQMQQQAATAQAAAAAQAAAVAGNIPGPGSVGGIAPAISLSAAAGIGVDDLRRLCILRMSFVKGWGPDYPRQSIKETPCWIEIHLHRALQLLDEVLHTMPIADPQPLD

SEQ ID NO: 6413 - protein, 2977 aa, Homo sapiens
KESCGDPGTPLYGIREGDGFSNRDVLRFECQFGFELIGEKSIVCQENNQWSANIPICIFPCLSNFTAPMGTVLSPDYPEGYGNNLNCIWTIISDPGSRIHLSFNDFDLESQFDFLAVKDGDSPESPILGTFTGAEVPSHLTSNSHILRLEFQADHSMSGRGFNITYNTFGHNECPDPGIPINARRFGDNFQLGSSISVICEEGFIKTQGTETITCILMDGKVMWSGLIPKCGAPCGGHFSAPSGVILSPGWPGYYKDSLNCEWVIEAEPGHSIKITFERFQTELNYDVLEVHDGPNLLSPLLGSYNGTQVPQFLFSSSNFIYLLFTTDNSRSNNGFKIHYESVTVNTYSCLDPGIPVHGRRYGHDFSIGSTVSFSCDSGYRLSHEEPLLCEKNHWWSHPLPTCDALCGGDVRGPSGTILSPGYPEFYPNSLNCTWTVDVTHGKGVQFNFHTFHLEDHHDYLLITENGSFTQPLARLTGSDLPPTINAGLYGNFRAQLRFISDFSISYEGFNITFSEYNLEPCEDPGIPQYGSRIGFNFGIGDTLTFSCSSGYRLEGTSEIICLGGGRRVWSAPLPRCVAECGASATNNEGILLSPNYPLNYENNHECIYSIQVQAGKGINISARTFHLAQGDVLKIYDGKDKTTHLLGAFTGASMRGLTLSSTSNQLWLEFNSDTEGTDEGFQLVYTSFELSHCEDPGIPQFGYKISDQGHFAGSTIIYGCNPGYTLHGSSLLKCMTGERRAWDYPLPSCIAECGGRFKGESSGRILSPGYPFPYDNNLRCMWMIEVDPGNIVSLQFLAFDTEASHDILRVWDGPPENDMLLKEISGSLIPEGIHSTLNIVTIQFDTDFYISKSGFAIQFSSSVATACRDPGVPMNGTRNGDGREPGDTVVFQCDPGYELQGEERITCIQVENRYFWQPSPPVCIAPCGGNLTGSSGFILSPNFPHPYPHSRDCDWTITVNADYVISLAFISFSIEPNYDFLYIYDGPDSNSPLIGSFQDSKLPERIESSSNTMHLAFRSDGSVSYTGFHLEYKAKLRESCFDPGNIMNGTRLGMDYKLGSTVTYYCDAGYVLQGYSTLTCIMGDDGRPGWNRALPSCHAPCGSRSTGSEGTVLSPNYPKNYSVGHNCVYSIAVPKEFAVPRTSSTQCSSVPEPRFGRRIGNEFAVGSSVLFDCNPGYILHGSIAIRCETVPNSLAQWNDSLPTCIVPCGGILTKRKGTILSPGYPEPYDNNLNCVWKITVPEGAGIQVQVVSFATEHNWDSLDFYDGGDNNAPRLGSYSGTTIPHLLNSTSNNLYLNFQSDISVSAAGFHLEYTAIGLDSCPEPQTPSSGIKIGDRYMVGDVVSFQCDQGYSLQGHSHITCMPGPVRRWNYPIPICLAQCGGAMSDFSGVILSPGFPGNYPSSLDCTWTINLPIGFGVHLQFVNFSTETIHDYLEVRSGSSETSTVIGRLSGPQIPSSLFSTTHETSLYFHSDYSQNKQGFHIVYQAYQLQSCPDPRPFRNGFVIGNDFTVGQTISFECFPGYTLIGNSALTCLHGVSRNWNHPLPRCEALCGGNITAMNGTIYSPGYPDEYPNFQDCFWLVRVPPGNGIYINFTVLQTEPIYDFITVWDGPDQNSPQIGQFSGNTALESVYSTSNQILIKFHSDFTTSGFFVLSYHAYQLRVCQPPPPVPNAEILTEDDEFEIGDIIRYQCLPGFTLVGNAILTCRLGERLQMDGAPPVCQVLCPANELRLDSTGVILSPGYPDSYPNLQMCAWSISVEKGYNITMFVEFFQTEKEFDVLQVYDGPNIQSPVLISLSGDYSSAFNITSNGHEVFLQWSADHGNNKKGFRIRYIAFYCSTPESPPHGYIISQTGGQLNSVVRWACDRGFRLVGKSSAVCRKSSYGYHAWDAPVPACQAISCGIPKAPTNGGILTTDYLVGTRVTYFCNDGYRLSSKELTTAVCQSDGTWSNHNKTPRCVVVTCPSINSFILEHGRWRIVNGSHYEYKTKVVFSCDPGYHGLGPASIECLPNGTWSWRNERPYCQIISCGELPTPPNGNKIGTQTSYGSTAIFTCDLGFMLVGSAVRECLSSGLWSESETRCLAGHCGIPELIVNGQVIGENYGYRDTVVYQCNPGFRLIGSSVRICQQDHNWSGQLPSCVPVSCGHPGSPIYGRTSGNGFNFNDVVTFSCNIGYLMQGPTKAQCQANRQWSHPPPMCKVVNCSDPGIPANSKRESKIEHGNFTYGTVVFYDCNPGYFLFGSSVLICQPNGQWDKPLPECIMIDCGHPGVPPNAVLSGEKYTFGSTVHYSCTGKRSLLGQSSRTCQLNGHWSGSQPHCSGDATGTCGDPGTPGHGSRQESNFRTKSTVRYACDTGYILHGSEERTCLANGSWTGRQPECKAVQCGNPGTTANGKVFRIDGTTFSSSVIYSCMEGYILSGPSVRQCTANGTWSGTLPNCTIISCGDPGIPANGLRYGDDYVVGQNVSYMCQPGYTMELNGSRIRTCTINGTWSGVMPTCRAVTCPTPPQISNGRLEGTNFDWGFSISYICSPGYELSFPAVLTCVGNGTWSGEVPQCLPKFCGDPGIPAQGKREGKSFIYQSEVSFSCNFPFILVGSSTRICQADGTWSGSSPHCIEPTQTSCENPGVPRHGSQNNTFGFQVGSVVQFHCKKGHLLQGSTTRTCLPDLTWSGIQPECIPHSCKQPETPAHANVVGMDLPSHGYTLIYTCQPGFFLAGGTEHRVCRSDNTWTGKVPICEAGSKILVKDPRPALGTPSPKLSVPDDVFAQNYIWKGSYNFKGRKQPMTLTVTSFNASTGRVNATLSNSNMELLLSGVYKSQEARLMLRIYLIKVPAHASVKKMKEENWAMDGFVSAEPDGATYVFQGFIQGKDYGQFGLQRLGLNMSEGSNSSNQPHGTNSSSVAIAILVPFFALIFAGFGFYLYKQRTAPKTQYTGCSVHENNNGQAAFENPMYDTNAKSVEGKAVRFDPNLNTVCTMV

SEQ ID NO: 6414 - protein, 533 aa, Homo sapiens
MWLGRRALCALVLLLACASLGLLYASTRDAPGLRLPLAPWAPPQSPRRPELPDLAPEPRYAHIPVRIKEQVVGLLAWNNCSCESSGGGLPLPFQKQVRAIDLTKAFDPAELRAASATREQEFQAFLSRSQSPADQLLIAPANSPLQYPLQGVEVQPLRSILVPGLSLQAASGQEVYQVNLTASLGTWDVAGEVTGVTLTGEGQADLTLVSPGLDQLNRQLQLVTYSSRSYQTNTADTVRFSTEGHEAAFTIRIRHPPNPRLYPPGSLPQGAQYNISALVTIATKTFLRYDRLRALITSIRRFYPTVTVVIADDSDKPERVSGPYVEHYLMPFGKGWFAGRNLAVSQVTTKYVLWVDDDFVFTARTRLERLVDVLERTPLDLVGGAVREISGFATTYRQLLSVEPGAPGLGNCLRQRRGFHHELVGFPGCVVTDGVVNFFLARTDKVREVGFDPRLSRVAHLEFFLDGLGSLRVGSCSDVVVDHASKLKLPWTSRDAGAETYARYRYPGSLDESQMAKHRLLFFKHRLQCMTSQ

SEQ ID NO: 6415 - protein, 377 aa, Homo sapiens
MPRRLQPRGAGTKGPPAPAPAASGAARNSHSAASRDPPASAKPLLRWDEVPDDFVECFILSGYRRLPCTAQECLASVLKPTNETLNFWTHFIPLLLFLSKFCRLFFLSGGDVPFHHPWLLPLWCYASGVLLTFAMSCTAHVFSCLSLRLRAAFFYLDYASISYYGFGSTVAYYYYLLPGLSLLDARVMTPYLQQRLGWHVDCTRLIAAYRALVLPVAFVLAVACTVACCKSRTDWCTYPFALRTFVFVMPLSMACPIMLESWLFDLRGENPTLFVHFYRRYFWLVVAAFFNVSKIPERIQPGLFDIIGHSHQLFHIFTFLSIYDQVYYVEEGLRQFLQAPPAAPTFSGTVGYMLLLVVCLGLVIRKFLNSSEFCSKK

SEQ ID NO: 6416 - protein, 734 aa, Homo sapiens
MNSMKTEENKSFSAMEDDQRTRPEVSKDTVMKQTHADTPVDHCLSGIRKCSSTFKLKSEVNKHETALEMQNPNLNNKECCFTFTLNGNSRKLDRSVFTAYGKPSESIYSALSANDYFSERIKNQFNKNIIVYEEKTIDGHINLGMPLKCLPSDSHFKITFGQRKSSKEDGHILRQCENPNMECILFHVVAIGRTRKKIVKINELHEKGSKLCIYALKGETIEGALCKDGRFRSDIGEFEWKLKEGHKKIYGKQSMVDEVSGKVLEMDISKKKALQQKDIHKKIKQNESATDEINHQSLIQSKKKVHKPKKDGETKDVEHSREQILPPQDLSHYIKDKTRQTIPRIRNYYFCSLPRKYRQINSQVRRRPHLGRRYAINLDVQKEAINLLKNYQTLNEAIMHQYPNFKEEAQWVRKYFREEQKRMNLSPAKQFNIYKKDFGKMTANSVSVATCEQLTYYSKSVGFMQWDNNGNTGNATCFVFNGGYIFTCRHVVHLMVGKNTHPSLWPDIISKCAKVTFTYTEFCPTPDNWFSIEPWLKVSNENLDYAILKLKENGNAFPPGLWRQISPQPSTGLIYLIGHPEGQIKKIDGCTVIPLNERLKKYPNDCQDGLVDLYDTTSNVYCMFTQRSFLSEVWNTHTLSYDTCFSDGSSGSPVFNASGKLVALHTFGLFYQRGFNVHALIEFGYSMDSILCDIKKTNESLYKSLNDEKLETYDEEKGKQESSLQDHQIEPMEC

SEQ ID NO: 6417 - protein, 335 aa, Homo sapiens
MAQVRALHKIMALFSANSIGAMNNSDTRIAGCFLTGIPGLEQLHIWLSIPFCIMYITALEGNGILICVILSQAILHEPMYIFLSMLASADVLLSTTTMPKALANLWLGYSLISFDGCLTQMFFIHFLFIHSAVLLAMAFDRYVAICSPLRYVTILTSKVIGKIVTAALSHSFIIMFPSIFLLEHLHYCQINIIAHTFCEHMGIAHLSCSDISINVWYGLAAALLSTGLDIMLITVSYIHILQAVFRLLSQDARSKALSTCGSHICVILLFYVPALFSVFAYRFGGRSVPCYVHILLASLYVVIPPMLNPVIYGVRTKPILEGAKQMFSNLAKGSK

SEQ ID NO: 6418 - protein, 391 aa, Homo sapiens
MDSLGAVSTRLGFDLFKELKKTNDGNIFFSPVGILTAIGMVLLGTRGATASQLEEVFHSEKETKSSRIKAEEKEVIENTEAVHQQFQKFLTEISKLTNDYELNITNRLFGEKTYLFLQKYLDYVEKYYHASLEPVDFVNAADESRKKINSWVESKTNEKIKDLFPDGSISSSTKLVLVNMVYFKGQWDREFKKENTKEEKFWMNKSTSKSVQMMTQSHSFSFTFLEDLQAKILGIPYKNNDLSMFVLLPNDIDGLEKIIDKISPEKLVEWTSPGHMEERKVNLHLPRFEVEDGYDLEAVLAAMGMGDAFSEHKADYSGMSSGSGLYAQKFLHSSFVAVTEEGTEAAAATGIGFTVTSAPGHENVHCNHPFLFFIRHNESNSILFFGRFSSP

SEQ ID NO: 6419 - protein, 2431 aa, Homo sapiens
MTTLLWVFVTLRVITAAVTVETSDHDNSLSVSIPQPSPLRVLLGTSLTIPCYFIDPMHPVTTAPSTAPLAPRIKWSRVSKEKEVVLLVATEGRVRVNSAYQDKVSLPNYPAIPSDATLEVQSLRSNDSGVYRCEVMHGIEDSEATLEVVVKGIVFHYRAISTRYTLDFDRAQRACLQNSAIIATPEQLQAAYEDGFHQCDAGWLADQTVRYPIHTPREGCYGDKDEFPGVRTYGIRDTNETYDVYCFAEEMEGEVFYATSPEKFTFQEAANECRRLGARLATTGQLYLAWQAGMDMCSAGWLADRSVRYPISKARPNCGGNLLGVRTVYVHANQTGYPDPSSRYDAICYTGEDFVDIPENFFGVGGEEDITVQTVTWPDMELPLPRNITEGEARGSVILTVKPIFEVSPSPLEPEEPFTFAPEIGATAFAEVENETGEATRPWGFPTPGLGPATAFTSEDLVVQVTAVPGQPHLPGGVVFHYRPGPTRYSLTFEEAQQACLRTGAVIASPEQLQAAYEAGYEQCDAGWLRDQTVRYPIVSPRTPCVGDKDSSPGVRTYGVRPSTETYDVYCFVDRLEGEVFFATRLEQFTFQEALEFCESHNATLATTGQLYAAWSRGLDKCYAGWLADGSLRYPIVTPRPACGGDKPGVRTVYLYPNQTGLPDPLSRHHAFCFRGISAVPSPGEEEGGTPTSPSGVEEWIVTQVVPGVAAVPVEEETTAVPSGETTAILEFTTEPENQTEWEPAYTPVGTSPLPGILPTWPPTGAATEESTEGPSATEVPSASEEPSPSEVPFPSEEPSPSEEPFPSVRPFPSVELFPSEEPFPSKEPSPSEEPSASEEPYTPSPPVPSWTELPSSGEESGAPDVSGDFTGSGDVSGHLDFSGQLSGDRASGLPSGDLDSSGLTSTVGSGLPVESGLPSGDEERIEWPSTPTVGELPSGAEILEGSASGVGDLSGLPSGEVLETSASGVGDLSGLPSGEVLETTAPGVEDISGLPSGEVLETTAPGVEDISGLPSGEVLETTAPGVEDISGLPSGEVLETTAPGVEDISGLPSGEVLETTAPGVEDISGLPSGEVLETTAPGVEDISGLPSGEVLETAAPGVEDISGLPSGEVLETAAPGVEDISGLPSGEVLETAAPGVEDISGLPSGEVLETAAPGVEDISGLPSGEVLETAAPGVEDISGLPSGEVLETAAPGVEDISGLPSGEVLETAAPGVEDISGLPSGEVLETAAPGVEDISGLPSGEVLETAAPGVEDISGLPSGEVLETAAPGVEDISGLPSGEVLETAAPGVEDISGLPSGEVLETAAPGVEDISGLPSGEVLETAAPGVEDISGLPSGEVLETAAPGVEDISGLPSGEVLETAAPGVEDISGLPSGEVLETAAPGVEDISGLPSGEVLETTAPGVEEISGLPSGEVLETTAPGVDEISGLPSGEVLETTAPGVEEISGLPSGEVLETSTSAVGDLSGLPSGGEVLEISVSGVEDISGLPSGEVVETSASGIEDVSELPSGEGLETSASGVEDLSRLPSGEEVLEISASGFGDLSGLPSGGEGLETSASEVGTDLSGLPSGREGLETSASGAEDLSGLPSGKEDLVGSASGDLDLGKLPSGTLGSGQAPETSGLPSGFSGEYSGVDLGSGPPSGLPDFSGLPSGFPTVSLVDSTLVEVVTASTASELEGRGTIGISGAGEISGLPSSELDISGRASGLPSGTELSGQASGSPDVSGEIPGLFGVSGQPSGFPDTSGETSGVTELSGLSSGQPGISGEASGVLYGTSQPFGITDLSGETSGVPDLSGQPSGLPGFSGATSGVPDLVSGTTSGSGESSGITFVDTSLVEVAPTTFKEEEGLGSVELSGLPSGEADLSGKSGMVDVSGQFSGTVDSSGFTSQTPEFSGLPSGIAEVSGESSRAEIGSSLPSGAYYGSGTPSSFPTVSLVDRTLVESVTQAPTAQEAGEGPSGILELSGAHSGAPDMSGEHSGFLDLSGLQSGLIEPSGEPPGTPYFSGDFASTTNVSGESSVAMGTSGEASGLPEVTLITSEFVEGVTEPTISQELGQRPPVTHTPQLFESSGKVSTAGDISGATPVLPGSGVEVSSVPESSSETSAYPEAGFGASAAPEASREDSGSPDLSETTSAFHEANLERSSGLGVSGSTLTFQEGEASAAPEVSGESTTTSDVGTEAPGLPSATPTASGDRTEISGDLSGHTSQLGVVISTSIPESEWTQQTQRPAETHLEIESSSLLYSGEETHTVETATSPTDASIPASPEWKRESESTAADQEVCEEGWNKYQGHCYRHFPDRETWVDAERRCREQQSHLSSIVTPEEQEFVNNNAQDYQWIGLNDRTIEGDFRWSDGHPMQFENWRPNQPDNFFAAGEDCVVMIWHEKGEWNDVPCNYHLPFTCKKGTATTYKRRLQKRSSRHPRRSRPSTAH

SEQ ID NO: 6420 - protein, 443 aa, Homo sapiens
MEVTADQPRWVSHHHPAVLNGQHPDTHHPGLSHSYMDAAQYPLPEEVDVLFNIDGQGNHVPPYYGNSVRATVQRYPPTHHGSQVCRPPLLHGSLPWLDGGKALGSHHTASPWNLSPFSKTSIHHGSPGPLSVYPPASSSSLSGGHASPHLFTFPPTPPKDVSPDPSLSTPGSAGSARQDEKECLKYQVPLPDSMKLESSHSRGSMTALGGASSSTHHPITTYPPYVPEYSSGLFPPSSLLGGSPTGFGCKSRPKARSSTGRECVNCGATSTPLWRRDGTGHYLCNACGLYHKMNGQNRPLIKPKRRLSAARRAGTSCANCQTTTTTLWRRNANGDPVCNACGLYYKLHNINRPLTMKKEGIQTRNRKMSSKSKKCKKVHDSLEDFPKNSSFNPAALSRHMSSLSHISPFSHSSHMLTTPTPMHPPSSLSFGPHHPSSMVTAMG

SEQ ID NO: 6421 - protein, 1481 aa, Homo sapiens
MRDSAEGPKEDEEKPSASALEQPATLQEVASQEVPPELATPAPAWEPQPEPDERLEAAACEVNDLGEEEEEEEEEDEEEEEDDDDDELEDEGEEEASMPNENSVKEPEIRCDEKPEDLLEEPKTTSEETLEDCSEVTPAMQIPRTKEEANGDVFETFMFPCQHCERKFTTKQGLERHMHIHISTVNHAFKCKYCGKAFGTQINRRRHERRHEAGLKRKPSQTLQPSEDLADGKASGENVASKDDSSPPSLGPDCLIMNSEKASQDTINSSVVEENGEVKELHPCKYCKKVFGTHTNMRRHQRRVHERHLIPKGVRRKGGLEEPQPPAEQAQATQNVYVPSTEPEEEGEADDVYIMDISSNISENLNYYIDGKIQTNNNTSNCDVIEMESASADLYGINCLLTPVTVEITQNIKTTQVPVTEDLPKEPLGSTNSEAKKRRTASPPALPKIKAETDSDPMVPSCSLSLPLSISTTEAVSFHKEKSVYLSSKLKQLLQTQDKLTPAGISATEIAKLGPVCVSAPASMLPVTSSRFKRRTSSPPSSPQHSPALRDFGKPSDGKAAWTDAGLTSKKSKLESHSDSPAWSLSGRDERETVSPPCFDEYKMSKEWTASSAFSSVCNQQPLDLSSGVKQKAEGTGKTPVQWESVLDLSVHKKHCSDSEGKEFKESHSVQPTCSAVKKRKPTTCMLQKVLLNEYNGIDLPVENPADGTRSPSPCKSLEAQPDPDLGPGSGFPAPTVESTPDVCPSSPALQTPSLSSGQLPPLLIPTDPSSPPPCPPVLTVATPPPPLLPTVPLPAPSSSASPHPCPSPLSNATAQSPLPILSPTVSPSPSPIPPVEPLMSAASPGPPTLSSSSSSSSSSSSFSSSSSSSSPSPPPLSAISSVVSSGDNLEASLPMISFKQEELENEGLKPREEPQSAAEQDVVVQETFNKNFVCNVCESPFLSIKDLTKHLSIHAEEWPFKCEFCVQLFKDKTDLSEHRFLLHGVGNIFVCSVCKKEFAFLCNLQQHQRDLHPDKVCTHHEFESGTLRPQNFTDPSKAHVEHMQSLPEDPLETSKEEEELNDSSEELYTTIKIMASGIKTKDPDVRLGLNQHYPSFKPPPFQYHHRNPMGIGVTATNFTTHNIPQTFTTAIRCTKCGKGVDNMPELHKHILACASASDKKRYTPKKNPVPLKQTVQPKNGVVVLDNSGKNAFRRMGQPKRLNFSVELSKMSSNKLKLNALKKKNQLVQKAILQKNKSAKQKADLKNACESSSHICPYCNREFTYIGSLNKHAAFSCPKKPLSPPKKKVSHSSKKGGHSSPASSDKNSNSNHRRRTADAEIKMQSMQTPLGKTRARSSGPTQVPLPSSSFRSKQNVKFAASVKSKKPSSSSLRNSSPIRMAKITHVEGKKPKAVAKNHSAQLSSKTSRSLHVRVQKSKAVLQSKSTLASKKRTDRFNIKSRERSGGPVTRSLQLAAAADLSENKREDGSAKQELKDFRNFL

SEQ ID NO: 6422 - protein, 992 aa, Homo sapiens
MKGLGDSRPRHLSDSLDPPHEPLFAGTDRNPYLLSPTEAFAREARFPGQNTLPGDGLFPLNNQLPPPSSTFPRIHYNSHFEVPEESPFPSHAQATKINRLPANLLDQFEKQLPIHRDGFSTLQFPRGEAKARGESPGRIRHLVHSVQRLFFTKAPSLEGTAGKVGGNGSKKGGMEDGKGRRAKSKERAKAGEPKRRSRSNISGWWSSDDNLDGEAGAFRSSGPASGLMTLGRQAERSQPRYFMHAYNTISGHMLKTTKNNTTELTAPPPPPAPPATCPSLGVGTDTNYVKRGSWSTLTLSHAHEVCQKTSATLDKSLLKSKSCHQGLAYHYLQVPGGGGEWSTTLLSPRETDAAAEGPIPCRRMRSGSYIKAMGDEDSDESGGSPKPSPKTAARRQSYLRATQQSLGEQSNPRRSLDRLDSVDMLLPSKCPSWEEDYTPVSDSLNDSSCISQIFGQASLIPQLFGHEQQVREAELSDQYEAACESACSEAESTAAETLDLPLPSYFRSRSHSYLRAIQAGCSQEEDSVSLQSLSPPPSTGSLSNSRTLPSSSCLVAYKKTPPPVPPRTTSKPFISVTVQSSTESAQDTYLDSQDHKSEVTSQSGLSNSSDSLDSSTRPPSVTRGGVAPAPEAPEPPPKHAALKSEQGTLTSSESHPEAAPKRKLSSIGIQVDCIQPVPKEEPSPATKFQSIGVQVEDDWRSSVPSHSMSSRRDTDSDTQDANDSSCKSSERSLPDCTPHPNSISIDAGPRQAPKIAQIKRNLSYGDNSDPALEASSLPPPDPWLETSSSSPAEPAQPGACRRDGYWFLKLLQAETERLEGWCCQMDKETKENNLSEEVLGKVLSAVGSAQLLMSQKFQQFRGLCEQNLNPDANPRPTAQDLAGFWDLLQLSIEDISMKFDELYHLKANSWQLVETPEKRKEEKKPPPPVPKKPAKSKPAVSRDKASDASDKQRQEARKRLLAAKRAASVRQNSATESADSIEIYVPEAQTRL

SEQ ID NO: 6423 - protein, 446 aa, Homo sapiens
MEMEQEKMTMNKELSPDAAAYCCSACHGDETWSYNHPIRGRAKSRSLSASPALGSTKEFRRTRSLHGPCPVTTFGPKACVLQNPQTIMHIQDPASQRLTWNKSPKSVLVIKKMRDASLLQPFKELCTHLMEENMIVYVEKKVLEDPAIASDESFGAVKKKFCTFREDYDDISNQIDFIICLGGDGTLLYASSLFQGSVPPVMAFHLGSLGFLTPFSFENFQSQVTQVIEGNAAVVLRSRLKVRVVKELRGKKTAVHNGLGENGSQAAGLDMDVGKQAMQYQVLNEVVIDRGPSSYLSNVDVYLDGHLITTVQGDGVIVSTPTGSTAYAAAAGASMIHPNVPAIMITPICPHSLSFRPIVVPAGVELKIMLSPEARNTAWVSFDGRKRQEIRHGDSISITTSCYPLPSICVRDPVSDWFESLAQCLHWNVRKKQAHFEEEEEEEEEG

SEQ ID NO: 6424 - protein, 345 aa, Homo sapiens
MQPSGHRLRDVEHHPLLAENDNYDSSSSSSSEADVADRVWFIRDGCGMICAVMTWLLVAYADFVVTFVMLLPSKDFWYSVVNGVIFNCLAVLALSSHLRTMLTDPEKSSDCRPSACTVKTGLDPTLVGICGEGTESVQSLLLGAVPKGNATKEYMESLQLKPGEVIYKCPKCCCIKPERAHHCSICKRCIRKMDHHCPWVNNCVGEKNQRFFVLFTMYIALSSVHALILCGFQFISCVRGQWTECSDFSPPITVILLIFLCLEGLLFFTFTAVMFGTQIHSICNDETEIERLKSEKPTWERRLRWEGMKSVFGGPPSLLWMNPFVGFRFRRLPTRPRKGGPEFSV

SEQ ID NO: 6425 - protein, 887 aa, Homo sapiens
MSQPRPRYVVDRAAYSLTLFDDEFEKKDRTYPVGEKLRNAFRCSSAKIKAVVFGLLPVLSWLPKYKIKDYIIPDLLGGLSGGSIQVPQGMAFALLANLPAVNGLYSSFFPLLTYFFLGGVHQMVPGTFAVISILVGNICLQLAPESKFQVFNNATNESYVDTAAMEAERLHVSATLACLTAIIQMGLGFMQFGFVAIYLSESFIRGFMTAAGLQILISVLKYIFGLTIPSYTGPGSIVFTFIDICKNLPHTNIASLIFALISGAFLVLVKELNARYMHKIRFPIPTEMIVVVVATAISGGCKMPKKYHMQIVGEIQRGFPTPVSPVVSQWKDMIGTAFSLAIVSYVINLAMGRTLANKHGYDVDSNQEMIALGCSNFFGSFFKIHVICCALSVTLAVDGAGGKSQVASLCVSLVVMITMLVLGIYLYPLPKSVLGALIAVNLKNSLKQLTDPYYLWRKSKLDCCIWVVSFLSSFFLSLPYGVAVGVAFSVLVVVFQTQFRNGYALAQVMDTDIYVNPKTYNRAQDIQGIKIITYCSPLYFANSEIFRQKVIAKTGMDPQKVLLAKQKYLKKQEKRRMRPTQQRRSLFMKTKTVSLQELQQDFENAPPTDPNNNQTPANGTSVSYITFSPDSSSPAQSEPPASAEAPGEPSDMLASVPPFVTFHTLILDMSGVSFVDLMGIKALAKLSSTYGKIGVKVFLVNIHAQVYNDISHGGVFEDGSLECKHVFPSIHDAVLFAQANARDVTPGHNFQGAPGDAELSLYDSEEDIRSYWDLEQEMFGSMFHAETLTALESLSAAGGCYPYRSESLVSPLFTRQALAAMDKPPAHSTPPTSALSLAAEGHLDFQLLRVSQKQKDKYNCAGLLYKLQKVSQSPHGSVSDGVRLSRT

SEQ ID NO: 6426 - protein, 951 aa, Homo sapiens
MLGSMARKKPRNTSRLPLALNPLKSKDVLAVLAERNEAIVPVGAWVEPASPGSSEIPAYTSAYLIEEELKEQLRKKQEALKHFQKQVKYRVNQQIRLRKKQQLQKSYERAQKEGSIAMQSSATHLTSKRTSVFPNNLNVAIGSSRLPPSLMPGDGIEDEENQNELFQQQAQALSETMKQARHRLASFKTVIKKKGSVFPDDGRKSFLTREEVLSRKPASTGINTGIRGELPIKVHQGLLAAVPYQNYMENQELDYEEPDYEESSSLVTDEKGKEDLFGRGQQDQQAIHSEDKNKPFSRVQKVKFKNPLFVLMEEEEQKQLHFEGLQDILPEAQDYFLEAQGDLLETQGDLTGIQSVKPDTQAVEMKVQVTEPEGQAIEPEGQPIKTETQGIMLKAQSIELEEGSIVLKTQDFLPTNQALLTKNQDVLLKDHCVLPKDQSILLKYQDQDFLPRDQHVLHKDQDILPKYQDQNFLPKDQNFLSRDQHVLPKDQDILPKYQDQNFLPKDQNFLSRDQHVLPKDQNILPKYQGQDFLPKDQDFLSRDQHVLPKDWNILPKCQDQDFLPRDQGVLPKDQNILPICQDQDFLPRDQGYLPKDQNILPICQDRDFLPRDLHVLSNDQNILPKCQDQDFLPKYQKVHFKEPYSDMTDEKGREDFSLADYQCLPPKSQDQDDIKNQQPASFMREERVREELPLDYHQYVVPKIQDQDSPREQNKHIKLPSSFEKWEIARGNTPGVPLAYDRYQSGLSTEFQAPLAFQSDVDKEEDKKERQKQYLRHRRLFMDIEREQVKEQQRQKEQKKKIEKIKKKREQECYAAEQRILRMNFHEDPYSGEKLSEILAQLQLQEIKGTREKQQREKEYLRYVEALRAQIQEKMQLYNITLPPLCCCGPDFWDAHPDTCANNCIFYKNHRAYTRALHSFINSCDVPGGNSTLRVAIHNFASAHRRTLKNL

SEQ ID NO: 6427 - protein, 569 aa, Homo sapiens
MDAGSSRSLENAVNRIYHDQLVPKINTSKKMSTLAHPPNILEMSQEIKKNCGGKQVEITLERTKMTKGIKEKQSNDLEKAAFKRKAEGEEKPTRKKQAKITELDNQLITMPLPHIPLKNIMDVEMKLVYIDEMGVRYEFVESFMSTGSQPTCQAAEIVDPLSVHNFSFLPQIDKWLQVALKDASSCYRQKKYALAAGQFRTALELCSKGAVLGEPFDAPAEDIASVASFIETKLVTCYLRMRKPDLALNHAHRSIVLNPAYFRNHLRQATVFRCLERYSEAARSAMIADYMFWLGGGREESISKLIKLYWQAMIEEAITRAESFSVMYTPFATKIRADKIEKVKDAFTKTHPAYAEYMYTDLQALHMLPQTVDWSSFPPQQYLLTLGFKNKDDGKFLEKISSRKLPIFTEHKTPFGLTREDTVRQMETMGKRILPILDFIRSTQLNGSFPASSGVMEKLQYASLLSQLQRVKEQSQVINQAMAELATIPYLQDISQQEAELLQSLMADAMDTLEGRRNNNERVWNMIQKVGQIEDFLYQLEDSFLKTKKLRTARRQKTKMKRLQTVQQR

SEQ ID NO: 6428 - protein, 337 aa, Homo sapiens
MADLDKLNIDSIIQRLLEVRGSKPGKNVQLQENEIRGLCLKSREIFLSQPILLELEAPLKICGDIHGQYYDLLRLFEYGGFPPESNYLFLGDYVDRGKQSLETICLLLAYKIKYPENFFLLRGNHECASINRIYGFYDECKRRYNIKLWKTFTDCFNCLPIAAIVDEKIFCCHGGLSPDLQSMEQIRRIMRPTDVPDQGLLCDLLWSDPDKDVLGWGENDRGVSFTFGAEVVAKFLHKHDLDLICRAHQVVEDGYEFFAKRQLVTLFSAPNYCGEFDNAGAMMSVDETLMCSFQILKPAEKKKPNATRPVTPPRVASGLNPSIQKASNYRNNTVLYE

SEQ ID NO: 6429 - protein, 6885 aa, Homo sapiens
MASSPELPTEDEQGSWGIDDLHISLQAEQEDTQKKAFTCWINSQLARHTSPSVISDLFTDIKKGHVLLDLLEVLSGQQLPRDKGSNTFQCRINIEHALTFLRNRSIKLINIHVTDIIDGNPSIILGLIWTIILHFHIEKLAQTLSCNYNQPSLDDVSVVDSSPASSPPAKKCSKVQARWQMSARKALLLWAQEQCATYESVNVTDFKSSWRNGMAFLAIIHALRPDLIDMKSVKHRSNKDNLREAFRIAEQELKIPRLLEPEDVDVVDPDEKSIMTYVAQFLQYSKDAPGTGEEAQGKVKDAMGWLTLQKEKLQKLLKDSENDTYFKKYNSLLSFMESFNEEKKSFLDVLSIKRDLDELDKDHLQLREAWDGLDHQINAWKIKLNYALPPPLHQTEAWLQEVEELMDEDLSASQDHSQAVTLIQEKMTLFKSLMDRFEHHSNILLTFENKDENHLPLVPPNKLEEMKRRINNILEKKFILLLEFHYYKCLVLGLVDEVKSKLDIWNIKYGSRESVELLLEDWHKFIEEKEFLARLDTSFQKCGEIYKNLAGECQNINKQYMMVKSDVCMYRKNIYNVKSTLQKVLACWATYVENLRLLRACFEETKKEEIKEVPFETLAQWNLEHATLNEAGNFLVEVSNDVVGSSISKELRRLNKRWRKLVSKTQLEMNLPLMIKKQDQPTFDNSGNILSKEEKATVEFSTDMSVELPENYNQNIKAGEKHEKENEEFTGQLKVAKDVEKLIGQVEIWEAEAKSVLDQDDVDTSMEESLKHLIAKGSMFDELMARSEDMLQMDIQNISSQESFQHVLTTGLQAKIQEAKEKVQINVVKLIAALKNLTDVSPDLDIRLKMEESQKELESYMMRAQQLLGQRESPGELISKHKEALIISNTKSLAKYLKAVEELKNNVTEDIKMSLEEKSRDVCAKWESLHHELSLYVQQLKIDIEKGKLSDNILKLEKQINKEKKLIRRGRTKGLIKEHEACFSEEGCLYQLNHHMEVLRELCEELPSQKSQQEVKRLLKDYEQKIERLLKCASEIHMTLQPTAGGTSKNEGTITTSENRGGDPHSEAPFAKSDNQPSTEKAMEPTMKFSLASVLRPLQEESIMEKDYSASINSLLERYDTYRDILEHHLQNNKFRITSDFSSEEDRSSSCLQAKLTDLQVIKNETDARWKEFEIISLKLENHVNDIKKPFVIKERDTLKERERELQMTLNTRMESLETALRLVLPVEKASLLLCGSDLPLHKMAIQGFHLIDADRIYQHLRNIQDSIAKQIEICNRLEEPGNFVLKELHPFDLHAMQNIILKYKTQFEGMNHRVQRSEDTLKALEDFLASLRTAKLSAEPVTDLSASDTQVAQENTLTVKNKEGEIHLMKDKAKHLDKCLKMLDMSFKDAERGDDTSCENLLDAFSIKLSETHGYGVQEEFTEENKLLEACIFKNNELLKNIQDVQSQISKIGLKDPTVPAVKHRKKSLIRLDKVLDEYEEEKRHLQEMANSLPHFKDGREKTVNQQCQNTVVLWENTKALVTECLEQCGRVLELLKQYQNFKSILTTLIQKEESVISLQASYMGKENLKKRIAEIEIVKEEFNEHLEVVDKINQVCKNLQFYLNKMKTFEEPPFEKEANIIVDRWLDINEKTEDYYENLGRALALWDKLFNLKNVIDEWTEKALQKMELHQLTEEDRERLKEELQVHEQKTSEFSRRVAEIQFLLQSSEIPLELQVMESSILNKMEHVQKCLTGESNCHALSGSTAELREDLDQAKTQIGMTESLLKALSPSDSLEIFTKLEEIQQQILQQKHSMILLENQIGCLTPELSELKKQYESVSDLFNTKKSVLQDHFSKLLNDQCKNFNDWFSNIKVNLKECFESSETKKSVEQKLQKLSDFLTLEGRNSKIKQVDSVLKHVKKHLPKAHVKELISWLVGQEFELEKMESICQARAKELEDSLQQLLRLQDDHRNLRKWLTNQEEKWKGMEEPGEKTELFCQALARKREQFESVAQLNNSLKEYGFTEEEEIIMEATCLMDRYQTLLRQLSEIEEEDKLLPTEDQSFNDLAHDVIHWIKEIKESLMVLNSSEGKMPLEERIQKIKEIILLKPEGDARIETIMKQAESSEAPLVQKTLTDISNQWDNTLHLASTYLSHQEKLLLEGEKYLQSKEDLRLMLIELKKKQEAGFALQHGLQEKKAQLKIYKKFLKKAQDLTSLLKELKSQGNYLLECTKNPSFSEEPWLEIKHLHESLLQQLQDSVQNLDGHVREHDSYQVCVTDLNTTLDNFSKEFVSFSDKPVDQIAVEEKLQKLQELENRLSLQDGTLKKILALAKSVKQNTSSVGQKIIKDDIKSLQCKQKDLENRLASAKQEMECCLNSILKSKRSTEKKGKFTLPGREKQATSDVQESTQESAAVEKLEEDWEINKDSAVEMAMSKQLSLNAQESMKNTEDERKVNELQNQPLELDTMLRNEQLEEIEKLYTQLEAKKAAIKPLEQTECLNKTETGALVLHNIGYSAQHLDNLLQALITLKKNKESQYCVLRDFQEYLAAVESSMKALLTDKESLKVGPLDSVTYLDKIKKFIASIEKEKDSLGNLKIKWENLSNHVTDMDKKLLESQIKQLEHGWEQVEQQIQKKYSQQVVEYDEFTTLMNKVQDTEISLQQQQQHLQLRLKSPEERAGNQSMIALTTDLQATKHGFSVLKGQAELQMKRIWGEKEKKNLEDGINNLKKQWETLEPLHLEAENQIKKCDIRNKMKETILWAKNLLGELNPSIPLLPDDILSQIRKCKVTHDGILARQQSVESLAEEVKDKVPSLTTYEGSDLNNTLEDLRNQYQMLVLKSTQRSQQLEFKLEERSNFFAIIRKFQLMVQESETLIIPRVETAATEAELKHHHVTLEASQKELQEIDSGISTHLQELTNIYEELNVFERLFLEDQLKNLKIRTNRIQRFIQNTCNEVEHKIKFCRQFHEKTSALQEEADSIQRNELLLNQEVNKGVKEEIYNLKDRLTAIKCCILQVLKLKKVFDYIGLNWDFSQLDQLQTQVFEKEKELEEKIKQLDTFEEEHGKYQALLSKMRAIDLQIKKMTEVVLKAPDSSPESRRLNAQILSQRIEKAKCLCDEIIKKLNENKTFDDSFKEKEILQIKLNAEENDKLYKVLQNMVLELSPKELDEKNCQDKLETSLHVLNQIKSQLQQPLLINLEIKHIQNEKDNCEAFQEQVWAEMCSIKAVTAIEKQREENSSEASDVETKLREFEDLQMQLNTSIDLRTNVLNDAYENLTRYKEAVTRAVESITSLEAIIIPYRVDVGNPEESLEMPLRKQEELESTVAHIQDLTEKLGMISSPEAKLQLQYTLQELVSKNSAMKEAFKAQETEAERYLENYKCYRKMEEDIYTNLSKMETVLGQSMSSLPLSYREALERLEQSKALVSNLISTKEELMKLRQILRLLRLRCTENDGICLLKIVSALWEKWLSLLEAAKEWEMWCEELKQEWKFVSEEIEREAIILDNLQEELPEISKTKEAATTEELSELLDCLCQYGENVEKQQLLLTLLLQRIRSIQNVPESSGAVETVPAFQEITSMKERCNKLLQKVQKNKELVQTEIQERHSFTKEIIALKNFFQQTTTSFQNMAFQDHPEKSEQFEELQSILKKGKLTFENIMEKLRIKYSEMYTIVPAEIESQVEECRKALEDIDEKISNEVLKSSPSYAMRRKIEEINNGLHNVEKMLQQKSKNIEKAQEIQKKMWDELDLWHSKLNELDSEVQDIVEQDPGQAQEWMDNLMIPFQQYQQVSQRAECRTSQLNKATVKMEEYSDLLKSTEAWIENTSHLLANPADYDSLRTLSHHASTVQMALEDSEQKHNLLHSIFMDLEDLSIIFETDELTQSIQELSNQVTALQQKIMESLPQIQRMADDVVAIESEVKSMEKRVSKIKTILLSKEIFDFSPEEHLKHGEVILENIRPMKKTIAEIVSYQVELRLPQTGMKPLPVFQRTNQLLQDIKLLENVTQEQNELLKVVIKQTNEWDEEIENLKQILNNYSAQFSLEHMSPDQADKLPQLQGEIERMEKQILSLNQRKEDLLVDLKATVLNLHQHLKQEQEGVERDRLPAVTSEEGGVAERDASERKLNRRGSMSYLAAVEEEVEESSVKSDNGDEKAEPSPQSWSSLWKHDKDMEEDRASSSSGTIVQEAYGKISTSDNSMAQILTPDSLNTEQGPECSLRPNQTEEGTTPPIEADTLDSSDAQGGLEPRVEKTRPEPTEVLHACKTQVAELELWLQQANVAVEPETLNADMQQVLEQQLVGCQAMLTEIEHKVAFLLETCKDQGLGDNGATQHEAEALSLKLKTVKCNLEKVQMMLQEKHSEDQHPTILKKSSEPEHQEALQPVNLSELESIVTERPQFSRQKDFQQQQVLELKPMEQKDFIKFIEFNAKKMWPQYCQHDNDTTQESSASNQASSPENDVPDSILSPQGQNGDKWQYLHHELSSKIKLPLPQLVEPQVSTNMGILPSVTMYNFRYPTTEELKTYTTQLEDLRQEASNLQTQENMTEEAYINLDKKLFELFLTLSQCLSSVEEMLEMPRLYREDGSGQQVHYETLALELKKLYLALSDKKGDLLKAMTWPGENTNLLLECFDNLQVCLEHTQAAAVCRSKSLKAGLDYNRSYQNEIKRLYHQLIKSKTSLQQSLNEISGQSVAEQLQKADAYTVELENAESRVAKLRDEGERLHLPYALLQEVYKLEDVLDSMWGMLRARYTELSSPFVTESQQDALLQGMVELVKIGKEKLAHGHLKQTKSKVALQAQIENHKVFFQKLVADMLLIQAYSAKILPSLLQNRETFWAEQVTEVKILEEKSRQCGMKLQSLLQKWEEFDENYASLEKDLEILISTLPSVSLVEETEERLVERISFYQQIKRNIGGKHARLYQTLNEGKQLVASVSCPELEGQIAKLEEQWLSLNKKIDHELHRLQALLKHLLSYNRDSDQLTKWLESSQHTLNYWKEQSLNVSQDLDTIRSNINNFFEFSKEVDEKSSLKTAVISIGNQLLHLKETDTATLRASLAQFEQKWTMLITQLPDIQEKLHQLQMEKLPSRKAITEMISWMNNVEHQTSDEDSVHSPSSASQVKHLLQKHKEFRMEMDYKQWIVDFVNQSLLQLSTCDVESKRYERTEFAEHLGEMNRQWHRVHGMLNRKIQHLEQLLESITESENKIQILNNWLEAQEERLKTLQKPESVISVQKLLLDCQDIENQLAIKSKALDELKQSYLTLESGAVPLLEDTASRIDELFQKRSSVLTQVNQLKTSMQSVLQEWKIYDQLYDEVNMMTIRFWYCMEHSKPVVLSLETLRCQVENLQSLQDEAESSEGSWEKLQEVIGKLKGLCPSVAEIIEEKCQNTHKRWTQVNQAIADQLQKAQSLLQLWKAYSNAHGEAAARLKQQEAKFQQLANISMSGNNLAEILPPALQDIKELQHDVQKTKEAFLQNSSVLDRLPQPAESSTHMLLPGPLHSLQRAAYLEKMLLVKANEFEFVLSQFKDFGVRLESLKGLIMHEEENLDRLHQQEKENPDSFLNHVLALTAQSPDIEHLNEVSLKLPLSDVAVKTLQNMNRQWIRATATALERCSELQGIGLNEKFLYCCEKWIQLLEKIEEALKVDVANSLPELLEQQKTYKMLEAEVSINQTIADSYVTQSLQLLDTTEIENRPEFITEFSKLTDRWQNAVQGVRQRKGDVDGLVRQWQDFTTSVENLFRFLTDTSHLLSAVKGQERFSLYQTRSLIHELKNKEIHFQRRRTTCALTLEAGEKLLLTTDLKTKESVGRRISQLQDSWKDMEPQLAEMIKQFQSTVETWDQCEKKIKELKSRLQVLKAQSEDPLPELHEDLHNEKELIKELEQSLASWTQNLKELQTMKADLTRHVLVEDVMVLKEQIEHLHRQWEDLCLRVAIRKQEIEDRLNTWVVFNEKNKELCAWLVQMENKVLQTADISIEEMIEKLQKDCMEEINLFSENKLQLKQMGDQLIKASNKSRAAEIDDKLNKINDRWQHLFDVIGSRVKKLKETFAFIQQLDKNMSNLRTWLARIESELSKPVVYDVCDDQEIQKRLAEQQDLQRDIEQHSAGVESVFNICDVLLHDSDACANETECDSIQQTTRSLDRRWRNICAMSMERRMKIEETWRLWQKFLDDYSRFEDWLKSAERTAACPNSSEVLYTSAKEELKRFEAFQRQIHERLTQLELINKQYRRLARENRTDTASRLKQMVHEGNQRWDNLQRRVTAVLRRLRHFTNQREEFEGTRESILVWLTEMDLQLTNVEHFSESDADDKMRQLNGFQQEITLNTNKIDQLIVFGEQLIQKSEPLDAVLIEDELEELHRYCQEVFGRVSRFHRRLTSCTPGLEDEKEASENETDMEDPREIQTDSWRKRGESEEPSSPQSLCHLVAPGHERSGCETPVSVDSIPLEWDHTGDVGGSSSHEEDEEGPYYSALSGKSISDGHSWHVPDSPSCPEHHYKQMEGDRNVPPVPPASSTPYKPPYGKLLLPPGTDGGKEGPRVLNGNPQQEDGGLAGITEQQSGAFDRWEMIQAQELHNKLKIKQNLQQLNSDISAITTWLKKTEAELEMLKMAKPPSDIQEIELRVKRLQEILKAFDTYKALVVSVNVSSKEFLQTESPESTELQSRLRQLSLLWEAAQGAVDSWRGGLRQSLMQCQDFHQLSQNLLLWLASAKNRRQKAHVTDPKADPRALLECRRELMQLEKELVERQPQVDMLQEISNSLLIKGHGEDCIEAEEKVHVIEKKLKQLREQVSQDLMALQGTQNPASPLPSFDEVDSGDQPPATSVPAPRAKQFRAVRTTEGEEETESRVPGSTRPQRSFLSRVVRAALPLQLLLLLLLLLACLLPSSEEDYSCTQANNFARSFYPMLRYTNGPPPT

SEQ ID NO: 6430 - protein, 466 aa, Homo sapiens
MAFVLILVLSFYELVSGQWQVTGPGKFVQALVGEDAVFSCSLFPETSAEAMEVRFFRNQFHAVVHLYRDGEDWESKQMPQYRGRTEFVKDSIAGGRVSLRLKNITPSDIGLYGCWFSSQIYDEEATWELRVAALGSLPLISIVGYVDGGIQLLCLSSGWFPQPTAKWKGPQGQDLSSDSRANADGYSLYDVEISIIVQENAGSILCSIHLAEQSHEVESKVLIGETFFQPSPWRLASILLGLLCGALCGVVMGMIIVFFKSKGKIQAELDWRRKHGQAELRDARKHAVEVTLDPETAHPKLCVSDLKTVTHRKAPQEVPHSEKRFTRKSVVASQGFQAGKHYWEVDVGQNVGWYVGVCRDDVDRGKNNVTLSPNNGYWVLRLTTEHLYFTFNPHFISLPPSTPPTRVGVFLDYEGGTISFFNTNDQSLIYTLLTCQFEGLLRPYIQHAMYDEEKGTPIFICPVSWG

SEQ ID NO: 6431 - protein, 152 aa, Homo sapiens
MCSLPMARYYIIKYADQKALYTRDGQLLVGDPVADNCCAEKICILPNRGLARTKVPIFLGIQGGSRCLACVETEEGPSLQLEDVNIEELYKGGEEATRFTFFQSSSGSAFRLEAAAWPGWFLCGPAEPQQPVQLTKESEPSARTKFYFEQSW

SEQ ID NO: 6432 - protein, 594 aa, Homo sapiens
MTDKSIVILSLMVFHSSFINGKTCRRQLVEEWHPQPSSYVVNWTLTENICLDFYRDCWFLGVNTKIDTSGNQAVPQICPLQIQLGDILVISSEPSLQFPEINLMNVSETSFVGCVQNTTTEDQLLFGCRLKGMHTVNSKWLSVGTHYFITVMASGPSPCPLGLRLNVTVKQQFCQESLSSEFCSGHGKCLSEAWSKTYSCHCQPPFSGKYCQELDACSFKPCKNNGSCINKRENWDEQAYECVCHPPFTGKNCSEIIGQCQPHVCFHGNCSNITSNSFICECDEQFSGPFCEVSAKPCVSLLFWKRGICPNSSSAYTYECPKGSSSQNGETDVSEFSLVPCQNGTDCIKISNDVMCICSPIFTDLLCKSIQTSCESFPLRNNATCKKCEKDYPCSCISGFTEKNCEKAIDHCKLLSINCLNEEWCFNIIGRFKYVCIPGCTKNPCWFLKNVYLIHQHLCYCGVTFHGICQDKGPAQFEYVWQLGFAGSEGEKCQGVIDAYFFLAANCTEDATYVNDPEDNNSSCWFPHEGTKEICANGCSCLSEEDSQEYRYLCFLRWAGNMYLENTTDDQENECQHEAVCKDEINRPRYLCII

SEQ ID NO: 6433 - protein, 325 aa, Homo sapiens
MPSSTAMAVGALSSSLLVTCCLMVALCSPSIPLEKLAQAPEQPGQEKREHASRDGPGRVNELGRPARDEGGSGRDWKSKSGRGLAGREPWSKLKQAWVSQGGGAKAGDLQVRPRGDTPQAEALAAAAQDAIGPELAPTPEPPEEYVYPDYRGKGCVDESGFVYAIGEKFAPGPSACPCLCTEEGPLCAQPECPRLHPRCIHVDTSQCCPQCKERKNYCEFRGKTYQTLEEFVVSPCERCRCEANGEVLCTVSACPQTECVDPVYEPDQCCPICKNGPNCFAETAVIPAGREVKTDECTICHCTYEEGTWRIERQAMCTRHECRQM

SEQ ID NO: 6434 - protein, 353 aa, Homo sapiens
METNFSIPLNETEEVLPEPAGHTVLWIFSLLVHGVTFVFGVLGNGLVIWVAGFRMTRTVNTICYLNLALADFSFSAILPFRMVSVAMREKWPFGSFLCKLVHVMIDINLFVSVYLITIIALDRCICVLHPAWAQNHRTMSLAKRVMTGLWIFTIVLTLPNFIFWTTISTTNGDTYCIFNFAFWGDTAVERLNVFITMAKVFLILHFIIGFSVPMSIITVCYGIIAAKIHRNHMIKSSRPLRVFAAVVASFFICWFPYELIGILMAVWLKEMLLNGKYKIILVLINPTSSLAFFNSCLNPILYVFMGRNFQERLIRSLPTSLERALTEVPDSAQTSNTDTTSASPPEETELQAM

SEQ ID NO: 6435 - protein, 372 aa, Homo sapiens
MSKSESPKEPEQLRKLFIGGLSFETTDESLRSHFEQWGTLTDCVVMRDPNTKRSRGFGFVTYATVEEVDAAMNARPHKVDGRVVEPKRAVSREDSQRPGAHLTVKKIFVGGIKEDTEEHHLRDYFEQYGKIEVIEIMTDRGSGKKRGFAFVTFDDHDSVDKIVIQKYHTVNGHNCEVRKALSKQEMASASSSQRGRSGSGNFGGGRGGGFGGNDNFGRGGNFSGRGGFGGSRGGGGYGGSGDGYNGFGNDGGYGGGGPGYSGGSRGYGSGGQGYGNQGSGYGGSGSYDSYNNGGGGGFGGGSGSNFGGGGSYNDFGNYNNQSSNFGPMKGGNFGGRSSGPYGGGGQYFAKPRNQGGYGGSSSSSSYGSGRRF

SEQ ID NO: 6436 - protein, 476 aa, Homo sapiens [sequence omitted]

SEQ ID NO: 6437 - protein, 938 aa, Homo sapiens
MTLLGSEHSLLIRSKFRSVLQLRLQQRRTQEQLANQGIIPPLKRPAEFHEQRKHLDSDKAKNSLKRKARNRCNSADLVNMHILQASTAERSIPTAQMKLKRARLADDLNEKIALRPGPLELVEKNILPVDSAVKEAIKGNQVSFSKSTDAFAFEEDSSSDGLSPDQTRSEDPQNSAGSPPDAKASDTPSTGSLGTNQDLASGSENDRNDSASQPSHQSDAGKQGLGPPSTPIAVHAAVKSKSLGDSKNRHKKPKDPKPKVKKLKYHQYIPPDQKAEKSPPPMDSAYARLLQQQQLFLQLQILSQQQQQQQHRFSYLGMHQAQLKEPNEQMVRNPNSSSTPLSNTPLSPVKNSFSGQTGVSSFKPGPLPPNLDDLKVSELRQQLRIRGLPVSGTKTALMDRLRPFQDCSGNPVPNFGDITTVTFPVTPNTLPNYQSSSSTSALSNGFYHFGSTSSSPPISPASSDLSVAGSLPDTFNDASPSFGLHPSPVHVCTEESLMSSLNGGSVPSELDGLDSEKDKMLVEKQKVINELTWKLQQEQRQVEELRMQLQKQKRNNCSEKKPLPFLAASIKQEEAVSSCPFASQVPVKRQSSSSECHPPACEAAQLQPLGNAHCVESSDQTNVLSSTFLSPQCSPQHSPLGAVKSPQHISLPPSPNNPHFLPSSSGAQGEGHRVSSPISSQVCTAQMAGLHSSDKVGPKFSIPSPTFSKSSSAISEVTQPPSYEDAVKQQMTRSQQMDELLDVLIESGEMPADAREDHSCLQKVPKIPRSSRSPTAVLTKPSASFEQASSGSQIPFDPYATDSDEHLEVLLNSQSPLGKMSDVTLLKIGSEEPHFDGIMDGFSGKAAEDLFNAHEILPGPLSPMQTQFSPSSVDSNGLQLSFTESPWETMEWLDLTPPNSTPGFSALTTSSPSIFNIDFLDVTDLNLNSSMDLHLQQW

SEQ ID NO: 6438 - protein, 1069 aa, Homo sapiens
MGKLIRMGPQERWLLRTKRLHWSRLLFLLGMLIIGSTYQHLRRPRGLSSLWAAVSSHQPIKLASRDLSSEEMMMMSSSPSKPSSEMGGKMLVPQASVGSDEATLSMTVENIPSMPKRTAKMIPTTTKNNYSPTAAGTERRKEDTPTSSRTLTYYTSTSSRQIVKKYTPTPRGEMKSYSPTQVREKVKYTPSPRGRRVGTYVPSTFMTMETSHAITPRTTVKDSDITATYKILETNSLKRIMEETTPTTLKGMFDSTPTFLTHEVEANVLTSPRSVMEKNNLFPPRRVESNSSAHPWGLVGKSNPKTPQGTVLLHTPATSEGQVTISTMTGSSPAETKAFTAAWSLRNPSPRTSVSAIKTAPAIVWRLAKKPSTAPSTSTTPTVRAKLTMQVHHCVVVKPTPAMLTTPSPSLTTALLPEELSPSPSVLPPSLPDLHPKGEYPPDLFSVEERRQGWVVLHVFGMMYVFVALAIVCDEYFVPALGVITDKLQISEDVAGATFMAAGGSAPELFTSLIGVFISHSNVGIGTIVGSAVFNILFVIGTCSLFSREILNLTWWPLFRDVSFYILDLIMLILFFLDSLIAWWESLLLLLAYAFYVFTMKWNKHIEVWVKEQLSRRPVAKVMALEDLSKPGDGAIAVDELQDNKKLKLPSLLTRGSSSTSLHNSTIRSTIYQLMLHSLDPLREVRLAKEKEEESLNQGARAQPQAKAESKPEEEEPAKLPAVTVTPAPVPDIKGDQKENPGGQEDVAEAESTGEMPGEEGETAGEGETEEKSGGETQPEGEGETETQGKGEECEDENEAEGKGDNEGEDEGEIHAEDGEMKGNEGETESQELSAENHGEAKNDEKGVEDGGGSDGGDSEEEEEEEEEQEEEEEEEEQEEEEEEEEEEEEKGNEEPLSLDWPETRQKQAIYLFLLPIVFPLWLTVPDVRRQVGETIGISEEIMGLTILAAGTSIPDLITSVIVARKGLGDMAVSSSVGSNIFDITVGLPVPWLLFSLINGLQPVPVSSNGLFCAIVLLFLMLLFVISSIASCKWRMNKILGFTMFLLYFVFLIISVMLEDRIISCPVSV

SEQ ID NO: 6439 - protein, 341 aa, Homo sapiens
MQEGELAISPISPVAAMPPLGTHVQARCEAQINLLGEGGICKLPGRLRIQPALWSREDVLHWLRWAEQEYSLPCTAEHGFEMNGRALCILTKDDFRHRAPSSGDVLYELLQYIKTQRRALVCGPFFGGIFRLKTPTQHSPVPPEEVTGPSQMDTRRGHLLQPPDPGLTSNFGHLDDPGLARWTPGKEESLNLCHCAELGCRTQGVCSFPAMPQAPIDGRIADCRLLWDYVYQLLLDTRYEPYIKWEDKDAKIFRVVDPNGLARLWGNHKNRVNMTYEKMSRALRHYYKLNIIKKEPGQKLLFRFLKTPGKMVQDKHSHLEPLESQEQDRIEFKDKRPEISP

SEQ ID NO: 6440 - protein, 1031 aa, Homo sapiens
MKVTVCFGRTRVVVPCGDGHMKVFSLIQQAVTRYRKAIAKDPNYWIQVHRLEHGDGGILDLDDILCDVADDKDRLVAVFDEQDPHHGGDGTSASSTGTQSPEIFGSELGTNNVSAFQPYQATSEIEVTPSVLRANMPLHVRRSSDPALIGLSTSVSDSNFSSEEPSRKNPTRWSTTAGFLKQNTAGSPKTCDRKKDENYRSLPRDTSNWSNQFQRDNARSSLSASHPMVGKWLEKQEQDEDGTEEDNSRVEPVGHADTGLEHIPNFSLDDMVKLVEVPNDGGPLGIHVVPFSARGGRTLGLLVKRLEKGGKAEHENLFRENDCIVRINDGDLRNRRFEQAQHMFRQAMRTPIIWFHVVPAANKEQYEQLSQSEKNNYYSSRFSPDSQYIDNRSVNSAGLHTVQRAPRLNHPPEQIDSHSRLPHSAHPSGKPPSAPASAPQNVFSTTVSSGYNTKKIGKRLNIQLKKGTEGLGFSITSRDVTIGGSAPIYVKNILPRGAAIQDGRLKAGDRLIEVNGVDLVGKSQEEVVSLLRSTKMEGTVSLLVFRQEDAFHPRELNAEPSQMQIPKETKAEDEDIVLTPDGTREFLTFEVPLNDSGSAGLGVSVKGNRSKENHADLGIFVKSIINGGAASKDGRLRVNDQLIAVNGESLLGKTNQDAMETLRRSMSTEGNKRGMIQLIVARRISKCNELKSPGSPPGPELPIETALDDRERRISHSLYSGIEGLDESPSRNAALSRIMGKYQLSPTVNMPQDDTVIIEDDRLPVLPPHLSDQSSSSSHDDVGFVTADAGTWAKAAISDSADCSLSPDVDPVLAFQREGFGRQSMSEKRTKQFSDASQLDFVKTRKSKSMDLGIADETKLNTVDDQKAGSPSRDVGPSLGLKKSSSLESLQTAVAEVTLNGDIPFHRPRPRIIRGRGCNESFRAAIDKSYDKPAVDDDDEGMETLEEDTEESSRSGRESVSTASDQPSHSLERQMNGNQEKGDKTDRKKDKTGKEKKKDRDKEKDKMKAKKGMLKGLGDMFSLAKLKPEKR

SEQ ID NO: 6441 - protein, 3259 aa, Homo sapiens
MLSRLSGLANVVLHELSGDDDTDQNMRAPLDPELHQESDMEFNNTTQEDVQERLAYAEQLVVELKDIIRQKDVQLQQKDEALQEERKAADNKIKKLKLHAKAKLTSLNKYIEEMKAQGGTVLPTEPQSEEQLSKHDKSSTEEEMEIEKIKHKLQEKEELISTLQAQLTQAQAEQPAQSSTEMEEFVMMKQQLQEKEEFISTLQAQLSQTQAEQAAQQVVREKDARFETQVRLHEDELLQLVTQADVETEMQQKLRVLQRKLEEHEESLVGRAQVVDLLQQELTAAEQRNQILSQQLQQMEAEHNTLRNTVETEREESKILLEKMELEVAERKLSFHNLQEEMHHLLEQFEQAGQAQAELESRYSALEQKHKAEMEEKTSHILSLQKTGQELQSACDALKDQNSKLLQDKNEQAVQSAQTIQQLEDQLQQKSKEISQFLNRLPLQQHETASQTSFPDVYNEGTQAVTEENIASLQKRVVELENEKGALLLSSIELEELKAENEKLSSQITLLEAQNRTGEADREVSEISIVDIANKRSSSAEESGQDVLENTFSQKHKELSVLLLEMKEAQEEIAFLKLQLQGKRAEEADHEVLDQKEMKQMEGEGIAPIKMKVFLEDTGQDFPLMPNEESSLPAVEKEQASTEHQSRTSEEISLNDAGVELKSTKQDGDKSLSAVPDIGQCHQDELERLKSQILELELNFHKAQEIYEKNLDEKAKEISNLNQLIEEFKKNADNNSSAFTALSEERDQLLSQVKELSMVTELRAQVKQLEMNLAEAERQRRLDYESQTAHDNLLTEQIHSLSIEAKSKDVKIEVLQNELDDVQLQFSEQSTLIRSLQSQLQNKESEVLEGAERVRHISSKVEELSQALSQKELEITKMDQLLLEKKRDVETLQQTIEEKDQQVTEISFSMTEKMVQLNEEKFSLGVEIKTLKEQLNLLSRAEEAKKEQVEEDNEVSSGLKQNYDEMSPAGQISKEELQHEFDLLKKENEQRKRKLQAALINRKELLQRVSRLEEELANLKDESKKEIPLSETERGEVEEDKENKEYSEKCVTSKCQEIEIYLKQTISEKEVELQHIRKDLEEKLAAEEQFQALVKQMNQTLQDKTNQIDLLQAEISENQAIIQKLITSNTDASDGDSVALVKETVVISPPCTGSSEHWKPELEEKILALEKEKEQLQKKLQEALTSRKAILKKAQEKERHLREELKQQKDDYNRLQEQFDEQSKENENIGDQLRQLQIQVRESIDGKLPSTDQQESCSSTPGLEEPLFKATEQHHTQPVLESNLCPDWPSHSEDASALQGGTSVAQIKAQLKEIEAEKVELELKVSSTTSELTKKSEEVFQLQEQINKQGLEIESLKTVSHEAEVHAESLQQKLESSQLQIAGLEHLRELQPKLDELQKLISKKEEDVSYLSGQLSEKEAALTKIQTEIIEQEDLIKALHTQLEMQAKEHDERIKQLQVELCEMKQKPEEIGEESRAKQQIQRKLQAALISRKEALKENKSLQEELSLARGTIERLTKSLADVESQVSAQNKEKDTVLGRLALLQEERDKLITEMDRSLLENQSLSSSCESLKLALEGLTEDKEKLVKEIESLKSSKIAESTEWQEKHKELQKEYEILLQSYENVSNEAERIQHVVEAVRQEKQELYGKLRSTEANKKETEKQLQEAEQEMEEMKEKMRKFAKSKQQKILELEEENDRLRAEVHPAGDTAKECMETLLSSNASMKEELERVKMEYETLSKKFQSLMSEKDSLSEEVQDLKHQIEGNVSKQANLEATEKHDNQTNVTEEGTQSIPGETEEQDSLSMSTRPTCSESVPSAKSANPAVSKDFSSHDEINNYLQQIDQLKERIAGLEEEKQKNKEFSQTLENEKNTLLSQISTKDGELKMLQEEVTKMNLLNQQIQEELSRVTKLKETAEEEKDDLEERLMNQLAELNGSIGNYCQDVTDAQIKNELLESEMKNLKKCVSELEEEKQQLVKEKTKVESEIRKEYLEKIQGAQKEPGNKSHAKELQELLKEKQQEVKQLQKDCIRYQEKISALERTVKALEFVQTESQKDLEITKENLAQAVEHRKKAQAELASFKVLLDDTQSEAARVLADNLKLKKELQSNKESVKSQMKQKDEDLERRLEQAEEKHLKEKKNMQEKLDALRREKVHLEETIGEIQVTLNKKDKEVQQLQENLDSTVTQLAAFTKSMSSLQDDRDRVIDEAKKWERKFSDAIQSKEEEIRLKEDNCSVLKDQLRQMSIHMEELKINISRLEHDKQIWESKAQTEVQLQQKVCDTLQGENKELLSQLEETRHLYHSSQNELAKLESELKSLKDQLTDLSNSLEKCKEQKGNLEGIIRQQEADIQNSKFSYEQLETDLQASRELTSRLHEEINMKEQKIISLLSGKEEAIQVAIAELRQQHDKEIKELENLLSQEEEENIVLEEENKKAVDKTNQLMETLKTIKKENIQQKAQLDSFVKSMSSLQNDRDRIVGDYQQLEERHLSIILEKDQLIQEAAAENNKLKEEIRGLRSHMDDLNSENAKLDAELIQYREDLNQVITIKDSQQKQLLEVQLQQNKELENKYAKLEEKLKESEEANEDLRRSFNALQEEKQDLSKEIESLKVSISQLTRQVTALQEEGTLGLYHAQLKVKEEEVHRLSALFSSSQKRIAELEEELVCVQKEAAKKVGEIEDKLKKELKHLHHDAGIMRNETETAEERVAELARDLVEMEQKLLMVTKENKGLTAQIQSFGRSMSSLQNSRDHANEELDELKRKYDASLKELAQLKEQGLLNRERDALLSETAFSMNSTEENSLSHLEKLNQQLLSKDEQLLHLSSQLEDSYNQVQSFSKAMASLQNERDHLWNELEKFRKSEEGKQRSAAQPSTSPAEVQSLKKAMSSLQNDRDRLLKELKNLQQQYLQINQEITELHPLKAQLQEYQDKTKAFQIMQEELRQENLSWQHELHQLRMEKSSWEIHERRMKEQYLMAISDKDQQLSHLQNLIRELRSSSSQTQPLKVQYQRQASPETSASPDGSQNLVYETELLRTQLNDSLKEIHQKELRIQQLNSNFSQLLEEKNTLSIQLCDTSQSLRENQQHYGDLLNHCAVLEKQVQELQAGPLNIDVAPGAPQEKNGVHRKSDPEELREPQQSFSEAQQQLCNTRQEVNELRKLLEEERDQRVAAENALSVAEEQIRRLEHSEWDSSRTPIIGSCGTQEQALLIDLTSNSCRRTRSGVGWKRVLRSLCHSRTRVPLLAAIYFLMIHVLLILCFTGHL

SEQ ID NO: 6442 - protein, 519 aa, Homo sapiens
MDLVGVASPEPGTAAAWGPSKCPWAIPQNTISCSLADVMSEQLAKELQLEEEAAVFPEVAVAEGPFITGENIDTSSDLMLAQMLQMEYDREYDAQLRREEKKFNGDSKVSISFENYRKVHPYEDSDSSEDEVDWQDTRDDPYRPAKPVPTPKKGFIGKGKDITTKHDEVVCGRKNTARMENFAPEFQVGDGIGMDLKLSNHVFNALKQHAYSEERRSARLHEKKEHSTAEKAVDPKTRLLMYKMVNSGMLETITGCISTGKESVVFHAYGGSMEDEKEDSKVIPTECAIKVFKTTLNEFKNRDKYIKDDFRFKDRFSKLNPRKIIRMWAEKEMHNLARMQRAGIPCPTVVLLKKHILVMSFIGHDQVPAPKLKEVKLNSEEMKEAYYQTLHLMRQLYHECTLVHADLSEYNMLWHAGKVWLIDVSQSVEPTHPHGLEFLFRDCRNVSQFFQKGGVKEALSERELFNAVSGLNITADNEADFLAEIEALEKMNEDHVQKNGRKAASFLKDDGDPPLLYDE

SEQ ID NO: 6443 - protein, 1028 aa, Homo sapiens
MRLLWKLVILLPLINSSAGDGLLSRPIFTQEPHDVIFPLDLSKSEVILNCAANGYPSPHYRWKQNGTDIDFTMSYHYRLDGGSLAINSPHTDQDIGMYQCLATNLLGTILSRKAKLQFAYIEDFETKTRSTVSVREGQGVVLLCGPPPHFGDLSYAWTFNDNPLYVQEDNRRFVSQETGNLYIAKVEPSDVGNYTCFITNKEAQRSVQGPPTPLVQRTDGVMGEYEPKIEVRFPETIQAAKDSSVKLECFALGNPVPDISWRRLDGSPLPGKVKYSKSQAILEIPNFQQEDEGFYECIASNLRGRNLAKGQLIFYAPPEWEQKIQNTHLSIYDNLLWECKASGKPNPWYTWLKNGERLNPEERIQIENGTLIITMLNVSDSGVYQCAAENKYQIIYANAELRVLASAPDFSKSPVKKKSFVQVGGDIVIGCKPNAFPRAAISWKRGTETLRQSKRIFLLEDGSLKIYNITRSDAGSYTCIATNQFGTAKNTGSLIVKERTVITVPPSKMDVTVGESIVLPCQVSHDPSIEVVFVWFFNGDVIDLKKGVAHFERIGGESVGDLMIRNIQLHHSGKYLCTVQTTLESLSAVADIIVRGPPGPPEDVQVEDISSTTSQLSWRAGPDNNSPIQIFTIQTRTPFSVGWQAVATVPEILNGKTYNATVVGLSPWVEYEFRVVAGNSIGIGEPSEPSELLRTKASVPVVAPVNIHGGGGSRSELVITWESIPEELQNGEGFGYIIMFRPVGSTTWSKEKVSSVESSRFVYRNESIIPLSPFEVKVGVYNNEGEGSLSTVTIVYSGEDEPQLAPRGTSLQSFSASEMEVSWNAIAWNRNTGRVLGYEVLYWTDDSKESMIGKIRVSGNVTTKNITGLKANTIYFASVRAYNTAGTGPSSPPVNVTTKKSPPSQPPANIAWKLTNSKLCLNWEHVKTMENESEVLGYKILYRQNRQSKTHILETNNTSAELLVPFEEDYLIEIRTVSDGGDGSSSEEIRIPKMSSLSSRGIQFLEPSTHFLSIVIVIFHCFAIQPLI

SEQ ID NO: 6444 - protein, 8392 aa, Homo sapiens
MQRLQDEQEIVQKRTFTKWINSHLAKRKPPMVVDDLFEDMKDGVKLLALLEVLSGQKLPCEQGRRMKRIHAVANIGTALKFLEGRKIKLVNINSTDIADGRPSIVLGLMWTIILYFQIEELTSNLPQLQSLSSSASSVDSIVSSETPSPPSKRKVTTKIQGNAKKALLKWVQYTAGKQTGIEVKDFGKSWRSGVAFHSVIHAIRPELVDLETVKGRSNRENLEDAFTIAETELGIPRLLDPEDVDVDKPDEKSIMTYVAQFLKHYPDIHNASTDGQEDDEILPGFPSFANSVQNFKREDRVIFKEMKVWIEQFERDLTRAQMVESNLQDKYQSFKHFRVQYEMKRKQIEHLIQPLHRDGKLSLDQALVKQSWDRVTSRLFDWHIQLDKSLPAPLGTIGAWLYRAEVALREEITVQQVHEETANTIQRKLEQHKRKCQTIMDLLQNTDAHKRAFHEIYRTRSVNGIPVPPDQLEDMAERFHFVSSTSELHLMKMEFLELKYRLLSLLVLAESKLKSWIIKYGRRESVEQLLQNYVSFIENSKFFEQYEVTYQILKQTAEMYVKADGSVEEAENVMKFMNETTAQWRNLSVEVRSVRSMLEEVISNWDRYGNTVASLQAWLEDAEKMLNQSENAKKDFFRNLPHWIQQHTAMNDAGNFLIETCDEMVSRDLKQQLLLLNGRWRELFMEVKQYAQADEMDRMKKEYTDCVVTLSAFATEAHKKLSEPLEVSFMNVKLLIQDLEDIEQRVPVMDAQYKIITKTAHLITKESPQEEGKEMFATMSKLKEQLTKVKECYSPLLYESQQLLIPLEELEKQMTSFYDSLGKINEIITVLEREAQSSALFKQKHQLRILKCKWCNSSQKMTLCLVLGSMISMLSTAKITIAGYKSEVEVSELLACQENCKKTLTLIEKGSQSVQKFVTLSNVLKHFDQTRLQTDCRYSCCFSVMRKQHHIMIVFHIKSMVKKTGDWKKHVETNSRLMKKFEESRAELEKVLRIAQEGLEEKGDPEELLRRHTEFFSQLDQRVLNAFLKACDELTDILPEQEQQGLQEAVRKLHKQWKDLQGEAPYHLLHLKIDVEKNRFLASVEECRTELDRETKLMPQEGSEKIIKEHRVFFSDKGPHHLCEKRLQLIEELCVKLPVRDPVRDTPGTCHVTLKELRAAIDSTYRKLMEDPDKWKDYTSRFSEFSSWISTNETQLKGIKGEAIDTANHGEVKRAVEEIRNGVTKRGETLSWLKSRLKVLTEVSSENEAQKQGDELAKLSSSFKALVTLLSEVEKMLSNFGDCVQYKEIVKNSLEELISGSKEVQEQAEKILDTENLFEAQQLLLHHQQKTKRISAKKRDVQQQIAQAQQGEGGLPDRGHEELRKLESTLDGLERSRERQERRIQVTLRKWERFETNKETVVRYLFQTGSSHERFLSFSSLESLSSELEQTKEFSKRTESIAVQAENLVKEASEIPLGPQNKQLLQQQAKSIKEQVKKLEDTLEEEYVIDNKTMEMVKTKWDHFGSNFETLSVWITEKEKELNALETSSSAMDMQISQIKVTIQEIESKLSSIVGLEEEAQSFAQFVTTGESARIKAKLTQIRRYGEELREHAQCLEGTILGHLSQQQKFEENLRKIQQSVSEFEDKLAVPIKICSSATETYKVLQEHMDLCQALESLSSAITAFSASARKVVNRDSCVQEAAALQQQYEDILRRAKERQTALENLLAHWQRLEKELSSFLTWLERGEAKASSPEMDISADRVKVEASKDDVKMMKLHLEQLDERWRDLPQIINKRINFLQSVVAEHQQFDELLLSFSVWIKLFLSELQTTSEISIMDHQVALTRHKDHAAEVESKKGELQSLQGHLAKLGSLGRAEDLHLLQGKAEDCFQLFEEASQVVERRQLALSHLAEFLQSHASLSGILRQLRQTVEATNSMNKNESDLIEKDLNDALQNAKALESAAVSLDGILSKAQYHLKIGSSEQRTSCRATADQLCGEVERIQNLLGTKQSEADALAVLKKAFQDQKEELLKSIEDIEERTDKERLKEPTRQALQQRLRVFNQLEDELNSHEHELCWLKDKAKQIAQKDVAFAPEVDREINRLEVTWDDTKRLIHENQGQCCGLIDLMREYQNLKSAVSKVLENASSVIVTRTTIKDQEDLKWAFSKHETAKNKMNYKQKDLDNFTSKGKHLLSELKKIHSSDFSLVKTDMESTVDKWLDVSEKLEENMDRLRVSLSIWDDVLSTRDEIEGWSNNCVPQMAENISNLDNHLRAEELLKEFESEVKNKALRLEELHSKVNDLKELTKNLETPPDLQFIEADLMQKLEHAKEITEVAKGTLKDFTAQSTQVEKFINDITTWFTKVEESLMNCAQNETCEALKKVKDIQKELQSQQSNISSTQENLNSLCRKYHSAELESLGRAMTGLIKKHEAVSQLCSKTQASLQESLEKHFSEESMQEFQEWFLGAKAAAKESSDRTGDSKVLEAKLHDLQQNILDSVSDGQSKLDAVTQEGQTLYAHLSKQIVSSIQEQITKANEEFQAFLKQCLKDKQALQDCASELGSFEDQHRKLNLWIHEMEERFNTENLGESKQHIPEKKNEVHKVEMFLGELLAARESLDKLSQRGQLLSEEGHGAGQEGRLCSQLLTSHQNLLRMTKEKLRSCQVALQEHEALEEALQSMWFWVKAIQDRLACAESTLGSKDTLEKRLSQIQDILLMKGEGEVKLNMAIGKGEQALRSSNKEGQRVIQTQLETLKEVWADIMSSSVHAQSTLESVISQWNDYVERKNQLEQWMESVDQKIEHPLQPQPGLKEKFVLLDHLQSILSEAEDHTRALHRLIAKSRELYEKTEDESFKDTAQEELKTQFNDIMTVAKEKMRKVEEIVKDHLMYLDAVHEFTDWLHSAKEELHRWSDMSGDSSATQKKLSKIKELIDSREIGASRLSRVESLAPEVKQNTTASGCELMHTEMQALRADWKQWEDSVFQTQSCLENLVSQMALSEQEFSGQVAQLEQALEQFSALLKTWAQQLTLLEGKNTDEEIVECWHKGQEILDALQKAEPRTEDLKSQLNELCRFSRDLSTYSGKVSGLIKEYNCLCLQASKGCQNKEQILQQRFRKAFRDFQQWLVNAKITTAKCFDIPQNISEVSTSLQKIQEFLSESENGQHKLNMMLSKGELLSTLLTKEKAKGIQAKVTAAKEDWKNFHSNLHQKESALENLKIQMKDFEVSAEPIQDWLSKTEKMVHESSNRLYDLPAKRREQQKLQSVLEEIHCYEPQLNRLKEKAQQLWEGQAASKSFRHRVSQLSSQYLALSNLTKEKVSRLDRIVAEHNQFSLGIKELQDWMTDAIHMLDSYCHPTSDKSVLDSRTLKLEALLSVKQEKEIQMKMIVTRGESVLQNTSPEGIPTIQQQLQSVKDMWASLLSAGIRCKRVRLPCAYIALKLRVHQHAELRDKTTMLGKAKEAVTKSEKLVRLHQEYQRDLKAFEVWLGQEQEKLDQYSVLEGDAHTHETTLRDLQELQVHCAEGQALLNSVLHTREDVIPSGIPQAEDRALESLRQDWQAYQHRLSETRTQFNNVVNKLRLMEQKFQQVDEWLKTAEEKVSPRTRRQSNRATKEIQLHQMKKWHEEVTAYRDEVEEVGARAQEILDESHVNSRMGCQATQLTSRYQALLLQVLEQIKFLEEEIQSLEESESSLSSYSDWYGSTHKNFKNVATKIDKVDTVMMGKKLKTLEVLLKDMEKGHSLLKSAREKGERAVKYLEEGEAERLRKEIHDHMEQLKELTSTVRKEHMTLEKSLQQTVLSHEPSVKSVREKGEALLELVQDVTLKDKIDQLQSDYQDLCSIGKEHVFSLEAKVKDHEDYNSELQEVEKWLLQMSGRLVAPDLLETSSLETITQQLAHHKMYQSLEHELQKHVSRQDTLQQCQAWLSAVQPDLEPSPQPPLSRAEAIKQVKHFRALQEQARTYLDLLCSMCDLSNASVKTTAKDIQQTEQTIEQKLVQAQNLTQGWEEIKHLKSELWIYLQDADQQLQNMKRRHSELELNIAQNMVSQVKDFVKKLQSKQASVNTIIEKVNKLTKKEESPEHKEINHLNDQWLDLCRQSNNLCLQREEDLQRTRDYHDCMNVVEVFLEKFTTEWDNLARSDAESTAVHLEALKKLALALQERKYAIEDLKDQKQKMIEHLNLDDKELVKEQTSHLEQRWFQLEDLIKRKIQVSVTNLEELNVVQSRFQELMEWAEEQQPNIAEALKQSPPPDMAQNLLMDHLAICSELEAKQMLLKSLIKDADRVMADLGLNERQVIQKALSDAQSHVNCLSDLVGQRRKKHFKEDFDKACHWLKQADIVTFPEINLMNESSELHTQLAKYQNILEQSPEYENLLLTLQRTGQTILPSLNEVDHSYLSEKLNALPRQFNVIVALAKDKFYKVQEAILARKEYASLIELTTQSLSELEAQFLRMSKVPTDLAVEEALSLQDGCRAILDEVAGLGEAVDELNQKKEGFRSTGQPWQPDKMLHLVTLYHRLKRQTEQRVSLLEDTTSAYQEHEKMCQQLERQLKSVKEEQSKVNEETLPAEEKLKMYHSLAGSLQDSGIVLKRVTIHLEDLAPHLDPLAYEKARHQIQSWQGELKLLTSAIGETVTECESRMVQSIDFQTEMSRSLDWLRRVKAELSGPVYLDLNLQDIQEEIRKIQIHQEEVQSSLRIMNALSHKEKEKFTKAKELISADLEHSLAELSELDGDIQEALRTRQATLTEIYSQCQRYYQVFQAANDWLEDAQELLQLAGNGLDVESAEENLKSHMEFFSTEDQFHSNLEELHSLVATLDPLIKPTGKEDLEQKVASLELRSQRMSRDSGAQALVSVVNSFHEKIVALEEKASQLEKTGNDASKATLSRSMTTVWQRWTRLRAVAQDQEKILEDAVDEWTGFNNKVKKATEMIDQLQDKLPGSSAEKASKAELLTLLEYHDTFVLELEQQQSALGMLRQQTLSMLQDGAAPTPGEEPPLMQEITAMQDRCLKMVETQINSVKCWVQETKEYLGNPTIEIDAQLEELQILLTEATNHRQNIEKMAEEQKEKYLGLYTILPSELSLQLAEVALDLKIRDQIQDKIKEVEQSKATSQELSRQIQKLAKDLTTILTKLKAKTDNVVQAKTDQKAASHLEEYNEMLELILKWIEKAKVLAHGTIAWNSASQLREQYILHQTLLEESKEIDSELEAMTEKLQYLTSVYCTEKMSQQVAELGRETEELRQMIKIRLQNLQDAAKDMKKFEAELKKLQAALEQAQATLTSPEVGRLSLKEQLSHRQHLLSEMESLKPKVQAVQLCQSALRIPEDVVASLPLCHAALRLQEEASRLQHTAIQQCNIMQEAVVQYEQYEQEMKHLQQLIEGAHREIEDKPVATSNIQELQAQISRHEELAQKIKGYQEQIASLNSKCKMLTMKAKHATMLLTVTEVEGLAEGTEDLDGELLPTPSAHPSVVMMTAGRCHTLLSPVTEESGEEGTNSEISSPPACRSPSPVANTDASVNQDIAYYQALSAERLQTDAAKIHPSTSASQEFYEPGLEPSATAKLGDLQRSWETLKNVISEKQRTLYEALERQQKYQDSLQSISTKMEAIELKLSESPEPGRSPESQMAEHQALMDEILMLQDEINELQSSLAEELVSESCEADPAEQLALQSTLTVLAERMSTIRMKASGKRQLLEEKLNDQLEEQRQEQALQRYRCEADELDSWLLSTKATLDTALSPPKEPMDMEAQLMDCQNMLVEIEQKVVALSELSVHNENLLLEGKAHTKDEAEQLAGKLRRLKGSLLELQRALHDKQLNMQGTAQEKEESDVDLTATQSPGVQEWLAQARTTWTQQRQSSLQQQKELEQELAEQKSLLRSVASRGEEILIQHSAAETSGDAGEKPDVLSQELGMEGEKSSAEDQMRMKWESLHQEFSTKQKLLQNVLEQEQEQVLYSRPNRLLSGVPLYKGDVPTQDKSAVTSLLDGLNQAFEEVSSQSGGAKRQSIHLEQKLYDGVSATSTWLDDVEERLFVATALLPEETETCLFNQEILAKDIKEMSEEMDKNKNLFSQAFPENGDNRDVIEDTLGCLLGRLSLLDSVVNQRCHQMKERLQQILNFQNDLKVLFTSLADNKYIILQKLANVFEQPVAEQIEAIQQAEDGLKEFDAGIIELKRRGDKLQVEQPSMQELSKLQDMYDELMMIIGSRRSGLNQNLTLKSQYERALQDLADLLETGQEKMAGDQKIIVSSKEEIQQLLDKHKEYFQGLESHMILTETLFRKIISFAVQKETQFHTELMAQASAVLKRAHKRGVELEYILETWSHLDEDQQELSRQLEVVESSIPSVGLVEENEDRLIDRITLYQHLKSSLNEYQPKLYQVLDDGKRLLISISCSDLESQLNQLGECWLSNTNKMSKELHRLETILKHWTRYQSESADLIHWLQSAKDRLEFWTQQSVTVPQELEMVRDHLNAFLEFSKEVDAQSSLKSSVLSTGNQLLRLKKVDTATLRSELSRIDSQWTDLLTNIPAVQEKLHQLQMDKLPSRHAISEVMSWISLMENVIQKDEDNIKNSIGYKAIHEYLQKYKGFKIDINCKQLTVDFVNQSVLQISSQDVESKRSDKTDFAEQLGAMNKSWQILQGLVTEKIQLLEGLLESWSEYENNVQCLKTWFETQEKRLKQQHRIGDQASVQNALKDCQDLEDLIKAKEKEVEKIEQNGLALIQNKKEDVSSIVMSTLRELGQTWANLDHMVGQLKILLKSVLDQWSSHKVAFDKINSYLMEARYSLSRFRLLTGSLEAVQVQVDNLQNLQDDLEKQERSLQKFGSITNQLLKECHPPVTETLTNTLKEVNMRWNNLLEEIAEQLQSSKALLQLWQRYKDYSKQCASTVQQQEDRTNELLKAATNKDIADDEVATWIQDCNDLLKGLGTVKDSLFFLHELGEQLKQQVDASAASAIQSDQLSLSQHLCALEQALCKQQTSLQAGVLDYETFAKSLEALEAWIVEAEEILQGQDPSHSSDLSTIQERMEELKGQMLKFSSMAPDLDRLNELGYRLPLNDKEIKRMQNLNRHWSLISSQTTERFSKLQSFLLQHQTFLEKCETWMEFLVQTEQKLAVEISGNYQHLLEQQRAHELFQAEMFSRQQILHSIIIDGQRLLEQGQVDDRDEFNLKLTLLSNQWQGVIRRAQQRRGIIDSQIRQWQRYREMAEKLRKWLVEVSYLPMSGLGSVPIPLQQARTLFDEVQFKEKVFLRQQGSYILTVEAGKQLLLSADSGAEAALQAELAEIQEKWKSASMRLEEQKKKLAFLLKDWEKCEKGIADSLEKLRTFKKKLSQSLPDHHEELHAEQMRCKELENAVGSWTDDLTQLSLLKDTLSAYISADDISILNERVELLQRQWEELCHQLSLRRQQIGERLNEWAVFSEKNKELCEWLTQMESKVSQNGDILIEEMIEKLKKDYQEEIAIAQENKIQLQQMGERLAKASHESKASEIEYKLGKVNDRWQHLLDLIAARVKKLKETLVAVQQLDKNMSSLRTWLAHIESELAKPIVYDSCNSEEIQRKLNEQQELQRDIEKHSTGVASVLNLCEVLLHDCDACATDAECDSIQQATRNLDRRWRNICAMSMERRLKIEETWRLWQKFLDDYSRFEDWLKSSERTAAFPSSSGVIYTVAKEELKKFEAFQRQVHECLTQLELINKQYRRLARENRTDSACSLKQMVHEGNQRWDNLQKRVTSILRRLKHFIGQREEFETARDSILVWLTEMDLQLTNIEHFSECDVQAKIKQLKAFQQEISLNHNKIEQIIAQGEQLIEKSEPLDAAIIEEELDELRRYCQEVFGRVERYHKKLIRLPLPDDEHDLSDRELELEDSAALSDLHWHDRSADSLLSPQPSSNLSLSLAQPLRSERSGRDTPASVDSIPLEWDHDYDLSRDLESAMSRALPSEDEEGQDDKDFYLRGAVGLSGDHSALESQIRQLGKALDDSRFQIQQTENIIRSKTPTGPELDTSYKGYMKLLGECSSSIDSVKRLEHKLKEEEESLPGFVNLHSTETQTAGVIDRWELLQAQALSKELRMKQNLQKWQQFNSDLNSIWAWLGDTEEELEQLQRLELSTDIQTIELQIKKLKELQKAVDHRKAIILSINLCSPEFTQADSKESRDLQDRLSQMNGRWDRVCSLLEEWRGLLQDALMQCQGFHEMSHGLLLMLENIDRRKNEIVPIDSNLDAEILQDHHKQLMQIKHELLESQLRVASLQDMSCQLLVNAEGTDCLEAKEKVHVIGNRLKLLLKEVSRHIKELEKLLDVSSSQQDLSSWSSADELDTSGSVSPTSGRSTPNRQKTPRGKCSLSQPGPSVSSPHSRSTKGGSDSSLSEPGPGRSGRGFLFRVLRAALPLQLLLLLLIGLACLVPMSEEDYSCALSNNFARSFHPMLRYTNGPPPL

SEQ ID NO: 6445 - protein, 591 aa, Homo sapiens
MGCSSSSTKTRRSDTSLRAALIIQNWYRGYKARLKARQHYALTIFQSIEYADEQGQMQLSTFFSFMLENYTHIHKEELELRNQSLESEQDMRDRWDYVDSIDVPDSYNGPRLQFPLTCTDIDLLLEAFKEQQILHAHYVLEVLFETKKVLKQMPNFTHIQTSPSKEVTICGDLHGKLDDLFLIFYKNGLPSERNPYVFNGDFVDRGKNSIEILMILCVSFLVYPNDLHLNRGNHEDFMMNLRYGFTKEILHKYKLHGKRILQILEEFYAWLPIGTIVDNEILVIHGGISETTDLNLLHRVERNKMKSVLIPPTETNRDHDTDSKHNKVGVTFNAHGRIKTNGSPTEHLTEHEWEQVVTIFSASNYYEEGSNRGAYIKLCSGTTPRFFQYQVTKATCFQPLRQRVDTMENSAIKILRERVISRKSDLTRAFQLQDHRKSGKLSVSQWAFCMENILGLNLPWRSLSSNLVNIDQNGNVEYMSSFQNIRIEKPVQEAHSTLVETLYRYRSDLEIIFNAIDTDHSGLISVEEFRAMWKLFSSHYNVHIDDSQVNKLANIMDLNKDGSIDFNEFLKAFYVVHRYEDLMKPDVTNLG

SEQ ID NO: 6446 - protein, 543 aa, Homo sapiens
MTKHPPNRRGISFEVGAQLEARDRLKNWYPAHIEDIDYEEGKVLIHFKRWNHRYDEWFCWDSPYLRPLEKIQLRKEGLHEEDGSSEFQINEQVLACWSDCRFYPAKVTAVNKDGTYTVKFYDGVVQTVKHIHVKAFSKDQNIVGNARPKETDHKSLSSSPDKREKFKEQRKATVNVKKDKEDKPLKTEKRPKQPDKEGKLICSEKGKVSEKSLPKNEKEDKENISENDREYSGDAQVDKKPENDIVKSPQENLREPKRKRGRPPSIAPTAVDSNSQTLQPITLELRRRKISKGCEVPLKRPRLDKNSSQEKSKNYSENTDKDLSRRRSSRLSTNGTHEILDPDLVVSDLVDTDPLQDTLSSTKESEEGQLKSALEAGQVSSALTCHSFGDGSGAAGLELNCPSMGENTMKTEPTSPLVELQEISTVEVTNTFKKTDDFGSSNAPAVDLDHKFRCKVVDCLKFFRKAKLLHYHMKYFHGMEKSLEPEESPGKRHVQTRGPSASDKPSQETLTRKRVSASSPTTKDKEKNKEKKFKEFVRVKPKK

SEQ ID NO: 6447 - protein, 1078 aa, Homo sapiens
MAKMEVKTSLLDNMIGVGDMVLLEPLNEETFINNLKKRFDHSEIYTYIGSVVISVNPYRSLPIYSPEKVEEYRNRNFYELSPHIFALSDEAYRSLRDQDKDQCILITGESGAGKTEASKLVMSYVAAVCGKGAEVNQVKEQLLQSNPVLEAFGNAKTVRNDNSSRFGKYMDIEFDFKGDPLGGVISNYLLEKSRVVKQPRGERNFHVFYQLLSGASEELLNKLKLERDFSRYNYLSLDSAKVNGVDDAANFRTVRNAMQIVGFMDHEAESVLAVVAAVLKLGNIEFKPESRVNGLDESKIKDKNELKEICELTGIDQSVLERAFSFRTVEAKQEKVSTTLNVAQAYYARDALAKNLYSRLFSWLVNRINESIKAQTKVRKKVMGVLDIYGFEIFEDNSFEQFIINYCNEKLQQIFIELTLKEEQEEYIREDIEWTHIDYFNNAIICDLIENNTNGILAMLDEECLRPGTVTDETFLEKLNQVCATHQHFESRMSKCSRFLNDTSLPHSCFRIQHYAGKVLYQVEGFVDKNNDLLYRDLSQAMWKASHALIKSLFPEGNPAKINLKRPPTAGSQFKASVATLMKNLQTKNPNYIRCIKPNDKKAAHIFNEALVCHQIRYLGLLENVRVRRAGYAFRQAYEPCLERYKMLCKQTWPHWKGPARSGVEVLFNELEIPVEEYSFGRSKIFIRNPRTLFKLEDLRKQRLEDLATLIQKIYRGWKCRTHFLLMKKSQIVIAAWYRRYAQQKRYQQTKSSALVIQSYIRGWKARKILRELKHQKRCKEAVTTIAAYWHGTQVRREYRKFFRANAGKKIYEFTLQRIVQKYFLEMKNKMPSLSPIDKNWPSRPYLFLDSTHKELKRIFHLWRCKKYRDQFTDQQKLIYEEKLEASELFKDKKALYPSSVGQPFQGAYLEINKNPKYKKLKDAIEEKIIIAEVVNKINRANGKSTSRIFLLTNNNLLLADQKSGQIKSEVPLVDVTKVSMSSQNDGFFAVHLKEGSEAASKGDFLFSSDHLIEMATKLYRTTLSQTKQKLNIEISDEFLVQFRQDKVCVKFIQGNQKNGSVPTCKRKNNRLLEVAVP

SEQ ID NO: 6448 - protein, 1011 aa, Homo sapiens
MDPPSPSRTSQTQPTATSPLTSYRWHTGGGGEKAAGGFRWGRFAGWGRALSHQEPMVSTQPAPRSIFRRVLSAPPKESRTSRLRLSKALWGRHKNPPPEPDPEPEQEAPELEPEPELEPPTPQIPEAPTPNVPVWDIGGFTLLDGKLVLLGGEEEGPRRPRVGSASSEGSIHVAMGNFRDPDRMPGKTEPETAGPNQVHNVRGLLKRLKEKKKARLEPRDGPPSALGSRESLATLSELDLGAERDVRIWPLHPSLLGEPHCFQVTWTGGSRCFSCRSAAERDRWIEDLRRQFQPTQDNVEREETWLSVWVHEAKGLPRAAAGAPGVRAELWLDGALLARTAPRAGPGQLFWAERFHFEALPPARRLSLRLRGLGPGSAVLGRVALALEELDAPRAPAAGLERWFPLLGAPAGAALRARIRARRLRVLPSERYKELAEFLTFHYARLCGALEPALPAQAKEELAAAMVRVLRATGRAQALVTDLGTAELARCGGREALLFRENTLATKAIDEYMKLVAQDYLQETLGQVVRRLCASTEDCEVDPSKCPASELPEHQARLRNSCEEVFETIIHSYDWFPAELGIVFSSWREACKERGSEVLGPRLVCASLFLRLLCPAILAPSLFGLAPDHPAPGPARTLTLIAKVIQNLANRAPFGEKEAYMGFMNSFLEEHGPAMQCFLDQVAMVDVDAAPSGYQGSGDLALQLAVLHAQLCTIFAELDQTTRDTLEPLPTILRAIEEGQPVLVSVPMRLPLPPAQVHSSLSAGEKPGFLAPRDLPKHTPLISKSQSLRSVRRSESWARPRPDEERPLRRPRPVQRTQSVPVRRPARRRQSAGPWPRPKGSLSMGPAPRARPWTRDSASLPRKPSVPWQRQMDQPQDRNQALGTHRPVNKLAELQCEVAALREEQKVLSRLVESLSTQIRALTEQQEQLRGQLQDLDSRLRAGSSEFDSEHNLTSNEGHSLKNLEHRLNEMERTQAQLRDAVQSLQLSPRTRGSWSQPQPLKAPCLNGDTT

SEQ ID NO: 6449 - protein, 846 aa, Homo sapiens
MCFLRRPGAPASWIWWRMLRQVLRRGLQSFCHRLGLCVSRHPVFFLTVPAVLTITFGLSALNRFQPEGDLERLVAPSHSLAKIERSLASSLFPLDQSKSQLYSDLHTPGRYGRVILLSPTGDNILLQAEGILQTHRAVLEMKDGRNSFIGHQLGGVVEVPNSKDQRVKSARAIQITYYLQTYGSATQDLIGEKWENEFCKLIRKLQEEHQELQLYSLASFSLWRDFHKTSILARSKVLVSLVLILTTATLSSSMKDCLRSKPFLGLLGVLTVCISIITAAGIFFITDGKYNSTLLGIPFFAMGHGTKGVFELLSGWRRTKENLPFKDRIADAYSDVMVTYTMTSSLYFITFGMGASPFTNIEAVKVFCQNMCVSILLNYFYIFSFFGSCLVFAGQLEQNRYHSIFCCKIPSAEYLDRKPVWFQTVMSDGHQQTSHHETNPYQHHFIQHFLREHYNEWITNIYVKPFVVILYLIYASFSFMGCLQISDGANIINLLASDSPSVSYAMVQQKYFSNYSPVIGFYVYEPLEYWNSSVQDDLRRLCSGFTAVSWVEQYYQFLKVSNVSANNKSDFISVLQSSFLKKPEFQHFRNDIIFSKAGDESNIIASRLYLVARTSRDKQKEITEVLEKLRPLSLSKSIRFIVFNPSFVFMDHYSLSVTVPVLIAGFGVLLVLILTFFLVIHPLGNFWLILSVTSIELGVLGLMTLWNVDMDCISILCLIYTLNFAIDHCAPLLFTFVLATEHTRTQCIKSSLQDHGTAILQNVTSFLIGLVPLLFVPSNLTFTLFKCLLLTGGCTLLHCFVILPVFLTFFPPSKKHHKKKKRAKRKEREEIECIEIQENPDHVTTV

SEQ ID NO: 6450 - protein, 625 aa, Homo sapiens
MDRGTLPLAVALLLASCSLSPTSLAETVHCDLQPVGPERGEVTYTTSQVSKGCVAQAPNAILEVHVLFLEFPTGPSQLELTLQASKQNGTWPREVLLVLSVNSSVFLHLQALGIPLHLAYNSSLVTFQEPPGVNTTELPSFPKTQILEWAAERGPITSAAELNDPQSILLRLGQAQGSLSFCMLEASQDMGRTLEWRPRTPALVRGCHLEGVAGHKEAHILRVLPGHSAGPRTVTVKVELSCAPGDLDAVLILQGPPYVSWLIDANHNMQIWTTGEYSFKIFPEKNIRGFKLPDTPQGLLGEARMLNASIVASFVELPLASIVSLHASSCGGRLQTSPAPIQTTPPKDTCSPELLMSLIQTKCADDAMTLVLKKELVAHLKCTITGLTFWDPSCEAEDRGDKFVLRSAYSSCGMQVSASMISNEAVVNILSSSSPQRKKVHCLNMDSLSFQLGLYLSPHFLQASNTIEPGQQSFVQVRVSPSVSEFLLQLDSCHLDLGPEGGTVELIQGRAAKGNCVSLLSPSPEGDPRFSFLLHFYTVPIPKTGTLSCTVALRPKTGSQDQEVHRTVFMRLNIISPDLSGCTSKGLVLPAVLGITFGAFLIGALLTAALWYIYSHTREYPRPPQ

SEQ ID NO: 6451 - protein, 1271 aa, Homo sapiens
MASGSCQGCEEDEETLKKLIVRLNNVQEGKQIETLVQILEDLLVFTYSERASKLFQGKNIHVPLLIVLDSYMRVASVQQVGWSLLCKLIEVCPGTMQSLMGPQDVGNDWEVLGVHQLILKMLTVHNASVNLSVIGLKTLDLLLTSGKITLLILDEESDIFMLIFDAMHSFPANDEVQKLGCKALHVLFERVSEEQLTEFVENKDYMILLSALTNFKDEEEIVLHVLHCLHSLAIPCNNVEVLMSGNVRCYNIVVEAMKAFPMSERIQEVSCCLLHRLTLGNFFNILVLNEVHEFVVKAVQQYPENAALQISALSCLALLTETIFLNQDLEEKNENQENDDEGEEDKLFWLEACYKALTWHRKNKHVQEAACWALNNLLMYQNSLHEKIGDEDGHFPAHREVMLSMLMHSSSKEVFQASANALSTLLEQNVNFRKILLSKGIHLNVLELMQKHIHSPEVAESGCKMLNHLFEGSNTSLDIMAAVVPKILTVMKRHETSLPVQLEALRAILHFIVPGMPEESREDTEFHHKLNMVKKQCFKNDIHKLVLAALNRFIGNPGIQKCGLKVISSIVHFPDALEMLSLEGAMDSVLHTLQMYPDDQEIQCLGLSLIGYLITKKNVFIGTGHLLAKILVSSLYRFKDVAEIQTKGFQTILAILKLSASFSKLLVHHSFDLVIFHQMSSNIMEQKDQQFLNLCCKCFAKVAMDDYLKNVMLERACDQNNSIMVECLLLLGADANQAKEGSSLICQVCEKESSPKLVELLLNSGSREQDVRKALTISIGKGDSQIISLLLRRLALDVANNSICLGGFCIGKVEPSWLGPLFPDKTSNLRKQTNIASTLARMVIRYQMKSAVEEGTASGSDGNFSEDVLSKFDEWTFIPDSSMDSVFAQSDDLDSEGSEGSFLVKKKSNSISVGEFYRDAVLQRCSPNLQRHSNSLGPIFDHEDLLKRKRKILSSDDSLRSSKLQSHMRHSDSISSLASEREYITSLDLSANELRDIDALSQKCCISVHLEHLEKLELHQNALTSFPQQLCETLKSLTHLDLHSNKFTSFPSYLLKMSCIANLDVSRNDIGPSVVLDPTVKCPTLKQFNLSYNQLSFVPENLTDVVEKLEQLILEGNKISGICSPLRLKELKILNLSKNHISSLSENFLEACPKVESFSARMNFLAAMPFLPPSMTILKLSQNKFSCIPEAILNLPHLRSLDMSSNDIQYLPGPAHWKSLNLRELLFSHNQISILDLSEKAYLWSRVEKLHLSHNKLKEVRRLLPLKKYTL

SEQ ID NO: 6452 - protein, 339 aa, Homo sapiens
MARHGLPLLPLLSLLVGAWLKLGNGQATSMVQLQGGRFLMGTNSPDSRDGDGPVREATVKPFAIDIFPVTNKDFRDFVREKKYRTEAEMFGWSFVFEDFVSDELRNKATQPMKSVLWWLPVEKAFWRQPAGPGSGIRERLEHPVLHVSWNDARAYCAWRGKRLPTEEEWEFAARGGLKGQVYPWGNWFQPNRTNLWQGKFPKGDKAEDGFHGVSPVNAFPAQNNYGWATLQIQPQTTSVSAVLQTQAGRQGSCKQPGGDKEKSLLGSLSFPGHVANSAIPSSRASASGKNFPFPVSHPSVAGASHQGRRGLSLLCFGEGAQCVLTMAGGQVFLLEAKYY

SEQ ID NO: 6453 - protein, 1218 aa, Homo sapiens
MEENSKKDHRALLNQGEEDELEVFGYRDHNVRKAFCLVASVLTCGGLLLVFYWRPQWRVWANCIPCPLQEADTVLLRTTDEFQRYMRKKVFCLYLSTLKFPVSKKWEESLVADRHSVINQALIKPELKLRCMEVQKIRYVWNDLEKRFQKVGLLEDSNSCSDIHQTFGLGLTSEEQEVRRLVCGPNAIEVEIQPIWKLLVKQVLNPFYVFQAFTLTLWLSQGYIEYSVAIIILTVISIVLSVYDLRQQSVKLHNLVEDHNKVQVTIIVKDKGLEELESRLLVPGDILILPGKFSLPCDAVLIDGSCVVNEGMLTGESIPVTKTPLPQMENTMPWKCHSLEDYRKHVLFCGTEVIQVKPSGQGPVRAVVLQTGYNTAKGDLVRSILYPRPLNFKLYSDAFKFIVFLACLGVMGFFYALGVYMYHGVPPKDTVTMALILLTVTVPPVLPAALTIGNVYAQKRLKKKKIFCISPQRINMCGQINLVCFDKTGTLTEDGLDLWGTVPTADNCFQEAHSFASGQAVPWSPLCAAMASCHSLILLNGTIQGDPLDLKMFEGTAWKMEDCIVDSCKFGTSVSNIIKPGPKASKSPVEAIITLCQFPFSSSLQRMSVIAQLAGENHFHVYMKGAPEMVARFCRSETVPKNFPQELRSYTVQGFRVIALAHKTLKMGNLSEVEHLAREKVESELTFLGLLIMENRLKKETKLVLKELSEARIRTVMITGDNLQTAITVAKNSEMIPPGSQVIIVEADEPEEFVPASVTWQLVENQETGPGKKEIYMHTGNSSTPRGEGGSCYHFAMSGKSYQVIFQHFNSLLPKILVNGTVFARMSPGQKSSLIEEFQKLNYYVGMCGDGANDCGALKAAHAGISLSEQEASVASPFTSKTTNIQCVPHLIREGRAALVSSFGVFKYLTMYGIIQFISALLLYWQLQLFGNYQYLMQDVAITLMVCLTMSSTHAYPKLAPYRPAGQLLSPPLLLSIFLNSCFSCIVQISAFLYVKQQPWYCEVYQYSECFLANQSNFSTNVSLERNWTGNATLIPGSILSFETTTLWPITTINYITVAFIFSKGKPFRKPIYTNYIFSFLLLAALGLTIFILFSDFQVIYRGMELIPTITSWRVLILVVALTQFCVAFFVEDSILQNHELWLLIKREFGFYSKSQYRTWQKKLAEDSTWPPINRTDYSGDGKNGFYINGGYESHEQIPKRKLKLGGQPTEQHFWARL

SEQ ID NO: 6454 - protein, 880 aa, Homo sapiens
MKNLYFRVITIVIGLYFTGIMTNASRKSNILFNSECQWNEYILTNCSFTGKCDIPVDISQTAATVDVSFNFFRVLLQSHTKKEEWKIKHLDLSNNLISKITLSPFAYLHALEVLNLSNNAIHSLSLDLLSPKSSWVKRHRSSFRNRFPLLKVLILQRNKLSDTPKGLWKLKSLQSLDLSFNGILQIGWSDFHNCLQLENLCLKSNKIFKIPPQAFKDLKKLQVIDLSNNALITILPMMIIALEFPHLVVDLADNNWQCDDSVAVFQNFISESWRKKWNVICNRSIGSEEANGGTPQSRISRETRLPPIHLHRMKSLIRSKAERPQGGRHTGISTLGKKAKAGSGLRKKQRRLPRSVRSTRDVQAAGKKEDAPQDLALAVCLSVFITFLVAFSLGAFTRPYVDRLWQKKCQSKSPGLDNAYSNEGFYDDMEAAGHTPHPETHLRQVFPHLSLYENQTPFWVTQPHPHATVIPDRTLGRSRKDPGSSQSPGQCGDNTGAGSGNDGAVYSILQRHPHAGNRELMSAAQDHIHRNDILGEWTYETVAQEEPLSAHSVGVSSVAGTSHAVSGSSRYDSNELDPSLSGEITASLCKMLTHAEAQRTGDSKERGGTEQSLWDSQMEFSKERQVSSSIDLLSIQQPRLSGARAEEALSAHYSEVPYGDPRDTGPSVFPPRWDSGLDVTPANKEPVQKSTPSDTCCELESDCDSDEGSLFTLSSISSESARSKTEEAVPDEESLQDESSGASKDNVTAVDSLEENVTFQTIPGKCKNQEDPFEKPLISAPDSGMYKTHLENASDTDRSEGLSPWPRSPGNSPLGDEFPGMFTYDYDTALQSKAAEWHCSLRDLEFSNVDVLQQTPPCSAEVPSDPDKAAFHERDSDILK

SEQ ID NO: 6455 - protein, 1134 aa, Homo sapiens
MRFGSKMMPMFLTVYLSNNEQHFTEVPVTPETICRDVVDLCKEPGESDCHLAEVWCGSERPVADNERMFDVLQRFGSQRNEVRFFLRHERPPGRDIVSGPRSQDPSLKRNGVKVPGEYRRKENGVNSPRMDLTLAELQEMASRQQQQIEAQQQLLATKEQRLKFLKQQDQRQQQQVAEQEKLKRLKEIAENQEAKLKKVRALKGHVEQKRLSNGKLVEEIEQMNNLFQQKQRELVLAVSKVEELTRQLEMLKNGRIDSHHDNQSAVAELDRLYKELQLRNKLNQEQNAKLQQQRECLNKRNSEVAVMDKRVNELRDRLWKKKAALQQKENLPVSSDGNLPQQAASAPSRVAAVGPYIQSSTMPRMPSRPELLVKPALPDGSLVIQASEGPMKIQTLPNMRSGAASQTKGSKIHPVGPDWSPSNADLFPSQGSASVPQSTGNALDQVDDGEVPLREKEKKVRPFSMFDAVDQSNAPPSFGTLRKNQSSEDILRDAQVANKNVAKVPPPVPTKPKQINLPYFGQTNQPPSDIKPDGSSQQLSTVVPSMGTKPKPAGQQPRVLLSPSIPSVGQDQTLSPGSKQESPPAAAVRPFTPQPSKDTLLPPFRKPQTVAASSIYSMYTQQQAPGKNFQQAVQSALTKTHTRGPHFSSVYGKPVIAAAQNQQQHPENIYSNSQGKPGSPEPETEPVSSVQENHENERIPRPLSPTKLLPFLSNPYRNQSDADLEALRKKLSNAPRPLKKRSSITEPEGPNGPNIQKLLYQRTTIAAMETISVPSYPSKSASVTASSESPVEIQNPYLHVEPEKEVVSLVPESLSPEDVGNASTENSDMPAPSPGLDYEPEGVPDNSPNLQNNPEEPNPEAPHVLDVYLEEYPPYPPPPYPSGEPEGPGEDSVSMRPPEITGQVSLPPGKRTNLRKTGSERIAHGMRVKFNPLALLLDSSLEGEFDLVQRIIYEVDDPSLPNDEGITALHNAVCAGHTEIVKFLVQFGVNVNAADSDGWTPLHCAASCNNVQVCKFLVESGAAVFAMTYSDMQTAADKCEEMEEGYTQCSQFLYGVQEKMGIMNKGVIYALWDYEPQNDDELPMKEGDCMTIIHREDEDEIEWWWARLNDKEGYVPRNLLGLYPRIKPRQRSLA

SEQ ID NO: 6456 - protein, 431 aa, Homo sapiens
MEDIQTNAELKSTQEQSVPAESAAVLNDYSLTKSHEMENVDSGEGPANEDEDIGDDSMKVKDEYSERDENVLKSEPMGNAEEPEIPYSYSREYNEYENIKLERHVVSFDSSRPTSGKMNCDVCGLSCISFNVLMVHKRSHTGERPFQCNQCGASFTQKGNLLRHIKLHTGEKPFKCHLCNYACQRRDALTGHLRTHSGEKRHCFDVNYNSSYMYEKESELIQTRMMDQAINNAISYLGAEALRPLVQTPPAPTSEMVPVISSMYPIALTRAEMSNGAPQELEKKSIHLPEKSVPSERGLSPNNSGHDSTDTDSNHEERQNHIYQQNHMVLSRARNGMPLLKEVPRSYELLKPPPICPRDSVKVINKEGEVMDVYRCDHCRVLFLDYVMFTIHMGCHGFRDPFECNMCGYRSHDRYEFSSHIARGEHRALLK

SEQ ID NO: 6457 - protein, 1576 aa, Homo sapiens
MENILCFLNSYTETGLSPDSHWLDIDPNFICLSGLGLFILYLFYVVLTLYSSPTEKNNDIQKHQGRAKRRRKGGTFKGFPDWKSFQREEEEERKLLSLLKSFGPPVSCSPRGQHHDTNHFRRLLCPDPVCRVCKRATADIQQLLSWESLKDAAPSVSPLASSASATESSFTLASTPSATPPEDLILSPRPKASPPPPLILSPDLITTLADLFSPSPLRDPLPPQPVSPLDSKFPIDHSPPQQLPFPLLPPHHIERVESSLQPEASLSLNTIFSFGSTLCQDISQAMNPIDSCARHHGPPIPSALPPEDCTVTQSKSSLTILKTFPEMLSLGGSGGSSTSAPTIKGIDHSHLASSEFTWWQPHAKDSFSSNFVPSDFMEELLTLHSSEAFLGGHSVANLIEPVNISFLSHDILALLERQVKKRGDFLMWKENGKKPGSFPKQLRPNYQLNSSRNMLTSIAVKHDLAESFPFWASKGKLEWQHIHQQPPHSKCFEDHLEQKYVQLFWGLPSLHSESLHPTVLVQRGHSSMFVFFNGITNTSISHESPVLPPPQPLSLPSTQPLPLPQTLPQGQSPHLTQVKSLAQPQSPFRALLPSPLFLIRICGVCFHRPQNEARSLLPSEINHLEWNVLQKVQESLWGLPSVVQKSQEDFCPPAPNPELVRKSFKVHVPISIIPGDFPLSSEVRKKLEQHIRRRLIQRRWGLPRRIHESLSLLRPQSKISELSVSERIHGPLNISLVEGQRCNVLKKSASSFPRSFHERSSNMLSMENVGNYQGYSQETVPKDHLLHGPETSSDKDLRSNSERDLETHMMHLSGNDSGVRLGQKQLENALTVRLSKKFEEINEGRMPGTVHSSWHSVKQTMSLPEKSHSQIKHRNLVTLVSEDHCVDTSQEISFLSSNKQKMLEAHIKTFRMRMLWGLPLKVLESIEIFKSKADLSTSFSHFDLPSSATFISQGDSKDGVSKSRSRSTFQGEKLGTTSSVPILDRPHPVSSPVVQEGQGTLRRQFSDTDHDLIETDSKDGASTSLRRGTTDFQSEKLDSTSSFPILGHSYLVTSPVNQEKQGTLRREFSDTDNDLTESVRTTEDGRQTFLPPPHSIVDEVSQKQTVLASRCSAELPIMQAGAGCESWDKRKSSFHNVDRLQGSRKTFPVTNALQSQTRNNLTTSKSGSCSLTNVKASTSNETEIFPPRISVPQDPKSSYLKNQMLSQLKLVQRKHSQPQSHFTDMSFALDNLSSKDLLTNSQGISSGDMGTSQVVHVHLEDSGIRVAQKQEPRVPTCVLQKCQVTNFPPAVNRVSPVRPKGGELDGGDAGLGTSQRRRKSLPVHNKTSGEVLGSKSSPTLKTQPPPENLFRKWMKTSLQWFNKPSISYEEQESSWEKGSSLSSCVQNIGRVIRAAFTGTTEAQKIRKDTREFLEEKLGHRHGIDITCPQEPLSFPVGLGKAQHNPEVHVRAEPVQGCPCNYRAPSCKVTRTKSCSQQAIFVGQNYPTRIRQIIDKDRQPQKVEAFKGKILCQSHPQSMPHRKPVPHPNPTCRRQVSLVCPAVPTSAKSPVFSDVPFLTGQKMLPKHLQGGKFPPTK

SEQ ID NO: 6458 - protein, 351 aa, Homo sapiens
MDDQSRMLQTLAGVNLAGHSVQGGMALPPPPHGHEGADGDGRKQDIGDILHQIMTITDQSLDEAQAKKHALNCHRMKPALFSVLCEIKEKTGLSIRGAQEEDPPDPQLMRLDNMLLAEGVSGPEKGGGSAAAAAAAAASGGSSDNSIEHSDYRAKLTQIRQIYHTELEKYEQACNEFTTHVMNLLREQSRTRPISPKEIERMVGIIHRKFSSIQMQLKQSTCEAVMILRSRFLDARRKRRNFSKQATEILNEYFYSHLSNPYPSEEAKEELAKKCSITVSQVSNWFGNKRIRYKKNIGKFQEEANLYAAKTAVTAAHAVAAAVQNNQTNSPTTPNSGGYPPSCYQSDGRLQ

SEQ ID NO: 6459 - protein, 620 aa, Homo sapiens
MGPLQFRDVAIEFSLEEWHCLDTAQRNLYRNVMLENYSNLVFLGIVVSKPDLIAHLEQGKKPLTMKRHEMVANPSVICSHFAQDLWPEQNIKDSFQKVILRRYEKRGHGNLQLIKRCESVDECKVHTGGYNGLNQCSTTTQSKVFQCDKYGKVFHKFSNSNRHNIRHTEKKPFKCIECGKAFNQFSTLITHKKIHTGEKPYICEECGKAFKYSSALNTHKRIHTGEKPYKCDKCDKAFIASSTLSKHEIIHTGKKPYKCEECGKAFNQSSTLTKHKKIHTGEKPYKCEECGKAFNQSSTLTKHKKIHTGEKPYVCEECGKAFKYSRILTTHKRIHTGEKPYKCNKCGKAFIASSTLSRHEFIHMGKKHYKCEECGKAFIWSSVLTRHKRVHTGEKPYKCEECGKAFKYSSTLSSHKRSHTGEKPYKCEECGKAFVASSTLSKHEIIHTGKKPYKCEECGKAFNQSSSLTKHKKIHTGEKPYKCEECGKAFNQSSSLTKHKKIHTGEKPYKCEECGKAFNQSSTLIKHKKIHTREKPYKCEECGKAFHLSTHLTTHKILHTGEKPYRCRECGKAFNHSATLSSHKKIHSGEKPYECDKCGKAFISPSSLSRHEIIHTGEKP

SEQ ID NO: 6460 - protein, 516 aa, Homo sapiens
MALSQSVPFSATELLLASAIFCLVFWVLKGLRPRVPKGLKSPPEPWGWPLLGHVLTLGKNPHLALSRMSQRYGDVLQIRIGSTPVLVLSRLDTIRQALVRQGDDFKGRPDLYTSTLITDGQSLTFSTDSGPVWAARRRLAQNALNTFSIASDPASSSSCYLEEHVSKEAKALISRLQELMAGPGHFDPYNQVVVSVANVIGAMCFGQHFPESSDEMLSLVKNTHEFVETASSGNPLDFFPILRYLPNPALQRFKAFNQRFLWFLQKTVQEHYQDFDKNSVRDITGALFKHSKKGPRASGNLIPQEKIVNLVNDIFGAGFDTVTTAISWSLMYLVTKPEIQRKIQKELDTVIGRERRPRLSDRPQLPYLEAFILETFRHSSFLPFTIPHSTTRDTTLNGFYIPKKCCVFVNQWQVNHDPELWEDPSEFRPERFLTADGTAINKPLSEKMMLFGMGKRRCIGEVLAKWEIFLFLAILLQQLEFSVPPGVKVDLTPIYGLTMKHARCEHVQARLRFSIN

SEQ ID NO: 6461 - protein, 317 aa, Homo sapiens
MEQSNYSVYADFILLGLFSNARFPWLLFALILLVFLTSIASNVVKIILIHIDSRLHTPMYFLLSQLSLRDILYISTIVPKMLVDQVMSQRAISFAGCTAQHFLYLTLAGAEFFLLGLMSYDRYVAICNPLHYPVLMSRKICWLIVAAAWLGGSIDGFLLTPVTMQFPFCASREINHFFCEVPALLKLSCTDTSAYETAMYVCCIMMLLIPFSVISGSYTRILITVYRMSEAEGRGKAVATCSSHMVVVSLFYGAAMYTYVLPHSYHTPEQDKAVSAFYTILTPMLNPLIYSLRNKDVTGALQKVVGRCVSSGKVTTF

SEQ ID NO: 6462 - protein, 626 aa, Homo sapiens
MASPSPPPESKGLLTFEDVAVFFTQEEWDYLDPAQRSLYKDVMMENYGNLVSLDVLNRDKDEEPTVKQEIEEIEEEVEPQGVIVTRIKSEIDQDPMGRETFELVGRLDKQRGIFLWEIPRESLTQEQRMFRENTNIIRKRPNSEEKCHKCEECGKGFVRKAHFIQHQRVHTGEKPFQCNECGKSFSRSSFVIEHQRIHTGERPYECNYCGKTFSVSSTLIRHQRIHTGERPYQCNQCKQSFSQRRSLVKHQRIHTGEKPHKCSDCGKAFSWKSHLIEHQRTHTGEKPYHCTKCKKSFSRNSLLVEHQRIHTGERPHKCGECGKAFRLSTYLIQHQKIHTGEKPFLCIECGKSFSRSSFLIEHQRIHTGERPYQCKECGKSFSQLCNLTRHQRIHTGDKPHKCEECGKAFSRSSGLIQHQRIHTREKTYPYNETKESFDPNCSLVIQQEVYPKEKSYKCDECGKTFSVSAHLVQHQRIHTGEKPYLCTVCGKSFSRSSFLIEHQRIHTGERPYLCRQCGKSFSQLCNLIRHQGVHTGNKPHKCDECGKAFSRNSGLIQHQRIHTGEKPYKCEKCDKSFSQQRSLVNHQKIHAEVKTQETHECDACGEAFNCRISLIQHQKLHTAWMQ

SEQ ID NO: 6463 - protein, 1188 aa, Homo sapiens
MGPRKKSVKTCIMNNEIPEEMTADETKDYMNQLSHEVLCHIFRYLPLQDIMCMECLSRKLKEAVTLYLRVVRVVDLCAGRWWEYMPSGFTDASFLTLLKKMPDVEQLYGLHPRYLERRRVRGHEAFSIPGVLEALQACPNLVGVETSHLELVESIWTYMPHVHILGKFRNRNGAFPIPPENKLKIPIGAKIQTLHLVGVNVPEIPCIPMLRHLYMKWVRLTKPQPFKDFLCISLRTFVMRNCAGPTNSLKYVPLVTGLASARNLEHLEMVRVPFLGGLIQHVVEDSWRSGGFRNLHTIVLGACKNALEVDLGYLIITAARRLHEVRIQPSLTKDGVFSALKMAELEFPQFETLHLGYVDEFLLQSRMANADLVKYGLADVVENPGIITDIGMKAVNEVFSCIKYLAIYNCPHLHNPYNWISDHSRWTRLVDINLVRCHALKLDSFGQFIELLPSLEFISLDQMFREPPKGCARVGLSAGTGIGVSSALVSNQNSNNDDNNAQNNNANIHDNNHHHPDDSDEENDFRQDLQPGEQQFAADALNEMEDIVQEDGEVVAESGNNTPAHSQAIIPVDVDEEQAGPSGLQRVVKPTSITVHDSESDDEEDSLELQEVWIPKNGTRRYSEREEKTGESVQSRELSVSGKGKTPLRKRYNSHQMGQSKQFPLEESSCEKGCQVTSEQIKADMKAARDIPEKKKNKDVYPSCSSTTASTVGNSSSHNTASQSPDFVRTVNSGGSSEPSPTEVDVSRQCACSPGGSEDSEAMEEGDAESSVCPRCCCHRPQESQRRTSRCSDEERPSTSRACVVNGPDGTRSAFSFRTLPQGGSSGPAHDERTNGSGSGATGEDRRGSSQPESCDVQSNEDYPRRPLTRARSRLSHVLLVSESEVAKTKPRHAMKRKRTADKSTSTSDPVIEDDHVQVLVLKSKNLVGVTMTNCGITDLVLKDCPKMMFIHATRCRVLKHLKVENAPIVNRFDYAQCKKLNMDQVLDQILRMPPERNRIIYLRPMQQVDTLTLEQKLFSGPYPYHICIIHEFSNPPNVRNKVRIRSWMDTIANINQELIKYEFFPEATRSEEDLKKYPKYPWGREIYTLEGVVDGAPYSMISDFPWLRSLRAAEPNSFARYDFEDDEESTIYAPRRKGQLSADICMETIGEEISEMRQMKKGVFQRVVAIFIHYCDVNGEPVEDDYI

SEQ ID NO: 6464 - protein, 224 aa, Homo sapiens
MPGGLLLGDVAPNFEANTTVGRIRFHDFLGDSWGILFSHPRDFTPVCTTELGRAAKLAPEFAKRNVKLIALSIDSVEDHLAWSKDINAYNCEEPTEKLPFPIIDDRNRELAILLGMLDPAEKDEKGMPVTARVVFVFGPDKKLKLSILYPATTGRNFDEILRVVISLQLTAEKRVATPVDWKDGDSVMVLPTIPEEEAKKLFPKGVFTKELPSGKKYLRYTPQP

SEQ ID NO: 6465 - protein, 569 aa, Homo sapiens
MEKKWKYCAVYYIIQIHFVKGVWEKTVNTEENVYATLGSDVNLTCQTQTVGFFVQMQWSKVTNKIDLIAVYHPQYGFYCAYGRPCESLVTFTETPENGSKWTLHLRNMSCSVSGRYECMLVLYPEGIQTKIYNLLIQTHVTADEWNSNHTIEIEINQTLEIPCFQNSSSKISSEFTYAWSVEDNGTQETLISQNHLISNSTLLKDRVKLGTDYRLHLSPVQIFDDGRKFSCHIRVGPNKILRSSTTVKVFAKPEIPVIVENNSTDVLVERRFTCLLKNVFPKANITWFIDGSFLHDEKEGIYITNEERKGKDGFLELKSVLTRVHSNKPAQSDNLTIWCMALSPVPGNKVWNISSEKITFLLGSEISSTDPPLSVTESTLDTQPSPASSVSPARYPATSSVTLVDVSALRPNTTPQPSNSSMTTRGFNYPWTSSGTDTKKSVSRIPSETYSSSPSGAGSTLHDNVFTSTARAFSEVPTTANGSTKTNHVHITGIVVNKPKDGMSWPVIVAALLFCCMILFGLGVRKWCQYQKEIMERPPPFKPPPPPIKYTCIQEPNESDLPYHEMETL

SEQ ID NO: 6466 - protein, 285 aa, Homo sapiens
MGRQGLGGASAAGRSMQRSQSRSSLSASFEALAGYFPCMNSLEEEEGEAGGKKLRSTVQRSTETGLAVEMRNWMTRQASRESTDGSMNSYSSEGNLIFPGVRLASDSQFSDFLDGLGPAQLVGRQTLATPAMGDIQVGMMDKKGQLEVEIIRARGLVVKPGSKTLPAPYVKVYLLDNGVCIAKKKTKVARKTLEPLYQQLLSFEESPQGKVLQIIVWGDYGRMDHKSFMGVAQILLDELELSNMVIGWFKLFPPSSLVDPTLAPLTRRASQSSLESSTGPSYSRS

SEQ ID NO: 6467 - protein, 403 aa, Homo sapiens
MTTLAGAVPRMMRPGPGQNYPRSGFPLEVSTPLGQGRVNQLGGVFINGRPLPNHIRHKIVEMAHHGIRPCVISRQLRVSHGCVSKILCRYQETGSIRPGAIGGSKPKQVTTPDVEKKIEEYKRENPGMFSWEIRDKLLKDAVCDRNTVPSVSSISRILRSKFGKGEEEEADLERKEAEESEKKAKHSIDGILSERASAPQSDEGSDIDSEPDLPLKRKQRRSRTTFTAEQLEELERAFERTHYPDIYTREELAQRAKLTEARVQVWFSNRRARWRKQAGANQLMAFNHLIPGGFPPTAMPTLPTYQLSETSYQPTSIPQAVSDPSSTVHRPQPLPPSTVHQSTIPSNPDSSSAYCLPSTRHGFSSYTDSFVPPSGPSNPMNPTIGNGLSPQVPFIISSQISRK

SEQ ID NO: 6468 - protein, 807 aa, Homo sapiens
MAQQGQQGQMASGDSNLNFRMVAEIQNVEGQNLQEQVCPEPIFRFFRENKVEIASAITRPFPFLMGLRDRSFISEQMYEHFQEAFRNLVPVTRVMYCVLSELEKTFGWSHLEALFSRINLMAYPDLNEIYRSFQNVCYEHSPLQMNNVNDLEDRPRLLPYGKQENSNACHEMDDIAVPQEALSSSPRCEPGFSSESCEQLALPKAGGGDAEDAPSLLPGGGVLESNGMIDAARTYSTAPGEKQGEEEGRNSPRKRNQDKEKYQESPEGRDKETFDLKTPQVTNEGEPEKGLCLLPGEGEEGSDDCSEMCDGEEPQEASSSLARCGSEGSDDCSEMCDGEERQEASSSLARRGSVSSELENHPMNEEGESEELASSLLYDNVPGAEQSAYENEKCSCVMCFSEEVPGSPEARTESDQACGTMDTVDIANNSTLGKPKRKRRKKRGHGWSRMRMRRQENSQQNDNSKADGQVVSSEKKANVNLKDLSKIRGRKRGKPGTRFTQSDRAAQKRVRSRASRKHKDETVDFKAPLLPVTCGGVKGILHKKKLQQGILVKCIQTEDGKWFTPTEFEIKGGHARSKNWRLSVRCGGWPLRWLMENGFLPDPPRIRYRKKKRILKSQNNSSVDPCMRNLDECEVCRDGGELFCCDTCSRVFHEDCHIPPVEAERTPWNCIFCRMKESPGSQQCCQESEVLERQMCPEEQLKCEFLLLKVYCCSESSFFAKIPYYYYIREACQGLKEPMWLDKIKKRLNEHGYPQVEGFVQDMRLIFQNHRASYKYKDFGQMGFRLEAEFEKNFKEVFAIQETNGNN

SEQ ID NO: 6469 - protein, 228 aa, Homo sapiens
MKTLFLGVTLGLAAALSFTLEEEDITGTWYVKAMVVDKDFPEDRRPRKVSPVKVTALGGGNLEATFTFMREDRCIQKKILMRKTEEPGKFSAYGGRKLIYLQELPGTDDYVFYCKDQRRGGLRYMGKLVASAPCRAVPLSPPWLTWPPHLQVGILIPTWRPWKNLRNWCSTRDSRRRTFSCPCRREAAFSNTRQPPGLHLQSPPYHQTQSPDHLDLPSSHDPSLLPPT

SEQ ID NO: 6470 - protein, 643 aa, Homo sapiens
MATTAELFEEPFVADEYIERLVWRTPGGGSRGGPEAFDPKRLLEEFVNHIQELQIMDERIQRKVEKLEQQCQKEAKEFAKKVQELQKSNQIKEAADIIQKLHLIAQELPFDRFSEVKSKIASKYHDLECQLIQEFTSAQRRGEISRMREVAAVLLHFKGYSHCVDVYIKQCQEGAYLRNDIFEDAGILCQRVNKQVGDIFSNPETVLAKLIQNVFEIKLQSFVKEQLEECRKSDAEQYLKNLYDLYTRTTNLSSKLMEFNLGTDKQTFLSKLIKSIFISYLENYIEVETGYLKSRSAMILQRYYDSKNHQKRSIGTGGIQDLKERIRQRTNLPLGPSIDTHGETFLSQEVVVNLLQETKQAFERCHRLSDPSDLPRNAFRIFTILVEFLCIEHIDYALETGLAGIPSSDSRNANLYFLDVVQQANTIFHLFDKQFNDHLMPLISSSPKLSECLQKKKEIIEQMEMKLDTGIDRTLNCMIGQMKHILAAEQKKTDFKPEDENNVLIQYTNACVKVCAYVRKQVEKIKNSMDGKNVDTVLMELGVRFHRLIYEHLQQYSYSCMGGMLAICDVAEYRKCAKDFKIPMVLHLFDTLHALCNLLVVAPDNLKQVCSGEQLANLDKNILHSFVQLRADYRSARLARHFS

SEQ ID NO: 6471 - protein, 258 aa, Homo sapiens
MEDFEVILLDITLELQKQIMSELEILYKCDSSYIIGFYGAFFVENRISICTEFMDGGSLDVYRKMPEHVLGRIAVAVVKGLTYLWSLKILHRDVKPSNMLVNTRGQVKLCDFGVSTQLVNSIAKTYVGTNAYMAPERISGEQYGIHSDVWSLGISFMELALGRFPYPQIQKNQGSLMPLQLLQCIVDEDSPVLPVGEFSEPFVHFITQCMRKQPKERPAPEELMGHPFIVQFNDGNAAVVSMWVCRALEERRSQQGPP

SEQ ID NO: 6472 - protein, 414 aa, Homo sapiens
MNPTLGLAIFLAVLLTVKGLLKPSFSPRNYKALSEVQGWKQRMAAKELARQNMDLGFKLLKKLAFYNPGRNIFLSPLSISTAFSMLCLGAQDSTLDEIKQGFNFRKMPEKDLHEGFHYIIHELTQKTQDLKLSIGNTLFIDQRLQPQRKFLEDAKNFYSAETILTNFQNLEMAQKQINDFISQKTHGKINNLIENIDPGTVMLLANYIFFRARWKHEFDPNVTKEEDFFLEKNSSVKVPMMFRSGIYQVGYDDKLSCTILEIPYQKNITAIFILPDEGKLKHLEKGLQVDTFSRWKTLLSRRVVDVSVPRLHMTGTFDLKKTLSYIGVSKIFEEHGDLTKIAPHRSLKVGEAVHKAELKMDERGTEGAAGTGAQTLPMETPLVVKIDKPYLLLIYSEKIPSVLFLGKIVNPIGK

SEQ ID NO: 6473 - protein, 1349 aa, Homo sapiens
MKKIRICHIFTFYSWMSYDVLFQRTELGALEIWRQLICAHVCICVGWLYLRDRVCSKKDIILRTEQNSGRTILIKAVTEKNFETKDFRASLENGVLLCDLINKLKPGVIKKINRLSTPIAGLDNINVFLKACEQIGLKEAQLFHPGDLQDLSNRVTVKQEETDRRVKNVLITLYWLGRKAQSNPYYNGPHLNLKAFENLLGQALTKALEDSSFLKRSGRDSGYGDIWCPERGEFLAPPRHHKREDSFESLDSLGSRSLTSCSSDITLRGGREGFESDTDSEFTFKMQDYNKDDMSYRRISAVEPKTALPFNRFLPNKSRQPSYVPAPLRKKKPDKHEDNRRSWASPVYTEADGTFSRLFQKIYGENGSKSMSDVSAEDVQNLRQLRYEEMQKIKSQLKEQDQKWQDDLAKWKDRRKSYTSDLQKKKEEREEIEKQALEKSKRSSKTFKEMLQDRESQNQKSTVPSRRRMYSFDDVLEEGKRPPTMTVSEASYQSERVEEKGATYPSEIPKEDSTTFAKREDRVTTEIQLPSQSPVEEQSPASLSSLRSRSTQMESTRVSASLPRSYRKTDTVRLTSVVTPRPFGSQTRGISSLPRSYTMDDAWKYNGDVEDIKRTPNNVVSTPAPSPDASQLASSLSSQKEVAATEEDVTRLPSPTSPFSSLSQDQAATSKATLSSTSGLDLMSESGEGEISPQREVSRSQDQFSDMRISINQTPGKSLDFGFTIKWDIPGIFVASVEAGSPAEFSQLQVDDEIIAINNTKFSYNDSKEWEEAMAKAQETGHLVMDVRRYGKAGSPETKWIDATSGIYNSEKSSNLSVTTDFSESLQSSNIESKEINGIHDESNAFESKASESISLKNLKRRSQFFEQGSSDSVVPDLPVPTISAPSRWVWDQEEERKRQERWQKEQDRLLQEKYQREQEKLREEWQRAKQEAERENSKYLDEELMVLSSNSMSLTTREPSLATWEATWSEGSKSSDREGTRAGEEERRQPQEEVVHEDQGKKPQDQLVIERERKWEQQLQEEQEQKRLQAEAEEQKRPAEEQKRQAEIERETSVRIYQYRRPVDSYDIPKTEEASSGFLPGDRNKSRSTTELDDYSTNKNGNNKYLDQIGNMTSSQRRSKKEQVPSGAELERQQILQEMRKRTPLHNDNSWIRQRSASVNKEPVSLPGIMRRGESLDNLDSPRSNSWRQPPWLNQPTGFYASSSVQDFSRPPPQLVSTSNRAYMRNPSSSVPPPSAGSVKTSTTGVATTQSPTPRSHSPSASQSGSQLRNRSVSGKRICSYCNNILGKGAAMIIESLGLCYHLHCFKCVACECDLGGSSSGAEVRIRNHQLYCNDCYLRFKSGRPTAM

SEQ ID NO: 6474 - protein, 272 aa, Homo sapiens
MGSLFPLSLLFFLAAAYPGVGSALGRRTKRAQSPKGSPLAPSGTSVPFWVRMSPEFVAVQPGKSVQLNCSNSCPQPQNSSLRTPLRQGKTLRGPGWVSYQLLDVRAWSSLAHCLVTCAGKTRWATSRITAYSVPGGLLGGDPEAWKPGHLFRKPGALHRPGSGQRDLDLRVCCWTPRLLAARDLPRAPQSRRPGGPQQLGTHYTDARLEPRAHSFGLRFHRCPCRDPPHCGRCVPMQVPSYEVPGVKGDVLCRLSEKKRNMKQSGEMAIHGG

SEQ ID NO: 6475 - protein, 724 aa, Homo sapiens
MLRTSTPNLCGGLHCRAPWLSSGILCLCLIFLLGQVGLLQGHPQCLDYGPPFQPPLHLEFCSDYESFGCCDQHKDRRIAARYWDIMEYFDLKRHELCGDYIKDILCQECSPYAAHLYDAENTQTPLRNLPGLCSDYCSAFHSNCHSAISLLTNDRGLQESHGRDGTRFCHLLDLPDKDYCFPNVLRNDYLNRHLGMVAQDPQGCLQLCLSEVANGLRNPVSMVHAGDGTHRFFVAEQVGVVWVYLPDGSRLEQPFLDLKNIVLTTPWIGDERGFLGLAFHPKFRHNRKFYIYYSCLDKKKVEKIRISEMKVSRADPNKADLKSERVILEIEEPASNHNGGQLLFGLDGYMYIFTGDGGQAGDPFGLFGNAQNKSSLLGKVLRIDVNRAGSHGKRYRVPSDNPFVSEPGAHPAIYAYGIRNMWRCAVDRGDPITRQGRGRIFCGDVGQNRFEEVDLILKGGNYGWRAKEGFACYDKKLCHNASLDDVLPIYAYGHAVGKSVTGGYVYRGCESPNLNGLYIFGDFMSGRLMALQEDRKNKKWKKQDLCLGSTTSCAFPGLISTHSKFIISFAEDEAGELYFLATSYPSAYAPRGSIYKFVDPSRRAPPGKCKYKPVPVRTKSKRIPFRPLAKTVLDLLKEQSEKAARKSSSATLASGPAQGLSEKGSSKKLASPTSSKNTLRGPGTKKKARVGPHVRQGKRRKSLKSHSGRMRPSAEQKRAGRSLP

SEQ ID NO: 6476 - protein, 685 aa, Homo sapiens [sequence omitted]

SEQ ID NO: 6477 - protein, 799 aa, Homo sapiens
MNLGKELSNETHVSNDQQSATVSDGELTGADLKDCVSNNSLSSNASLPSVQSCRRLRERRVASWAVSFERLLQDPVGVRYFSDFLRKEFSEENILFWQACEYFNHVPAHDKKELSYRAREIFSKFLCSKATTPVNIDSQAQLADDVLRAPHPDMFKEQQLQIFNLMKFDSYTRFLKSPLYQECILAEVEGRALPDSQQVPSSPASKHSLGSDHSSVSTPKKLSGKSKSGRSLNEELGDEDSEKKRKGAFFSWSRTRSTGRSQKKREHGDHADDALHANGGLCRRESQGSVSSAGSLDLSEACRTLAPEKDKATKHCCIHLPDGTSCVVAVKAGFSIKDILSGLCERHGINGAAADLFLVGGDKPLVLHQDSSILESRDLRLEKRTLFRLDLVPINRSVGLKAKPTKPVTEVLRPVVARYGLDLSGLLVRLSGEKEPLDLGAPISSLDGQRVVLEEKDPSRGKASADKQKGVPVKQNTAVNSSSRNHSATGEERTLGKSNSIKIKGENGKNARDPRLSKREESIAKIGKKKYQKINLDEAEEFFELISKAQSNRADDQRGLLRKEDLVLPEFLRLPPGSTELTLPTPAAVAKGFSKRSATGNGRESASQPGEQWEPVQESSDSPSTSPGSASSPPGPPGTTPPGQKSPSGPFCTPQSPVSLAQEGTAQIWKRQSQEVEAGGIQTVEDEHVAELTLMGEGDISSPNSTLLPPPSTPQEVPGPSRPGSGTHGSRDLPVNRIIDVDLVTGSAPGRDGGIAGAQAGPGRSQASGGPPTSDLPGLGPVPGEPAKPKTSAHHATFV

SEQ ID NO: 6478 - protein, 1308 aa, Homo sapiens
MDPSGSRGRPTWVLAGGLLAVALALGGRGCLGASSRPRWRPLGAQPPRDPQVAPRSGPGLRIPPGRSGAGPESSTQDLPCMIWPKVECCHFKTAVEAPLGMKLDKKMEVFIPLSTSAASSGPWAHSLFAFIPSWPKKNLFKRESPITHRLYGDISREVQGTSENGVIFQKCALVSGSSEAQTARIWLLVNNTKTTSSANLSELLLLDSIAGLTIWDSVGNRTSEGFQAFSKKFLQVGDAFAVSYAATLQAGDLGNGESLKLPAQLTFQSSSRNRTQLKVLFSITAEENVTVLPHHGLHAAGFFIAFLLSLVLTWAALFLMVRYQCLKGNMLTRHRVWQYESKLEPLPFTSADGVNEDLSLNDQMIDILSSEDPGSMLQALEELEIATLNRADADLEACRTQISKDIIALLLKNLTSSGHLSPQVERKMSAVFKKQFLLLENEIQEEYDRKMVALTAECDLETRKKMENQYQREMMAMEEAEELLKRAGERSAVECSNLLRTLHGLEQEHLRKSLALQQEEDFAKAHRQLAVFQRNELHSIFFTQIKSAIFKGELKPEAAKMLLQNYSKIQENVEELMDFFQASKRYHLSKRFGHREYLVQNLQSSETRVQGLLSTAAAQLTHLIQKHERAGYLDEDQMEMLLERAQTEVFSIKQKLDNDLKQEKKKLHQKLITKRRRELLQKHREQRREQASVGEAFRTVEDAGQYLHQKRSLMEEHGATLEELQERLDQAALDDLRTLTLSLFEKATDELRRLQNSAMTQELLKRGVPWLFLQQILEEHGKEMAARAEQLEGEERDRDQEGVQSVRQRLKDDAPEAVTEEQAELRRWEHLIFMKLCSSVFSLSEEELLRMRQEVHGCFAQMDRSLALPKIRARVLLQQFQTAWREAEFVKLDQAVAAPELQQQSKVRKSRSKSKSKGELLKKCIEDKIHLCEEQASEDLVEKVRGELLRERVQRMEAQEGGFAQSLVALQFQKASRVTETLSAYTALLSIQDLLLEELSASEMLTKSACTQILESHSRELQELERKLEDQLVQQEAAQQQQALASWQQWVADGPGILNEPGEVDSERQVSTVLHQALSKSQTLLEQHQQCLREEQQNSVVLEDLLENMEADTFATLCSQELRLASYLARMAMVPGATLRRLLSVVLPTASQPQLLALLDSATERHVDHAAESDGGAEQADVGRRRKHQSWWQALDGKLRGDLISRGLEKMLWARKRKQSILKKTCLPLRERMIFSGKGSWPHLSLEPIGELAPVPIVGAETIDLLNTGEKLFIFRNPKEPEISLHVPPRKKKNFLNAKKAMRALGMD

SEQ ID NO: 6479 - protein, 1017 aa, Homo sapiens
MLNAKPEDVHVQSPLSKFRSSERWTLPLQWERSLRNKVISLDHKNKKHIRGCPVTSKSSPERQLKVMLTNVLWTDLGRKFRKTLPRNDANLCDANKVQSDSLPSTSVDSLETCQKLEPLRQSLNLSERIPRVILTNVLGTELGRKYIRTPPVTEGSLSDTDNLQSEQLSSSSDGSLESYQNLNPHKSCYLSERGSQRSKTVDDNSAKQTAHNKEKRRKDDGISLLISDTQPEDLNSGSRGCDHLEQESRNKDVKYSDSKVELTLISRKTKRRLRNNLPDSQYCTSLDKSTEQTKKQEDDSTISTEFEKPSENYHQDPKLPEEITTKPTKSDFTKLSSLNSQELTLSNATKSASAGSTTETVENSNSIDIVGISSLVEKDENELNTIEKPILRGHNEGNQSLISAEPIVVSSDEEGPVEHKSSEILKLQSKQDRETTNENESTSESALLELPLITCESVQMSSELCPYNPVMENISSIMPSNEMDLQLDFIFTSVYIGKIKGASKGCVTITKKYIKIPFQVSLNEISLLVDTTHLKRFGLWKSKDDNHSKRSHAILFFWVSSDYLQEIQTQLEHSVLSQQSKSSEFIFLELHNPVSQREELKLKDIMTEISIISGELELSYPLSWVQAFPLFQNLSSKESSFIHYYCVSTCSFPAGVAVAEEMKLKSVSQPSNTDAAKPTYTFLQKQSSGCYSLSITSNPDEEWREVRHTGLVQKLIVYPPPPTKGGLGVTNEDLECLEEGEFLNDVIIDFYLKYLILEKASDELVERSHIFSSFFYKCLTRKENNLTEDNPNLSMAQRRHKRVRTWTRHINIFNKDYIFVPVNESSHWYLAVICFPWLEEAVYEDFPQTVSQQSQAQQSQNDNKTIDNDLRTTSTLSLSAEDSQSTESNMSVPKKMCKRPCILILDSLKAASVQNTVQNLREYLEVEWEVKLKTHRQFSKTNMVDLCPKVPKQDNSSDCGVYLLQYVESFFKDPIVNFELPIHLEKWFPRHVIKTKREDIRELILKLHLQQQKGSSS

SEQ ID NO: 6480 - protein, 270 aa, Homo sapiens
RHSTTCFAVPCSVPSSTFFTCRDSRDQQKDMPPLLFEVSSLENAFQIGGHPWHYIVTPNKKKQKGVFHICALKDNSLAKNGIQEMDCCSLESDWIYFHPDASGRIIHVGPNQVKVLKLTEIENNSSQHQISEDFVILANRENHKNENVLTVTASGRVVKKSFNLLDDDPEQETFKIVDYEDELDLLSVVAVTQIDAEGKAHLDFHCNEYGTLLKSIPLVESWDVTYSHEVYFDRDLVLHIEQKPNRVFSCYVYQMICDTGEEEETINRSC

SEQ ID NO: 6481 - protein, 391 aa, Homo sapiens
MAGRSLCLTRSSVPGTPFPPPVQQPSTPGPDLLALEEEYKRLNAELQAKTADVVQQAKEIIRDRQEVRSRPVSTQMKSCDDEDDYSLRGLLPSEGIVHLHSETKPKTKNIDPVNKVQNKLHSANKGRKTNSSVKLKYSDVQTADDVAIPEDFSDFSLAKTISKIEGQLEEEGLPEYIDDIFSGVSNDIGTEAQIRFLKAKLHVMQEELDNVVCECNKKEDEIQNLKSQVKNFEEDFMRQQRTINMQQSQVEKYKTLFEEANKKYDGLQQQLSSVERELENKRRLQKQAASSQSATEVRLNRALEEAEKYKLELSKLRQNNKDIANEEHKKIEVLKSENKKLEKQKGELMIGFKKQLKLIDVLKRQKMHIEAAKMLSFTEEEFMKALEWGNS

SEQ ID NO: 6482 - protein, 560 aa, Homo sapiens
MSKDIKSVEHSPKIHQRNDPQHVNDRTFFIDASNQSLTAIPLEIFTFTELEEVHLENNQIEEIPQEIQRLKNIRVLYLDKNNLRSLCPALGLLSSLESLDLSYNPIFSSSLVVVSFLHALRELRLYQTDLKEIPVVIFKNLHHLELLGLTGNHLKCLPKEIVNQTKLREIYLKRNQFEVFPQELCVLYTLEIIDLDENKIGAIPEEIGHLTGLQKFYMASNNLPVLPASLCQCSQLSVLDLSHNLLHSIPKSFAELRKMTEIGLSGNRLEKVPRLICRWTSLHLLYLGNTGLHRLRGSFRCLVNLRFLDLSQNHLHHCPLQICALKNLEVLGLDDNKIGQLPSELGSLSKLKILGLTGNEFLSFPEEVLSLASLEKLYIGQDQGFKLTYVPEHIRKLQSLKELYIENNHLEYLPVSLGSMPNLEVLDCRHNLLKQLPDAICQAQALKELRLEDNLLTHLPENLDSLVNLKVLTLMDNPMEEPPKEVCAEGNEAIWKYLKENRNRNIMATKIQAWWRGTMVQRGFGKFGELLKPQKKGKTSPKDKKGKKDVKGKPGKGKKK

SEQ ID NO: 6483 - protein, 428 aa, Homo sapiens
MYSSPLCLTQDEFHPFIEALLPHVRAFAYTWFNLQARKRKYFKKHEKRMSKDEERAVKDELLGEKPEVKQKWASRLLAKLRKDIRPECREDFVLSITGKKAPGCVLSNPDQKGKMRRIDCLRQADKVWRLDLVMVILFKGIPLESTDGERLVKAAQCGHPVLCVQPHHIGVAVKELDLYLAYFVRERDAEQSGSPRTGMGSDQEDSKPITLDTTDFQESFVTSGVFSVTELIQVSRTPVVTGTGPNFSLGELQGHLAYDLNPASTGLRRTLPSTSSSGSKRHKSGSMEEDVDTSPGGDYYTSPSSPTSSSRNWTEDMEGGISSPVKKTEMDKSPFNSPSPQDSPRLSSFTQHHRPVIAVHSGIARSPHPSSALHFPTTSILPQTASTYFPHTAIRYPPHLNPQDPLKDLVSLACDPASQQPGPSWYLG

SEQ ID NO: 6484 - protein, 500 aa, Homo sapiens
MALMLSLVLSLLKLGSGQWQVFGPDKPVQALVGEDAAFSCFLSPKTNAEAMEVRFFRGQFSSVVHLYRDGKDQPFMQMPQYQGRTKLVKDSIAEGRISLRLENITVLDAGLYGCRISSQSYYQKAIWELQVSALGSVPLISITGYVDRDIQLLCQSSGWFPRPTAKWKGPQGQDLSTDSRTNRDMHGLFDVEISLTVQENAGSISCSMRHAHLSREVESRVQIGDTFFEPISWHLATKVLGILCCGLFFGIVGLKIFFSKFQWKIQAELDWRRKHGQAELRDARKHAVEVTLDPETAHPKLCVSDLKTVTHRKAPQEVPHSEKRFTRKSVVASQSFQAGKHYWEVDGGHNKRWRVGVCRDDVDRRKEYVTLSPDHGYWVLRLNGEHLYFTLNPRFISVFPRTPPTKIGVFLDYECGTISFFNINDQSLIYTLTCRFEGLLRPYIEYPSYNEQNGTPIVICPVTQESEKEASWQRASAIPETSNSESSSQATTPFLPRGEM

SEQ ID NO: 6485 - protein, 941 aa, Homo sapiens
MAEANPRRGKMRFRRNAASFPGNLHLVLVLRPTSFLQRTFTDIGFWFSQEDFMLKLPVVMLSSVSDLLTYIDDKQLTPELGGTLQYCHSEWIIFRNAIENFALTVKEMAQMLQSFGTELAETELPDDIPSIEEILAIRAERYHLLKNDITAVTKEGKILLTNLEVPDTEGAVSSRLECHRQISGDWQTINKLLTQVHDMETAFDGFWEKHQLKMEQYLQLWKFEQDFQQLVTEVEFLLNQQAELADVTGTIAQVKQKIKKLENLDENSQELLSKAQFVILHGHKLAANHHYALDLICQRCNELRYLSDILVNEIKAKRIQLSRTFKMHKLLQQARQCCDEGECLLANQEIDKFQSKEDAQKALQDIENFLEMALPFINYEPETLQYEFDVILSPELKVQMKTIQLKLENIRSIFENQQAGFRNLADKHVRPIQFVVPTPENLVTSGTPFFSSKQVGVGYSFFQACKLFSKGKKTWRQNQSNLKIEVVPDCQEKRSSGPSSSLDNGNSLDVLKNHVLNELIQTERVYVRELYTVLLGYRAEMDNPEMFDLMPPLLRNKKDILFGNMAEIYEFHNDIFLSSLENCAHAPERVGPCFLERKDDFQMYAKYCQNKPRSETIWRKYSECAFFQECQRKLKHRLRLDSYLLKPVQRITKYQLLLKELLKYSKDCEGSALLKKALDAMLDLLKSVNDSMHQIAINGYIGNLNELGKMIMQGGFSVWIGHKKGATKMKDLARFKPMQRHLFLYEKAIVFCKRRVESGEGSDRYPSYSFKHCWKMDEVGITEYVKGDNRKFEIWYGEKEEVYIVQASNVDVKMTWLKEIRNILLKQQELLTVKKRKQQDQLTERDKFQISLQQNDEKQQGAFISTEETELEHTSTVVEVCEAIASVQAEANTVWTEASQSAEISEEPAEWSSNYFYPTYDENEEENRPLMRPVSEMALLY

SEQ ID NO: 6486 - protein, 450 aa, Homo sapiens
MDPGNENSATEAAAIIDLDPDFEPQSRPRSCTWPLPRPEIANQPSEPPEVEPDLGEKAIESAPEKRLTLAQIYEWMVRTVPYFKDKGDSNSSAGWKNSIRHNLSLHSKFIKVHNEATGKSSWWMLNPEGGKSGKAPRRRAASMDSSSKLLRGRSKAPKKKPSVLPAPPEGATPTSPVGHFAKWSGSPCSRNREEADMWTTFRPRSSSNASSVSTRLSPLRPESEVLAEEIPASVSSYAGGVPPTLNEGLELLDGLNLTSSHSLLSRSGLSGFSLQHPGVTGPLHTYSSSLFSPAEGPLSAGEGCFSSSQALEALLTSDTPPPPADVLMTQVDPILSQAPTLLLLGGLPSSSKLATGVGLCPKPLEAPGPSSLVPTLSMIAPPPVMASAPIPKALGTPVLTPPTEAASQDRMPQDLDLDMYMENLECDMDNIISDLMDEGEGLDFNFEPDP

SEQ ID NO: 6487 - protein, 2542 aa, Homo sapiens
MGISTVILEMCLLWGQVLSTGGWIPRTTDYASLIPSEVPLDPTVAEGSPFPSESTLESTVAEGSPISLESTLESTVAEGSLIPSESTLESTVAEGSDSGLALRLVNGDGRCQGRVEILYRGSWGTVCDDSWDTNDANVVCRQLGCGWAMSAPGNAWFGQGSGPIALDDVRCSGHESYLWSCPHNGWLSHNCGHGEDAGVICSAAQPQSTLRPESWPVRISPPVPTEGSESSLALRLVNGGDRCRGRVEVLYRGSWGTVCDDYWDTNDANVVCRQLGCGWAMSAPGNAQFGQGSGPIVLDDVRCSGHESYLWSCPHNGWLTHNCGHSEDAGVICSAPQSRPTPSPDTWPTSHASTAGPESSLALRLVNGGDRCQGRVEVLYRGSWGTVCDDSWDTSDANVVCRQLGCGWATSAPGNARFGQGSGPIVLDDVRCSGYESYLWSCPHNGWLSHNCQHSEDAGVICSAAHSWSTPSPDTLPTITLPASTVGSESSLALRLVNGGDRCQGRVEVLYRGSWGTVCDDSWDTNDANVVCRQLGCGWAMLAPGNARFGQGSGPIVLDDVRCSGNESYLWSCPHNGWLSHNCGHSEDAGVICSGPESSLALRLVNGGDRCQGRVEVLYRGSWGTVCDDSWDTNDANVVCRQLGCGWATSAPGNARFGQGSGPIVLDDVRCSGHESYLWSCPNNGWLSHNCGHHEDAGVICSAAQSRSTPRPDTLSTITLPPSTVGSESSLTLRLVNGSDRCQGRVEVLYRGSWGTVCDDSWDTNDANVVCRQLGCGWATSAPGNARFGQGSGPIVLDDVRCSGHESYLWSCPHNGWLSHNCGHHEDAGVICSVSQSRPTPSPDTWPTSHASTAGPESSLALRLVNGGDRCQGRVEVLYRGSWGTVCDDSWDTSDANVVCRQLGCGWATSAPGNARFGQGSGPIVLDDVRCSGYESYLWSCPHNGWLSHNCQHSEDAGVICSAAHSWSTPSPDTLPTITLPASTVGSESSLALRLVNGGDRCQGRVEVLYQGSWGTVCDDSWDTNDANVVCRQLGCGWAMSAPGNARFGQGSGPIVLDDVRCSGHESYLWSCPHNGWLSHNCGHSEDAGVICSASQSRPTPSPDTWPTSHASTAGSESSLALRLVNGGDRCQGRVEVLYRGSWGTVCDDYWDTNDANVVCRQLGCGWAMSAPGNARFGQGSGPIVLDDVRCSGHESYLWSCPHNGWLSHNCGHHEDAGVICSASQSQPTPSPDTWPTSHASTAGSESSLALRLVNGGDRCQGRVEVLYRGSWGTVCDDYWDTNDANVVCRQLGCGWATSAPGNARFGQGSGPIVLDDVRCSGHESYLWSCPHNGWLSHNCGHHEDAGVICSASQSQPTPSPDTWPTSHASTAGSESSLALRLVNGGDRCQGRVEVLYRGSWGTVCDDYWDTNDANVVCRQLGCGWATSAPGNARFGQGSGPIVLDDVRCSGHESYLWSCPHNGWLSHNCGHHEDAGVICSASQSQPTPSPDTWPTSHASTAGSESSLALRLVNGGDRCQGRVEVLYRGSWGTVCDDYWDTNDANVVCRQLGCGWATSAPGNARFGQGSGPIVLDDVRCSGHESYLWSCPHNGWLSHNCGHHEDAGVICSASQSQPTPSPDTWPTSRASTAGSESTLALRLVNGGDRCRGRVEVLYQGSWGTVCDDYWDTNDANVVCRQLGCGWAMSAPGNAQFGQGSGPIVLDDVRCSGHESYLWSCPHNGWLSHNCGHHEDAGVICSAAQSQSTPRPDTWLTTNLPALTVGSESSLALRLVNGGDRCRGRVEVLYRGSWGTVCDDSWDTNDANVVCRQLGCGWAMSAPGNARFGQGSGPIVLDDVRCSGNESYLWSCPHKGWLTHNCGHHEDAGVICSATQINSTTTDWWHPTTTTTARPSSNCGGFLFYASGTFSSPSYPAYYPNNAKCVWEIEVNSGYRINLGFSNLKLEAHHNCSFDYVEIFDGSLNSSLLLGKICNDTRQIFTSSYNRMTIHFRSDISFQNTGFLAWYNSFPSDATLRLVNLNSSYGLCAGRVEIYHGGTWGTVCDDSWTIQEAEVVCRQLGCGRAVSALGNAYFGSGSGPITLDDVECSGTESTLWQCRNRGWFSHNCNHREDAGVICSGNHLSTPAPFLNITRPNTDYSCGGFLSQPSGDFSSPFYPGNYPNNAKCVWDIEVQNNYRVTVIFRDVQLEGGCNYDYIEVFDGPYRSSPLIARVCDGARGSFTSSSNFMSIRFISDHSITRRGFRAEYYSSPSNDSTNLLCLPNHMQASVSRSYLQSLGFSASDLVISTWNGYYECRPQITPNLVIFTIPYSGCGTFKQADNDTIDYSNFLTAAVSGGIIKRRTDLRIHVSCRMLQNTWVDTMYIANDTIHVANNTIQVEEVQYGNFDVNISFYTSSSFLYPVTSRPYYVDLNQDLYVQAEILHSDAVLTLFVDTCVASPYSNDFTSLTYDLIRSGCVRDDTYGPYSSPSLRIARFRFRAFHFLNRFPSVYLRCKMVVCRAYDPSSRCYRGCVLRSKRDVGSYQEKVDVVLGPIQLQTPPRREEEPR

SEQ ID NO: 6488 - protein, 566 aa, Homo sapiens
MERAAPSRRVPLPLLLLGGLALLAAGVDADVLLEACCADGHRMATHQKDCSLPYATESKECRMVQEQCCHSQLEELHCATGISLANEQDRCATPHGDNASLEATFVKRCCHCCLLGRAAQAQGQSCEYSLMVGYQCGQVFQACCVKSQETGDLDVGGLQETDKIIEVEEEQEDPYLNDRCRGGGPCKQQCRDTGDEVVCSCFVGYQLLSDGVSCEDVNECITGSHSCRLGESCINTVGSFRCQRDSSCGTGYELTEDNSCKDIDECESGIHNCLPDFICQNTLGSFRCRPKLQCKSGFIQDALGNCIDINECLSISAPCPIGHTCINTEGSYTCQKNVPNCGRGYHLNEEGTRCVDVDECAPPAEPCGKGHRCVNSPGSFRCECKTGYYFDGISRMCVDVNECQRYPGRLCGHKCENTLGSYLCSCSVGFRLSVDGRSCEDINECSSSPCSQECANVYGSYQCYCRRGYQLSDVDGVTCEDIDECALPTGGHICSYRCINIPGSFQCSCPSSGYRLAPNGRNCQDIDECVTGIHNCSINETCFNIQGGFRCLAFECPENYRRSAAT

SEQ ID NO: 6489 - protein, 1624 aa, Homo sapiens
MSKRRMSVGQQTWALLCKNCLKKWRMKRQTLLEWLFSFLLVLFLYLFFSNLHQVHDTPQMSSMDLGRVDSFNDTNYVIAFAPESKTTQEIMNKVASAPFLKGRTIMGWPDEKSMDELDLNYSIDAVRVIFTDTFSYHLKFSWGHRIPMMKEHRDHSAHCQAVNEKMKCEGSEFWEKGFVAFQAAINAAIIEIATNHSVMEQLMSVTGVHMKILPFVAQGGVATDFFIFFCIISFSTFIYYVSVNVTQERQYITSLMTMMGLRESAFWLSWGLMYAGFILIMATLMALIVKSAQIVVLTGFVMVFTLFLLYGLSLITLAFLMSVLIKKPFLTGLVVFLLIVFWGILGFPALYTRLPAFLEWTLCLLSPFAFTVGMAQLIHLDYDVNSNAHLDSSQNPYLIIATLFMLVFDTLLYLVLTLYFDKILPAEYGHRCSPLFFLKSCFWFQHGRANHVVLENETDSDPTPNDCFEPVSPEFCGKEAIRIKNLKKEYAGKCERVEALKGVVFDIYEGQITALLGHSGAGKTTLLNILSGLSVPTSGSVTVYNHTLSRMADIENISKFTGFCPQSNVQFGFLTVKENLRLFAKIKGILPHEVEKEVQRVVQELEMENIQDILAQNLSGGQNRKLTFGIAILGDPQVLLLDEPTAGLDPLSRHRIWNLLKEGKSDRVILFSTQFIDEADILADRKVFISNGKLKCAGSSLFLKKKWGIGYHLSLHLNERCDPESITSLVKQHISDAKLTAQSEEKLVYILPLERTNKFPELYRDLDRCSNQGIEDYGVSITTLNEVFLKLEGKSTIDESDIGIWGQLQTDGAKDIGSLVELEQVLSSFHETRKTISGVALWRQQVCAIAKVRFLKLKKERKSLWTILLLFGISFIPQLLEHLFYESYQKSYPWELSPNTYFLSPGQQPQDPLTHLLVINKTGSTIDNFLHSLRRQNIAIEVDAFGTRNGTDDPSYNGAIIVSGDEKDHRFSIACNTKRLNCFPVLLDVISNGLLGIFNSSEHIQTDRSTFFEEHMDYEYGYRSNTFFWIPMAASFTPYIAMSSIGDYKKKAHSQLRISGLYPSAYWFGQALVDVSLYFLILLLMQIMDYIFSPEEIIFIIQNLLIQILCSIGYVSSLVFLTYVISFIFRNGRKNSGIWSFFFLIVVIFSIVATDLNEYGFLGLFFGTMLIPPFTLIGSLFIFSEISPDSMDYLGASESEIVYLALLIPYLHFLIFLFILRCLEMNCRKKLMRKDPVFRISPRSNAIFPNPEEPEGEEEDIQMERMRTVNAMAVRDFDETPVIIASCLRKEYAGKKKNCFSKRKKKIATRNVSFCVKKGEVIGLLGHNGAGKSTTIKMITGDTKPTAGQVILKGSGGGEPLGFLGYCPQENALWPNLTVRQHLEVYAAVKGLRKGDAMIAITRLVDALKLQDQLKAPVKTLSEGIKRKLCFVLSILGNPSVVLLDEPSTGMDPEGQQQMWQVIRATFRNTERGALLTTHYMAEAEAVCDRVAIMVSGRLRCIGSIQHLKSKFGKDYLLEMKLKNLAQMEPLHAEILRLFPQAAQQERFSSLMVYKLPVEDVRPLSQAFFKLEIVKQSFDLEEYSLSQSTLEQVFLELSKEQELGDLEEDFDPSVKWKLLLQEEP

SEQ ID NO: 6490 - protein, 764 aa, Homo sapiens
MTSPSSSPVFRLETLDGGQEDGSEADRGKLDFGSGLPPMESQFQGEDRKFAPQIRVNLNYRKGTGASQPDPNRFDRDRLFNAVSRGVPEDLAGLPEYLSKTSKYLTDSEYTEGSTGKTCLMKAVLNLKDGVNACILPLLQIDRDSGNPQPLVNAQCTDDYYRGHSALHIAIEKRSLQCVKLLVENGANVHARACGRFFQKGQGTCFYFGELPLSLAACTKQWDVVSYLLENPHQPASLQATDSQGNTVLHALVMISDNSAENIALVTSMYDGLLQAGARLCPTVQLEDIRNLQDLTPLKLAAKEGKIEIFRHILQREFSGLSHLSRKFTEWCYGPVRVSLYDLASVDSCEENSVLEIIAFHCKSPHRHRMVVLEPLNKLLQAKWDLLIPKFFLNFLCNLIYMFIFTAVAYHQPTLKKQAAPHLKAEVGNSMLLTGHILILLGGIYLLVGQLWYFWRRHVFIWISFIDSYFEILFLFQALLTVVSQVLCFLAIEWYLPLLVSALVLGWLNLLYYTRGFQHTGIYSVMIQKVILRDLLRFLLIYLVFLFGFAVALVSLSQEAWRPEAPTGPNATESVQPMEGQEDEGNGAQYRGILEASLELFKFTIGMGELAFQEQLHFRGMVLLLLLAYVLLTYILLLNMLIALMSETVNSVATDSWSIWKLQKAISVLEMENGYWWCRKKQRAGVMLTVGTKPDGSPDERWCFRVEEVNWASWEQTLPTLCEDPSGAGVPRTLENPVLASPPKEDEDGASEENYVPVQLLQSN

SEQ ID NO: 6491 - protein, 753 aa, Homo sapiens
MAASAAAASAAAASAASGSPGPGEGSAGGEKRSTAPSAAASASASAAASSPAGGGAEALELLEHCGVCRERLRPEREPRLLPCLHSACSACLGPAAPAAANSSGDGGAAGDGTGPAKSRDGERTVYCNVHKHEPLVLFCESCDTLTCRDCQLNAHKDHQYQFLEDAVRNQRKLLASLVKRLGDKHATLQKSTKEVRSSIRQVSDVQKRVQVDVKMAILQIMKELNKRGRVLVNDAQKVTEGQQERLERQHWTMTKIQKHQEHILRFASWALESDNNTALLLSKKLIYFQLHRALKMIVDPVEPHGEMKFQWDLNAWTKSAEAFGKIVAERPGTNSTGPAPMAPPRAPGPLSKQGSGSSQPMEVQEGYGFGSGDDPYSSAEPHVSGVKRSRSGEGEVSGLMRKVPRVSLERLDLDLTADSQPPVFKVFPGSTTEDYNLIVIERGAAAAATGQPGTAPAGTPGAPPLAGMAIVKEEETEAAIGAPPTATEGPETKPVLMALAEGPGAEGPRLASPSGSTSSGLEVVAPEGTSAPGGGPGTLDDSATICRVCQKPGDLVMCNQCEFCFHLDCHLPALQDVPGEEWSCSLCHVLPDLKEEDGSLSLDGADSTGVVAKLSPANQRKCERVLLALFCHEPCRPLHQLATDSTFSLDQPGGTLDLTLIRARLQEKLSPPYSSPQEFAQDVGRMFKQFNKLTEDKADVQSIIGLQRFFETRMNEAFGDTKFSAVLVEPPPMSLPGAGLSSQELSGGPGDGP

SEQ ID NO: 6492 - protein, 1308 aa, Homo sapiens
MKPATGLWVWVSLLVAAGTVQPSDSQSVCAGTENKLSSLSDLEQQYRALRKYYENCEVVMGNLEITSIEHNRDLSFLRSVREVTGYVLVALNQFRYLPLENLRIIRGTKLYEDRYALAIFLNYRKDGNFGLQELGLKNLTEILNGGVYVDQNKFLCYADTIHWQDIVRNPWPSNLTLVSTNGSSGCGRCHKSCTGRCWGPTENHCQTLTRTVCAEQCDGRCYGPYVSDCCHRECAGGCSGPKDTDCFACMNFNDSGACVTQCPQTFVYNPTTFQLEHNFNAKYTYGAFCVKKCPHNFVVDSSSCVRACPSSKMEVEENGIKMCKPCTDICPKACDGIGTGSLMSAQTVDSSNIDKFINCTKINGNLIFLVTGIHGDPYNAIEAIDPEKLNVFRTVREITGFLNIQSWPPNMTDFSVFSNLVTIGGRVLYSGLSLLILKQQGITSLQFQSLKEISAGNIYITDNSNLCYYHTINWTTLFSTINQRIVIRDNRKAENCTAEGMVCNHLCSSDGCWGPGPDQCLSCRRFSRGRICIESCNLYDGEFREFENGSICVECDPQCEKMEDGLLTCHGPGPDNCTKCSHFKDGPNCVEKCPDGLQGANSFIFKYADPDRECHPCHPNCTQGCNGPTSHDCIYYPWTGHSTLPQHARTPLIAAGVIGGLFILVIVGLTFAVYVRRKSIKKKRALRRFLETELVEPLTPSGTAPNQAQLRILKETELKRVKVLGSGAFGTVYKGIWVPEGETVKIPVAIKILNETTGPKANVEFMDEALIMASMDHPHLVRLLGVCLSPTIQLVTQLMPHGCLLEYVHEHKDNIGSQLLLNWCVQIAKGMMYLEERRLVHRDLAARNVLVKSPNHVKITDFGLARLLEGDEKEYNADGGKMPIKWMALECIHYRKFTHQSDVWSYGVTIWELMTFGGKPYDGIPTREIPDLLEKGERLPQPPICTIDVYMVMVKCWMIDADSRPKFKELAAEFSRMARDPQRYLVIQGDDRMKLPSPNDSKFFQNLLDEEDLEDMMDAEEYLVPQAFNIPPPIYTSRARIDSNRSEIGHSPPPAYTPMSGNQFVYRDGGFAAEQGVSVPYRAPTSTIPEAPVAQGATAEIFDDSCCNGTLRKPVAPHVQEDSSTQRYSADPTVFAPERSPRGELDEEGYMTPMRDKPKQEYLNPVEENPFVSRRKNGDLQALDNPEYHNASNGPPKAEDEYVNEPLYLNTFANTLGKAEYLKNNILSMPEKAKKAFDNPDYWNHSLPPRSTLQHPDYLQEYSTKYFYKQNGRIRPIVAENPEYLSEFSLKPGTVLPPPPYRHRNTVV

SEQ ID NO: 6493 - protein, 108 aa, Homo sapiens
MSWRGRRYRPRRCLRLAQLVGPMLEPSVPEPQQEEPPTESQDHTPGQKREDDQGAAEIQVPNLEADLQELSQSKTGDECGDSPDVQGKILPKSEQFKMPEGGEGKPQL

SEQ ID NO: 6494 - protein, 317 aa, Homo sapiens
MQEGELAISPISPVAAMPPLGTHVQARCEAQINLLGEGGICKLPGRLRIQPALWSREDVLHWLRWAEQEYSLPCTAEHGFEMNGRALCILTKDDFRHRAPSSGDVLYELLQYIKTQRRALVCGPFFGGIFRLKTPTQHSPVPPEEVTGPSQMDTRRGHLLQPPDPGLTSNFGHLDDPGLARWTPGKEESLNLCHCAELGCRTQGVCSFPAMPQAPIDGRIADCRLLWDYVYQLLLDTRYEPYIKWEDKDAKIFRVVDPNGLARLWGNHKNRVNMTYEKMSRALRHYYKLNIIKKEPGQKLLFRNGLQLIFIFIWSFQ

SEQ ID NO: 6495 - protein, 614 aa, Homo sapiens
MMRQATMDFSTPSVFDQQRGDSSEEVDLTMVYQAASNGDVNALTAVIREDPSILECCDSEGCTPLMHAVSGRQADTVKLLLKMGANINMQDAYGRTSLCLATYLGWLEGCVSLLRNGAKHNIPDKNGRLPLHAATAEPDMRLLTVLLQQSNISEINHQDNEGMTPLHWAAFHNQPQHTQMLLKKGADPTLVDKDFKTALHWAVQSGNRILCSIILSHHQGPSIINYDDESGKTCVHIAAAAGFSDIIHELARVPECNLQALDVDDRTPLHWAAAAGKAECVQSLLELGMDSNLRDINESTPLAYALYCGHTACVKLLSQESRTEPTRPPPSQSSRPQKKERRFNVLNQIFCKNKKEEQRAHQKDPSRDRYREEDTSEVNDIITTFDSIVGTNCQEQPGDQVAMVEFKKKTSDNSKYLLPEKKPLARKGLPPIRTQSLPPITLGNNFLTASHRATSHAGLSSAPHHMAQRSQKSRSEQDLLNNRTGCQMLLDNPWKSDSNQVFSYKVWTVSSSDKLLDRLLSVRPGHQEVSVPPHLRHLHNPSSGQNFQHLSPNRHKIRDLPFTRNNLAPLPDQKFLSGEPLRTNRVLPAIPSQRRHSTAAEESEHSANPTSDEN

SEQ ID NO: 6496 - protein, 251 aa, Homo sapiens
MIYTMKKVHALWASVCLLLNLAPAPLNADSEEDEEHTIITDTELPPLKLMHSFCAFKADDGPCKAIMKRFFFNIFTRQCEEFIYGGCEGNQNRFESLEECKKMCTRDNANRIIKTTLQQEKPDFCFLEEDPGICRGYITRYFYNNQTKQCERFKYGGCLGNMNNFETLEECKNICEDGPNGFQVDNYGTQLNAVNNSLTPQSTKVPSLFVTKEGTNDGWKNAAHIYQVFLNAFCIHASMFFLGLDSISCLC

SEQ ID NO: 6497 - protein, 801 aa, Homo sapiens
MKTSPRRPLILKRRRLPLPVQNAPSETSEEEPKRSPAQQESNQAEASKEVAESNSCKFPAGIKIINHPTMPNTQVVAIPNNANIHSIITALTAKGKESGSSGPNKFILISCGGAPTQPPGLRPQTQTSYDAKRTEVTLETLGPKPAARDVNLPRPPGALCEQKRETCADGEAAGCTINNSLSNIQWLRKMSSDGLGSRSIKQEMEEKENCHLEQRQVKVEEPSRPSASWQNSVSERPPYSYMAMIQFAINSTERKRMTLKDIYTWIEDHFPYFKHIAKPGWKNSIRHNLSLHDMFVRETSANGKVSFWTIHPSANRYLTLDQVFKPLDPGSPQLPEHLESQQKRPNPELRRNMTIKTELPLGARRKMKPLLPRVSSYLVPIQFPVNQSLVLQPSVKVPLPLAASLMSSELARHSKRVRIAPKVFGEQVVFGYMSKFFSGDLRDFGTPITSLFNFIFLCLSVLLAEEGIAPLSSAGPGKEEKLLFGEGFSPLLPVQTIKEEEIQPGEEMPHLARPIKVESPPLEEWPSPAPSFKEESSHSWEDSSQSPTPRPKKSYSGLRSPTRCVSEMLVIQHRERRERSRSRRKQHLLPPCVDEPELLFSEGPSTSRWAAELPFPADSSDPASQLSYSQEVGGPFKTPIKETLPISSTPSKSVLPRTPESWRLTPPAKVGGLDFSPVQTSQGASDPLPDPLGLMDLSTTPLQSAPPLESPQRLLSSEPLDLISVPFGNSSPSDIDVPKPGSPEPQVSGLAANRSLTEGLVLDTMNDSLSKILLDISFPGLDEDPLGPDNINWSQFIPELQ

SEQ ID NO: 6498 - protein, 681 aa, Homo sapiens
MSKGILQVHPPICDCPGCRISSPVNRGRLADKRTVALPAARNLKKERTPSFSASDGDSDGSGPTCGRRPGLKQEDGPHIRIMKRRVHTHWDVNISFREASCSQDGNLPTLISSVHRSRHLVMPEHQSRCEFQRGSLEIGLRPAGDLLGKRLGRSPRISSDCFSEKRARSESPQEALLLPRELGPSMAPEDHYRRLVSALSEASTFEDPQRLYHLGLPSHGEDPPWHDPPHHLPSHDLLRVRQEVAAAALRGPSGLEAHLPSSTAGQRRKQGLAQHREGAAPAAAPSFSERELPQPPPLLSPQNAPHVALGPHLRPPFLGVPSALCQTPGYGFLPPAQAEMFAWQQELLRKQNLARLELPADLLRQKELESARPQLLAPETALRPNDGAEELQRRGALLVLNHGAAPLLALPPQGPPGSGPPTPSRDSARRAPRKGGPGPASARPSESKEMTGARLWAQDGSEDEPPKDSDGEDPETAAVGCRGPTPGQAPAGGAGAEGKGLFPGSTLPLGFPYAVSPYFHTGAVGGLSMDGEEAPAPEDVTKWTVDDVCSFVGGLSGCGEYTRVFREQGIDGETLPLLTEEHLLTNMGLKLGPALKIRAQVARRLGRVFYVASFPVALPLQPPTLRAPERELGTGEQPLSPTTATSPYGGGHALAGQTSPKQENGTLALLPGAPDPSQPLC

SEQ ID NO: 6499 - protein, 570 aa, Homo sapiens
MGFLQLLVVAVLASEHRVAGAAEVFGNSSEGLIEFSVGKFRYFELNRPFPEEAILHDISSNVTFLIFQIHSQYQNTTVSFSPTLLSNSSETGTASGLVFILRPEQSTCTWYLGTSGIQPVQNMAILLSYSERDPVPGGCNLEFDLDIDPNIYLEYNFFETTIKFAPANLGYARGVDPPPCDAGTDQDSRWRLQYDVYQYFLPENDLTEEMLLKHLQRMVSVPQVKASALKVVTLTANDKTSVSFSSLPGQGVIYNVIVWDPFLNTSAAYIPAHTYACSFEAGEGSCASLGRVSSKVFFTLFALLGFFICFFGHRFWKTELFFIGFIIMGFFFYILITRLTPIKYDVNLILTAVTGSVGGMFLVAVWWRFGILSICMLCVGLVLGFLISSVTFFTPLGNLKIFHDDGVFWVTFSCIAILIPVVFMGCLRILNILTCGVIGSYSVVLAIDSYWSTSLSYITLNVLKRALNKDFHRAFTNVPFQTNDFIILAVWGMLAVSGITLQIRRERGRPFFPPHPYKLWKQERERRVTNILDPSYHIPPLRERLYGRLTQIKGLFQKEQPAGERTPLLL

SEQ ID NO: 6500 - protein, 173 aa, Homo sapiens
MHWKMLLLLLLYYNAEASMCHRWSRAVLFPAAHRPKRSSSLPLNPVLQTSLEEVELLYEFLLAELEISPDLQISIKDEELASLRKASDFRTVCNNVIPKSIPDIRRLSASLSSHPGILKKEDFERTVLTLAYTAYRTALSHGHQKDIWAQSLVSLFQALRHDLMRSSQPGVPP

SEQ ID NO: 6501 - protein, 562 aa, Homo sapiens
MGPLTFRDVAIEFSLKEWQCLDTAQRNLYRNVMLENYRNLVFLVMCSHFAQDLWPEQNIKDSFQKVTLKRYGKCRHENLPLRKGCESMDECKMHKGGCNGLNQCLTATQSKIFQCDKYVKVAHKFSNSNRHEIRHTKKKPFKCTKCGKSFGMISCLTEHSRIHTRVNFYKCEECGKAFNWSSTLTKHKRIHTGEKPYKCEECGKAFNQSSNLIKHKKIHTGEKPYKCEECGKTFNRFSTLTTHKIIHTGEKPYKCKECGKAFNRSSTLTTHRKIHTGEKPYKCEECGKAFKQSSNLTTHKIIHTGEKPYKCKKCGKAFNQSAHLTTHEVIHTGEKPYKCEKCGKAFNHFSHLTTHKIIHTGEKPYKCKECGKAFKHSSTLTKHKIIHTGEKPYKCKECEKAFNQSSKLTEHKKIHTGEKPYECEKCGKAFNQSSNLTRHKKSHTEEKPYKCEECGKGFKWPSTLTIHKIIHTGEKPYKCEECGKAFNQSSKLTKHKKIHTGEKPYTCEECGKAFNQSSNLTKHKRIHTGEKPYKCEECDKAFKWSSVLTKHKIIHTGEKLQI

SEQ ID NO: 6502 - protein, 628 aa, Homo sapiens
MRPSGTAGAALLALLAALCPASRALEEKKVCQGTSNKLTQLGTFEDHFLSLQRMFNNCEVVLGNLEITYVQRNYDLSFLKTIQEVAGYVLIALNTVERIPLENLQIIRGNMYYENSYALAVLSNYDANKTGLKELPMRNLQEILHGAVRFSNNPALCNVESIQWRDIVSSDFLSNMSMDFQNHLGSCQKCDPSCPNGSCWGAGEENCQKLTKIICAQQCSGRCRGKSPSDCCHNQCAAGCTGPRESDCLVCRKFRDEATCKDTCPPLMLYNPTTYQMDVNPEGKYSFGATCVKKCPRNYVVTDHGSCVRACGADSYEMEEDGVRKCKKCEGPCRKVCNGIGIGEFKDSLSINATNIKHFKNCTSISGDLHILPVAFRGDSFTHTPPLDPQELDILKTVKEITGFLLIQAWPENRTDLHAFENLEIIRGRTKQHGQFSLAVVSLNITSLGLRSLKEISDGDVIISGNKNLCYANTINWKKLFGTSGQKTKIISNRGENSCKATGQVCHALCSPEGCWGPEPRDCVSCRNVSRGRECVDKCNLLEGEPREFVENSECIQCHPECLPQAMNITCTGRGPDNCIQCAHYIDGPHCVKTCPAGVMGENNTLVWKYADAGHVCHLCHPNCTYGS

SEQ ID NO: 6503 - protein, 1025 aa, Homo sapiens
MSAAKENPCRKFQANIFNKSKCQNCFKPRESHLLNDEDLTQAKPIYGGWLLLAPDGTDFDNPVHRSRKWQRRFFILYEHGLLRYALDEMPTTLPQGTINMNQCTDVVDGEGRTGQKFSLCILTPEKEHFIRAETKEIVSGWLEMLMVYPRTNKQNQKKKRKVEPPTPQEPGPAKVAVTSSSSSSSSSSSIPSAEKVPTTKSTLWQEEMRTKDQPDGSSLSPAQSPSQSQPPAASSLREPGLESKEEESAMSSDRMDCGRKVRVESGYFSLEKTKQDLKAEEQQLPPPLSPPSPSTPNHRRSQVIEKFEALDIEKAEHMETNAVGPSPSSDTRQGRSEKRAFPRKRDFTNEAPPAPLPDASASPLSPHRRAKSLDRRSTEPSVTPDLLNFKKGWLTKQYEDGQWKKHWFVLADQSLRYYRDSVAEEAADLDGEIDLSACYDVTEYPVQRNYGFQIHTKEGEFTLSAMTSGIRRNWIQTIMKHVHPTTAPDVTSSLPEEKNKSSCSFETCPRPTEKQEAELGEPDPEQKRSRARERRREGRSKTFDWAEFRPIQQALAQERVGGVGPADTHEPLRPEAEPGELERERARRREERRKRFGMLDATDGPGTEDAALRMEVDRSPGLPMSDLKTHNVHVEIEQRWHQVETTPLREEKQVPIAPVHLSSEDGGDRLSTHELTSLLEKELEQSQKEASDLLEQNRLLQDQLRVALGREQSAREGYVLQATCERGFAAMEETHQKKIEDLQRQHQRELEKLREEKDRLLAEETAATISAIEAMKNAHREEMERELEKSQRSQISSVNSDVEALRRQYLEELQSVQRELEVLSEQYSQKCLENAHLAQALEAERQALRQCQRENQELNAHNQELNNRLAAEITRLRTLLTGDGGGEATGSPLAQGKDAYELEVLLRVKESEIQYLKQEISSLKDELQTALRDKKYASDKYKDIYTELSIAKAKADCDISRLKEQLKAATEALGEKSPDSATVSGYDIMKSKSNPDFLKKDRSCVTRQLRNIRSKSVIEQVSWDT

SEQ ID NO: 6504 - protein, 508 aa, Homo sapiens
MPPKRNEKYKLPIPFPEGKVLDDMEGNQWVLGKKIGSGGFGLIYLAFPTNKPEKDARHVVKVEYQENGPLFSELKFYQRVAKKDCIKKWIERKQLDYLGIPLFYGSGLTEFKGRSYRFMVMERLGIDLQKISGQNGTFKKSTVLQLGIRMLDVLEYIHENEYVHGDIKAANLLLGYKNPDQVYLADYGLSYRYCPNGNHKQYQENPRKGHNGTIEFTSLDAHKGVALSRRSDVEILGYCMLRWLCGKLPWEQNLKDPVAVQTAKTNLLDELPQSVLKWAPSGSSCCEIAQFLVCAHSLAYDEKPNYQALKKILNPHGIPLGPLDFSTKGQSINVHTPNSQKVDSQKAATKQVNKAHNRLIEKKVHSERSAESCATWKVQKEEKLIGLMNNEAAQESTRRRQKYQESQEPLNEVNSFPQKISYTQFPNSFYEPHQDFTSPDIFKKSRSPSWYKYTSTVSTGITDLESSTGLWPTISQFTLSEETNADVYYYRIIIPVLLMLVFLALFFL

SEQ ID NO: 6505 - protein, 602 aa, Homo sapiens
MLLPLLLSSLLGGSQAMDGRFWIRVQESVMVPEGLCISVPCSFSYPRQDWTGSTPAYGYWFKAVTETTKGAPVATNHQSREVEMSTRGRFQLTGDPAKGNCSLVIRDAQMQDESQYFFRVERGSYVRYNFMNDGFFLKVTALTQKPDVYIPETLEPGQPVTVICVFNWAFEECPPPSFSWTGAALSSQGTKPTTSHFSVLSFTPRPQDHNTDLTCHVDFSRKGVSAQRTVRLRVAYAPRDLVISISRDNTPALEPQPQGNVPYLEAQKGQFLRLLCAADSQPPATLSWVLQNRVLSSSHPWGPRPLGLELPGVKAGDSGRYTCRAENRLGSQQRALDLSVQYPPENLRVMVSQANRTVLENLGNGTSLPVLEGQSLCLVCVTHSSPPARLSWTQRGQVLSPSQPSDPGVLELPRVQVEHEGEFTCHARHPLGSQHVSLSLSVHYKKGLISTAFSNGAFLGIGITALLFLCLALIIMKILPKRRTQTETPRPRFSRHSTILDYINVVPTAGPLAQKRNQKATPNSPRTPLPPGAPSPESKKNQKKQYQLPSFPEPKSSTQAPESQESQEELHYATLNFPGVRPRPEARMPKGTQADYAEVKFQ

SEQ ID NO: 6506 - protein, 685 aa, Homo sapiens
MDHAEENEILAATQRYYVERPIFSHPVLQERLHTKDKVPDSIADKLKQAFTCTPKKIRNIIYMFLPITKWLPAYKFKEYVLGDLVSGISTGVLQLPQGLAFAMLAAVPPIFGLYSSFYPVIMYCFLGTSRHISIGPFAVISLMIGGVAVRLVPDDIVIPGGVNATNGTEARDALRVKVAMSVTLLSGIIQFCLGVCRFGFVAIYLTEPLVRGFTTAAAVHVFTSMLKYLFGVKTKRYSGIFSVVYSTVAVLQNVKNLNVCSLGVGLMVFGLLLGGKEFNERFKEKLPAPIPLEFFAVVMGTGISAGFNLKESYNVDVVGTLPLGLLPPANPDTSLFHLVYVDAIAIAIVGFSVTISMAKTLANKHGYQVDGNQELIALGLCNSIGSLFQTFSISCSLSRSLVQEGTGGKTQLAGCLASLMILLVILATGFLFESLPQAVLSAIVIVNLKGMFMQFSDLPFFWRTSKIELTIWLTTFVSSLFLGLDYGLITAVIIALLTVIYRTQSPSYKVLGKLPETDVYIDIDAYEEVKEIPGIKIFQINAPIYYANSDLYSNALKRKTGVNPAVIMGARRKAMRKYAKEVGNANMANATVVKADAEVDGEDATKPEEEDGEVKYPPIVIKSTFPEEMQRFMPPGDNVHTVILDFTQVNFIDSVGVKTLAGIVKEYGDVGIYVYLAGCSAFIQR

SEQ ID NO: 6507 - protein, 398 aa, Homo sapiens
MSIVTVQLGQCGNQIGFEVFDALLSDSHSSQGLCSMRENEAYQASCKERFFSEEENGVPIARAVLVDMEPKVINQMLSKAAQSGQWKYGQHACFCQKQGSGNNWAYGYSVHGPRHEESIMNIIRKEVEKCDSFSGFFIIMSMAGGTGSGLGAFVTQNLEDQYSNSLKMNQIIWPYGTGEVIVQNYNSILTLSHLYRSSDALLLHENDAIHKICAKLMNIKQISFSDINQVLAHQLGSVFQPTYSAESSFHYRRNPLGIDRHVWPPLSGLPPLSKMSLNKDLHFNTSIANLVILRGKDVQSADVEGFKDPALYTSWLKPVNAFNVWKTQRAFSKYEKSAVLVSNSQFLVKPLDMIVGKAWNMFASKAYIHQYTKFGIEEEDFLDSFTSLEQVVASYCNL

SEQ ID NO: 6508 - protein, 715 aa, Homo sapiens
MVPGARGGGALARAAGRGLLALLLAVSAPLRLQAEELGDGCGHLVTYQDSGTMTSKNYPGTYPNHTVCEKTITVPKGKRLILRLGDLDIESQTCASDYLLFTSSSDQYGPYCGSMTVPKELLLNTSEVTVRFESGSHISGRGFLLTYASSDHPDLITCLERASHYLKTEYSKFCPAGCRDVAGDISGNMVDGYRDTSLLCKAAIHAGIIADELGGQISVLQRKGISRYEGILANGVLSRDGSLSDKRFLFTSNGCSRSLSFEPDGQIRASSSWQSVNESGDQVHWSPGQARLQDQGPSWASGDSSNNHKPREWLEIDLGEKKKITGIRTTGSTQSNFNFYVKSFVMNFKNNNSKWKTYKGIVNNEEKVFQGNSNFRDPVQNNFIPPIVARYVRVVPQTWHQRIALKVELIGCQITQGNDSLVWRKTSQSTSVSTKKEDETITRPIPSEETSTGINITTVAIPLVLLVVLVFAGMGIFAAFRKKKKKGSPYGSAEAQKTDCWKQIKYPFARHQSAEFTISYDNEKEMTQKLDLITSDMADYQQPLMIGTGTVTRKGSTFRPMDTDAEEAGVSTDAGGHYDCPQRAGRHEYALPLAPPEPEYATPIVERHVLRAHTFSAQSGYRVPGPQPGHKHSLSSGGFSPVAGVGAQDGDYQRPHSAQPADRGYDRPKAVSALATESGHPDSQKPPTHPGTSDSYSAPRDCLTPLNQTAMTALL

SEQ ID NO: 6509 - protein, 1483 aa, Homo sapiens
MAPLLGRKPFPLVKPLPGEEPLFTIPHTQEAFRTREEYEARLERYSERIWTCKSTGSSQLTHKEAWEEEQEVAELLKEEFPAWYEKLVLEMVHHNTASLEKLVDTAWLEIMTKYAVGEECDFEVGKEKMLKVKIVKIHPLEKVDEEATEKKSDGACDSPSSDKENSSQIAQDHQKKETVVKEDEGRRESINDRARRSPRKLPTSLKKGERKWAPPKFLPHKYDVKLQNEDKIISNVPADSLIRTERPPNKEIVRYFIRHNALRAGTGENAPWVVEDELVKKYSLPSKFSDFLLDPYKYMTLNPSTKRKNTGSPDRKPSKKSKTDNSSLSSPLNPKLWCHVHLKKSLSGSPLKVKNSKNSKSPEEHLEEMMKMMSPNKLHTNFHIPKKGPPAKKPGKHSDKPLKAKGRSKGILNGQKSTGNSKSPKKGLKTPKTKMKQMTLLDMAKGTQKMTRAPRNSGGTPRTSSKPHKHLPPAALHLIAYYKENKDREDKRSALSCVISKTARLLSSEDRARLPEELRSLVQKRYELLEHKKRWASMSEEQRKEYLKKKREELKKKLKEKAKERREKEMLERLEKQKRYEDQELTGKNLPAFRLVDTPEGLPNTLFGDVAMVVEFLSCYSGLLLPDAQYPITAVSLMEALSADKGGFLYLNRVLVILLQTLLQDEIAEDYGELGMKLSEIPLTLHSVSELVRLCLRRSDVQEESEGSDTDDNKDSAAFEDNEVQDEFLEKLETSEFFELTSEEKLQILTALCHRILMTYSVQDHMETRQQMSAELWKERLAVLKEENDKKRAEKQKRKEMEAKNKENGKVENGLGKTDRKKEIVKFEPQVDTEAEDMISAVKSRRLLAIQAKKEREIQEREMKVKLERQAEEERIRKHKAAAEKAFQEGIAKAKLVMRRTPIGTDRNHNRYWLFSDEVPGLFIEKGWVHDSIDYRFNHHCKDHTVSGDEDYCPRSKKANLGKNASMNTQHGTATEVAVETTTPKQGQNLWFLCDSQKELDELLNCLHPQGIRESQLKERLEKRYQDIIHSIHLARKPNLGLKSCDGNQELLNFLRSDLIEVATRLQKGGLGYVEETSEFEARVISLEKLKDFGECVIALQASVIKKFLQGFMAPKQKRRKLQSEDSAKTEEVDEEKKMVEEAKVASALEKWKTAIREAQTFSRMHVLLGMLDACIKWDMSAENARCKVCRKKGEDDKLILCDECNKAFHLFCLRPALYEVPDGEWQCPACQPATARRNSRGRNYTEESASEDSEDDESDEEEEEEEEEEEEEDYEVAGLRLRPRKTIRGKHSVIPPAARSGRRPGKKPHSTRRSQPKAPPVDDAEVDELVLQTKRSSRRQSLELQKCEEILHKIVKYRFSWPFREPVTRDEAEDYYDVITHPMDFQTVQNKCSCGSYRSVQEFLTDMKQVFTNAEVYNCRGSHVLSCMVKTEQCLVALLHKHLPGHPYVRRKRKKFPDRLAEDEGDSEPEAVGQSRGRRQKK

SEQ ID NO: 6510 - protein, 310 aa, Homo sapiens
MDWENCSSLTDFFLLGITNNPEMKVTLFAVFLAVYIINFSANLGMIVLIRMDYQLHTPMYFFLSHLSFCDLCYSTATGPKMLVDLLAKNKSIPFYGCALQFLVFCIFADSECLLLSVMAFDRYKAIINPLLYTVNMSSRVCYLLLTGVYLVGIADALIHMTLAFRLCFCGSNEINHFFCDIPPLLLLSRSDTQVNELVLFTVFGFIELSTISGVFISYCYIILSVLEIHSAEGRFKALSTCTSHLSAVAIFQGTLLFMYFRPSSSYSLDQDKMTSLFYTLVVPMLNPLIYSLRNKDVKEALKKLKNKILF

SEQ ID NO: 6511 - protein, 512 aa, Homo sapiens
MYCAYPVPGMGSNSLMYYYNGKTVYAPSPNSDDFNRESPSYPSPKPPTSMFASTFFMQDGTHNSSDLWSSSNGMSQPGFGGILGTSTSHMSQSSSYGNLHSHDRLSYPPHSVSPTDINTSLPPMSSFHRGSTSSSPYVAASHTPPINGSDSILGTRGNAAGSSQTGDALGKALASIYSPDHTSSSFPSNPSTPVGSPSPLTGTSQWPRPGGQAPSSPSYENSLHSLQSRMEDRLDRLDDAIHVLRNHAVGPSTSLPAGHSDIHSLLGPSHNAPIGSLNSNYGGSSLVASSRSASMVGTHREDSVSLNGNHSVLSSTVTTSSTDLNHKTQENYRGGLQSQSGTVVTTEIKTENKEKDENLHEPPSSDDMKSDDESSQKDIKVSSRGRTSSTNEDEDLNPEQKIEREKERRMANNARERLRVRDINEAFKELGRMCQLHLKSEKPQTKLLILHQAVAVILSLEQQVRERNLNPKAACLKRREEEKVSAVSAEPPTTLPGTHPGLSETTNPMGHM

SEQ ID NO: 6512 - protein, 1210 aa, Homo sapiens
MRSRSNSGVRLDGYARLVQQTILCHQNPVTGLLPASYDQKDAWVRDNVYSILAVWGLGLAYRKNADRDEDKAKAYELEQSVVKLMRGLLHCMIRQVDKVESFKYSQSTKDSLHAKYNTKTCATVVGDDQWGHLQLDATSVYLLFLAQMTASGLHIIHSLDEVNFIQNLVFYIEAAYKTADFGIWERGDKTNQGISELNASSVGMAKAALEALDELDLFGVKGGPQSVIHVLADEVQHCQSILNSLLPRASTSKEVDASLLSVVSFPAFAVEDSQLVELTKQEIITKLQGRYGCCRFLRDGYKTPKEDPNRLYYEPAELKLFENIECEWPLFWTYFILDGVFSGNAEQVQEYKEALEAVLIKGKNGVPLLPELYSVPPDRVDEEYQNPHTVDRVPMGKLPHMWGQSLYILGSLMAEGFLAPGEIDPLNRRFSTVPKPDVVVQVSILAETEEIKTILKDKGIYVETIAEVYPIRVQPARILSHIYSSLGCNNRMKLSGRPYRHMGVLGTSKLYDIRKTIFTFTPQFIDQQQFYLALDNKMIVEMLRTDLSYLCSRWRMTGQPTITFPISHSMLDEDGTSLNSSILAALRKMQDGYFGGARVQTGKLSEFLTTSCCTHLSFMDPGPEGKLYSEDYDDNYDYLESGNWMNDYDSTSHARCGDEVARYLDHLLAHTAPHPKLAPTSQKGGLDRFQAAVQTTCDLMSLVTKAKELHVQNVHMYLPTKLFQASRPSFNLLDSPHPRQENQVPSVRVEIHLPRDQSGEVDFKALVLQLKETSSLQEQADILYMLYTMKGPDWNTELYNERSATVRELLTELYGKVGEIRHWGLIRYISGILRKKVEALDEACTDLLSHQKHLTVGLPPEPREKTISAPLPYEALTQLIDEASEGDMSISILTQEIMVYLAMYMRTQPGLFAEMFRLRIGLIIQVMATELAHSLRCSAEEATEGLMNLSPSAMKNLLHHILSGKEFGVERSVRPTDSNVSPAISIHEIGAVGATKTERTGIMQLKSEIKQSPGTSMTPSSGSFPSAYDQQSSKDSRQGQWQRRRRLDGALNRVPVGFYQKVWKVLQKCHGLSVEGFVLPSSTTREMTPGEIKFSVHVESVLNRVPQPEYRQLLVEAILVLTMLADIEIHSIGSIIAVEKIVHIANDLFLQEQKTLGADDTMLAKDPASGICTLLYDSAPSGRFGTMTYLSKAAATYVQEFLPHSICAMQ

SEQ ID NO: 6513 - protein, 1047 aa, Homo sapiens
MTDNIPLQPVRQKKRMDSRPRAGCCEWLRCCGGGEARPRTVWLGHPEKRDQRYPRNVINNQKYNFFTFLPGVLFNQFKYFFNLYFLLLACSQFVPEMRLGALYTYWVPLGFVLAVTVIREAVEEIRCYVRDKEVNSQVYSRLTARGTVKVKSSNIQVGDLIIVEKNQRVPADMIFLRTSEKNGSCFLRTDQLDGETDWKLRLPVACTQRLPTAADLLQIRSYVYAEEPNIDIHNFVGTFTREDSDPPISESLSIENTLWAGTVVASGTVVGVVLYTGRELRSVMNTSNPRSKIGLFDLEVNCLTKILFGALVVVSLVMVALQHFAGRWYLQIIRFLLLFSNIIPISLRVNLDMGKIVYSWVIRRDSKIPGTVVRSSTIPEQLGRISYLLTDKTGTLTQNEMIFKRLHLGTVAYGLDSMDEVQSHIFSIYTQQSQDPPAQKGPTLTTKVRRTMSSRVHEAVKAIALCHNVTPVYESNGVTDQAEAEKQYEDSCRVYQASSPDEVALVQWTESVGLTLVGRDQSSMQLRTPGDQILNFTILQIFPFTYESKRMGIIVRDESTGEITFYMKGADVVMAGIVQYNDWLEEECGNMAREGLRVLVVAKKSLAEEQYQDFEARYVQAKLSVHDRSLKVATVIESLEMEMELLCLTGVEDQLQADVRPTLETLRNAGIKVWMLTGDKLETATCTAKNAHLVTRNQDIHVFRLVTNRGEAHLELNAFRRKHDCALVISGDSLEVCLKYYEYEFMELACQCPAVVCCRCAPTQKAQIVRLLQERTGKLTCAVGDGGNDVSMIQESDCGVGVEGKEGKQASLAADFSITQFKHLGRLLMVHGRNSYKRSAALSQFVIHRSLCISTMQAVFSSVFYFASVPLYQGFLIIGYSTIYTMFPVFSLVLDKDVKSEVAMLYPELYKDLLKGRPLSYKTFLIWVLISIYQGSTIMYGALLLFESEFVHIVAISFTSLILTELLMVALTIQTWHWLMTVAELLSLACYIASLVFLHEFIDVYFIATLSFLWKVSVITLVSCLPLYVLKYLRRRFSPPSYSKLTS

SEQ ID NO: 6514 - protein, 364 aa, Homo sapiens
MSSAPRSPTPRPRRMKKDESFLGKLGGTLARKRRAREVSDLQEEGKNAINSPMSPALVDVHPEDTQLEENEERTMIDPTSKEDPKFKELVKVLLDWINDVLVEERIIVKQLEEDLYDGQVLQKLLEKLAGCKLNVAEVTQSEIGQKQKLQTVLEAVHDLLRPRGWALRWSVDSIHGKNLVAILHLLVSLAMHFRAPIRLPEHVTVQVVVVRKREGLLHSSHISEELTTTTEMMMGRFERDAFDTLFDHAPDKLSVVKKSLITFVNKHLNKLNLEVTELETQFADGVYLVLLMGLLEDYFVPLHHFYLTPESFDQKVHNVSFAFELMLDGGLKKPKARPEDVVNLDLKSTLRVLYNLFTKYKNVE

SEQ ID NO: 6515 - protein, 504 aa, Homo sapiens
MAAPPAPAAKGSPQPEPHAPEPGPGSAKRGREDSRAGRLSFCTKVCYGIGGVPNQIASSATAFYLQLFLLDIAQIPAAQVSLVLFGGKVSGAAADPVAGFFINRSQRTGSGRLMPWVLGCTPFIALAYFFLWFLPPFTSLRGLWYTTFYCLFQALATFFQVPYTALTMLLTPCPRERDSATAYRMTVEMAGTLMGATVHGLIVSGAHRPHRCEATATPGPVTVSPNAAHLYCIAAAVVVVTYPVCISLLCLGVKERPDPSAPASGPGLSFLAGLSLTTRHPPYLKLVISFLFISAAVQVEQSYLVLFCTHASQLHDHVQGLVLTVLVSAVLSTPLWEWVLQRFGKKTSAFGIFAMVPFAILLAAVPTAPVAYVVAFVSGVSIAVSLLLPWSMLPDVVDDFQLQHRHGPGLETIFYSSYVFFTKLSGACALGISTLSLEFSGYKAGVCKQAEEVVVTLKVLIGAVPTCMILAGLCILMVGSTPKTPSRDASSRLSLRRRTSYSLA

SEQ ID NO: 6516 - protein, 521 aa, Homo sapiens
MDELLLDLFHKLTSGRQLAAGNGLCGISHKEQEVWKPGHNILVKMRKEDKSLVWLIHSTLARYTQVTNFLGTSRSSVTRCKPGANCPSSHSGISRQLSPLSVTEDSSAPILELQNQGSSGVCGHRVERQNRSADDGTQTHSENSSQENRIKARCLSCTSMVLKGIWGLLIILSVSSSWVGTTQIVKITYKNFYCPFFMTWFSTNWNIMFFPVYYSGHLATAQEKQSPMKKFRECSRIFGEDGLTLKLFLKRTAPFSILWTLTNYLYLLALKKLTATDVSALFCCNKAFVFLLSWIVLKDRFMGVRIVAAIMAITGIVMMAYADNFHADSIIGVAFAVGSASTSALYKVLFKMFLGSANFGEAAHFVSTLGFFNLIFISFTPVILYFTKVEHWSSFAALPWGCLCGMAGLWLAFNILVNVGVVLTYPILISIGTVLSVPGNAAVDLLKQEVIFNVVRLAATIIICIGFLLMLLPEEWDEITLRFINSLKEKKSEEHVDDVTDPSIHLRGRGRANGTVSIPLA

SEQ ID NO: 6517 - protein, 336 aa, Homo sapiens
MSRSVLEALTSSTAMQCVPSDGCAMLLRVRASITLHERLRGLEACAMSLDTQETQCQSVWVARASHRQQGGQQLQVHFGCFAVSVAQHLYVTLRTIPHFCGVQLDQRHLVEAGKLSYWVDRRRKAILVQVPRASGSPDYYLRLCLKRFTCEDAGAPVRVTANSVSQAVFLPYSQELPCLCLEGWSATPDAVRIQICPFENDTEALEVLWDTVYYHPESQTLSWEPACPVSGHVSLCWRPGPGAGCRKLQQSSQLVHRRVQYPLVDTQPQLCLKFSTSWGSWVRCPFEQRRFPTPPTSRCTCVTGGSHSSLPANAHSRPARSLQPQVTWQPPLLLPS

SEQ ID NO: 6518 - protein, 496 aa, Homo sapiens
MRALRRLIQGRILLLTICAAGIGGTFQFGYNLSIINAPTLHIQEFTNETWQARTGEPLPDHLVLLMWSLIVSLYPLGGLFGALLAGPLAITLGRKKSLLVNNIFVVSAAILFGFSRKAGSFEMIMLGRLLVGVNAGVSMNIQPMYLGESAPKELRGAVAMSSAIFTALGIVMGQVVGLRELLGGPQAWPLLLASCLVPGALQLASLPLLPESPRYLLIDCGDTEACLAALRRLRGSGDLAGELEELEEERAACQGCRARRPWELFQHRALRRQVTSLVVLGSAMELCGNDSVYAYASSVFRKAGVPEAKIQYAIIGTGSCELLTAVVSCVVIERVGRRVLLIGGYSLMTCWGSIFTVALCLQSSFPWTLYLAMACIFAFILSFGIGPAGVTGILATELFDQMARPAACMVCGALMWIMLILVGLGFPFIMEALSHFLYVPFLGVCVCGAIYTGLFLPETKGKTFQEISKELHRLNFPRRAQGPTWRSLEVIQSTEL

SEQ ID NO: 6519 - protein, 1258 aa, Homo sapiens
MPEQERQITAREGASRKILSKLSLPTRAWEPAMKKSFAFDNVGYEGGLDGLGPSSQVATSTVRILGMTCQSCVKSIEDRISNLKGIISMKVSLEQGSATVKYVPSVVCLQQVCHQIGDMGFEASIAEGKAASWPSRSLPAQEAVVKLRVEGMTCQSCVSSIEGKVRKLQGVVRVKVSLSNQEAVITYQPYLIQPEDLRDHVNDMGFEAAIKSKVAPLSLGPIDIERLQSTNPKRPLSSANQNFNNSETLGHQGSHVVTLQLRIDGMHCKSCVLNIEENIGQLLGVQSIQVSLENKTAQVKYDPSCTSPVALQRAIEALPPGNFKVSLPDGAEGSGTDHRSSSSHSPGSPPRNQVQGTCSTTLIAIAGMTCASCVHSIEGMISQLEGVQQISVSLAEGTATVLYNPSVISPEELRAAIEDMGFEASVVSESCSTNPLGNHSAGNSMVQTTDGTPTSVQEVAPHTGRLPANHAPDILAKSPQSTRAVAPQKCFLQIKGMTCASCVSNIERNLQKEAGVLSVLVALMAGKAEIKYDPEVIQPLEIAQFIQDLGFEAAVMEDYAGSDGNIELTITGMTCASCVHNIESKLTRTNGITYASVALATSKALVKFDPEIIGPRDIIKIIESKTSEALAKLMSLQATEATVVTLGEDNLIIREEQVPMELVQRGDIVKVVPGGKFPVDGKVLEGNTMADESLITGEAMPVTKKPGSTVIAGSINAHGSVLIKATHVGNDTTLAQIVKLVEEAQMSKNPNKHISQTEVIIRFAFQTSITVLCIACPCSLGLATPTAVMVGTGVAAQNGILIKGGKPLEMAHKIKTVMFDKTGTITHGVPRVMRVLLLGDVATLPLRKVLAVVGTAEASSEHPLGVAVTKYCKEELGTETLGYCTDFQAVPGCGIGCKVSNVEGILAHSERPLSAPASHLNEAGSLPAEKDAVPQTFSVLIGNREWLRRNGLTISSDVSDAMTDHEMKGQTAILVAIDGVLCGMIAIADAVKQEAALAVHTLQSMGVDVVLITGDNRKTARAIATQVGINKVFAEVLPSHKVAKVQELQNKGKKVAMVGDGVNDSPALAQADMGVAIGTGTDVAIEAADVVLIRNDLLDVVASIHLSKRTVRRIRINLVLALIYNLVGIPIAAGVFMPIGIVLQPWMGSAAMAASSVSVVLSSLQLKCYKKPDLERYEAQAHGHMKPLTASQVSVHIGMDDRWRDSPRATPWDQVSYVSQVSLSSLTSDKPSRHSAAADDDGDKWSLLLNGRDEEQYI

SEQ ID NO: 6520 - protein, 445 aa, Homo sapiens
MERAPPDGPLNASGALAGEAAAAGGARGFSAAWTAVLAALMALLIVATVLGNALVMLAFVADSSLRTQNNFFLLNLAISDFLVGAFCIPLYVPYVLTGRWTFGRGLCKLWLVVDYLLCTSSAFNIVLISYDRFLSVTRAVSYRAQQGDTRRAVRKMLLVWVLAFLLYGPAILSWEYLSGGSSIPEGHCYAEFFYNWYFLITASTLEFFTPFLSVTFFNLSIYLNIQRRTRLRLDGAREAAGPEPPPEAQPSPPPPPGCWGCWQKGHGEAMPLHRYGVGEAAVGAEAGEATLGGGGGGGSVASPTSSSGSSSRGTERPRSLKRGSKPSASSASLEKRMKMVSQSFTQRFRLSRDRKVAKSLAVIVSIFGLCWAPYTLLMIIRAACHGHCVPDYWYETSFWLLWANSAVNPVLYPLCHHSFRRAFTKLLCPQKLKIQPHSSLEHCWK

SEQ ID NO: 6521 - protein, 522 aa, Homo sapiens
MAALLAAAAVRARILQVSSKVKSSPTWYSASSFSSSVPTVKLFIGGKFVESKSDKWIDIHNPATNEVIGRVPQATKAEMDAAIASCKRAFPAWADTSVLSRQQKEIAKLITLEQGKTLADAEGDVFRGLQVVEHACSVTSLMMGETMPSITKDMDLYSYRLPLGVCAGIAPFNFPAMIPLWMFPMAMVCGNTFLMKPSERVPGATMLLAKLLQDSGAPDGTLNIIHGQHEAVNFICDHPDIKAISFVGSNKAGEYIFERGSRHGKRVQANMGAKNHGVVMPDANKENTLNQLVGAAFGAAGQRCMALSTAVLVGEAKKWLPELVEHAKNLRVNAGDQPGADLGPLITPQAKERVCNLIDSGTKEGASILLDGRKIKVKGYENGNFVGPTIISNVKPNMTCYKEEIFGPVLVVLETETLDEAIQIVNNNPYGNGTAIFTTNGATARKYAHLVDVGQVGVNVPIPVPLPMFSFTGSRSSFRGDTNFYGKQGIQFYTQLKTITSQWKEEDATLSSPAVVMPTMGR

SEQ ID NO: 6522 - protein, 812 aa, Homo sapiens
MKKQFNRMRQLANQTVGRAEKTEVLSEDLLQVEKRLELVKQVSHSTHKKLTACLQGQQGAEADKRSKKLPLTTLAQCLMEGSAILGDDTLLGKMLKLCGETEDKLAQELIHFELQVERDVIEPLFLLAEVEIPNIQKQRKHLAKLVLDMDSSRTRWQQTSKSSGLSSSLQPAGAKADALREEMEEAANRVEICRDQLSADMYSFVAKEIDYANYFQTLIEVQAEYHRKSLTLLQAVLPQIKAQQEAWVEKPSFGKPLEEHLTISGREIAFPIEACVTMLLECGMQEEGLFRVAPSASKLKKLKAALDCCVVDVQEYSADPHAIAGALKSYLRELPEPLMTFELYDEWIQASNVQEQDKKLQALWNACEKLPKANHNNIRYLIKFLSKLSEYQDVNKMTPSNMAIVLGPNLLWPQAEGNITEMMTTVSLQIVGIIEPIIQHADWFFPGEIEFNITGNYGSPVHVNHNANYSSMPSPDMDPADRRQPEQARRPLSVATDNMMLEFYKKDGMGVRVMDTNWVARRGSSAGRKVSCAPPSMQPPAPPAELAAPLPSPLPEQPLDSPAAPALSPSGLGLQPGPERTSTTKSKELSPGSAQKGSPGSSQGTACAGTQPGAQPGAQPGASPSPSQPPADQSPHTLRKVSKKLAPIPPKVPFGQPGAMADQSAGQPSPVSLSPTPPSTPSPYGLSYPQGYSLASGQLSPAAAPPLASPSVFTSTLSKSRPTPKPRQRPTLPPPQPPTVNLSASSPQSTEAPMLDGMSPGESMSTDLVHFDIPSIHIELGSTLRLSPLEHMRRHSVTDKRDSEEESESTAL

SEQ ID NO: 6523 - protein, 804 aa, Homo sapiens
MAQFYYKRNVNAPYRDRIPLRIVRAESELSPSEKAYLNAVEKGDYASVKKSLEEAEIYFKININCIDPLGRTALLIAIENENLELIELLLSFNVYVGDALLHAIRKEVVGAVELLLNHKKPSGEKQFVAQPNCQQLLASRWYDEFPGWRRRHWAVKMVTCFIIGLLFPVFSVCYLIAPKSPLGLFIRKPFIKFICHTASYLTFLFLLLLASQHIDRSDLNRQGPPPTIVEWMILPWVLGFIWGEIKQMWDGGLQDYIHDWWNLMDFVMNSLYLATISLKIVAFVKYSALNPRESWDMWHPTLVAEALFAIANIFSSLRLISLFTANSHLGPLQISLGRMLLDILKFLFIYCLVLLAFANGLNQLYFYYEETKGLTCKGIRCEKQNNAFSTLFETLQSLFWSIFGLINLYVTNVKAQHEFTEFVGATMFGTYNVISLVVLLNMLIAMMNNSYQLIADHADIEWKFARTKLWMSYFEEGGTLPTPFNVIPSPKSLWYLIKWIWTHLCKKKMRRKPESFGTIGRRAADNLRRHHQYQEVMRNLVKRYVAAMIRDAKTEEGLTEENFKELKQDISSFRFEVLGLLRGSKLSTIQSANASKESSNSADSDEKSDSEGNSKDKKKNFSLFDLTTLIHPRSAAIASERHNISNGSALVVQEPPREKQRKVNFVTDIKNFGLFHRRSKQNAAEQNANQIFSVSEEVARQQAAGPLERNIQLESRGLASRGDLSIPGLSEQCVLVDHRERNTDTLGLQVGKRVCPFKSEKVVVEDTVPIIPKEKHAKEEDSSIDYDLNLPDTVTHEDYVTTRL

SEQ ID NO: 6524 - protein, 824 aa, Homo sapiens
MKDRSSTPPLHVHVDENTPVHVHIKKLPKPSATSSQKSHKRGMKGDTVNVRRSVRVKTKVPWMPPGKSSARPVGCKWENPPHCLEITPPSSEKLVSVMRLSDLSTEDDDSGHCKMNRYDKKIDSLMNAVGCLKSEVKMQKGERQMAKRFLEERKEELEEVAHELAETEHENTVLRHNIERMKEEKDFTILQKKHLQQEKECLMSKLVEAEMDGAAAAKQVMALKDTIGKLKTEKQMTCTDINTLTRQKELLLQKLSTFEETNRTLRDLLREQHCKEDSERLMEQQGALLKRLAEADSEKARLLLLLQDKDKEVEELLQEIQCEKAQAKTASELSKSMESMRGHLQAQLRSKEAENSRLCMQIKNLERSGNQHKAEVEAIMEQLKELKQKGDRDKESLKKAIRAQKERAEKSEEYAEQLHVQLADKDLYVAEALSTLESWRSRYNQVVKEKGDLELEIIVLNDRVTDLVNQQQTLEEKMREDRDSLVERLHRQTAEYSAFKLENERLKASFAPMEDKLNQAHLEVQQLKASVKNYEGMIDNYKSQVMKTRLEADEVAAQLERCDKENKILKDEMNKEIEAARRQFQSQLADLQQLPDILKITEAKLAECQDQLQGYERKNIDLTAIISDLRSRIEHQGDKLEMAREKHQASQKENKQLSLKVDELERKLEATSAQNIEFLQVIAKREEAIHQSQLRLEEKTRECGTLARQLESAIEDARRQVEQTKEHALSKERAAQNKILDLETQLSRTKTELSQLRRSRDDADRRYQSRLQDLKDRLEQSESTNRSMQNYVQFLKSSYANVFGDGPYSTFLTSSPIRSRSPPA

SEQ ID NO: 6525 - protein, 1140 aa, Homo sapiens
MATPGMSWQQHYYGGSAAKFAPSPATAQLAGHSMDYSQEMHLKMSKKIAQLTKVIYALNTKNDEHESAIQALKDAHEEEIQQILAETREKILQYKSKVTEELDLRRKIQVLESSLEDHIKMKQQALTEFEAYKHRVEDMQLCAEAQHVQRIVTMSREVEEIRRKFEEKLRSFGQLQVQFEKDKRLALEDLQAAHRREIQELLKSQQDHSASVNKGQEKAEELHRMEVESLNKMLEELRLERKKLIEDYEGKLNKAQSFYERELDTLKRSQLFTAESLQASKEKEADLRKEFQGQEAILRKTIGKLKTELQMVQDEAGSLLDKCQKLQTALAIAENNVQVLQKQLDDAKEGEMALLSKHKEVESELAAARERLQQQASDLVLKASHIGMLQATQMTQEVTIKDLESEKSRVNERLSQLEEERAFLRSKTQSLDEEQKQQILELEKKVNEAKRTQQEYYERELKNLQSRLEEEVTQLNEAHSKTLEELAWKHHMAIEAVHSNAIRDKKKLQMDLEEQHNKDKLNLEEDKNQLQQELENLKEVLEDKLNTANQEIGHLQDMVRKSEQGLGSAEGLIASLQDSQERLQNELDLTKDSLKETKDALLNVEGELEQERQQHEETIAAMKEEEKLKVDKMAHDLEIKWTENLRQECSKLREELRLQHEEDKKSAMSQLLQLKDREKNAARDSWQKKVEDLLNQISLLKQNLEIQLSQSQTSLQQLQAQFTQERQRLTQELEELEEQHQQRHKSLKEAHVLAFQTMEEEKEKEQRALENHLQQKHSAELQSLKDAHRESMEGFRIEMEQELQTLRFELEDEGKAMLASLRSELNHQHAAAIDLLRHNHHQELAAAKMELERSIDISRRQSKEHICRITDLQEELRHREHHISELDKEVQHLHENISALTKELEFKGKEILRIRSESNQQIRLHEQDLNKRLEKELDVMTADHLREKNIMRADFNKTNELLKEINAALQVSLEEMEEKYLMRESKPEDIQMITELKAMLTERDQIIKKLIEDNKFYQLELVNRETNFNKVFNSSPTVGVINPLAKQKKKNDKSPTNRFVSVPNLSALESGGVGNGHPNRLDPIPNSPVHDIEFNSSKPLPQPVPPKGPKTFLSPAQSEASPVASPDPQRQEWFARYFTF

SEQ ID NO: 6526 - protein, 244 aa, Homo sapiens
MFTLSQTSRAWFIDRARQAREERLVQKERERAAVVIQAHVRSFLCRSRLQRDIRREIDDFFKADDPESTKRSALCIFKIARKLLFLFRIKEDNERFEKLCRSILSSMDAENEPKVWYVSLACSKDLTLLWIQQIKNILWYCCDFLKQLKPEILQDSRLITLYLTMLVTFTDTSTWKILRGKGESLRPAMNHICANIMGHLNQHGFYSVLQCCDGLFPDLVSYAPHNNPVRWSVGRSWYDWQLSR

SEQ ID NO: 6527 - protein, 592 aa, Homo sapiens
MEMQDLTSPHSRLSGSSESPSGPKLGNSHINSNSMTPNGTEVKTEPMSSSETASTTADGSLNNFSGSAIGSSSFSPRPTHQFSPPQIYPSNRPYPHILPTPSSQTMAAYGQTQFTTGMQQATAYATYPQPGQPYGISSYGALWAGIKTEGGLSQSQSPGQTGFLSYGTSFSTPQPGQAPYSYQMQGSSFTTSSGIYTGNNSLTNSSGFNSSQQDYPSYPSFGQGQYAQYYNSSPYPAHYMTSSNTSPTTPSTNATYQLQEPPSGITSQAVTDPTAEYSTIHSPSTPIKDSDSDRLRRGSDGKSRGRGRRNNNPSPPPDSDLERVFIWDLDETIIVFHSLLTGSYANRYGRDPPTSVSLGLRMEEMIFNLADTHLFFNDLEECDQVHIDDVSSDDNGQDLSTYNFGTDGFPAAATSANLCLATGVRGGVDWMRKLAFRYRRVKEIYNTYKNNVGGLLGPAKREAWLQLRAEIEALTDSWLTLALKALSLIHSRTNCVNILVTTTQLIPALAKVLLYGLGIVFPIENIYSATKIGKESCFERIIQRFGRKVVYVVIGDGVEEEQGAKKHAMPFWRISSHSDLMALHHALELEYL

SEQ ID NO: 6528 - protein, 383 aa, Homo sapiens
MEGSSSYEVPSVAAADLEEGAGQTRSLPATPSKDVHKGVGGIIFSSSPILDLSESGLCRLEEVFRIPSLQQLHLQRNALCVIPQDFFQLLPNLTWLDLRYNRIKALPSGIGAHQHLKTLLLERNPIKMLPVELGSVTTLKALNLRHCPLEFPPQLVVQKGLVAIQRFLRMWAVEHSLPRNPTSQEAPPVREMTLRDLPSPGLELSGDHASNQGAVNAQDPEGAVMKEKASFLPPVEKPDLSELRKSADSSENWPSEEEIRRFWKLRQEIVEHVKADVLGDQLLTRELPPNLKAALNIEKELPKPRHVFRTRVPRKQALQRLHERKTRIMGVVGRAPTHMGEGRQPPPGASYPTSCHRTKWRSEQKDWKRAERRRSESSRRSRL

SEQ ID NO: 6529 - protein, 219 aa, Homo sapiens
MEPLRLLILLFVTELSGAHNTTVFQGVAGQSLQVSCPYDSMKHWGRRKAWCRQLGEKGPCQRVVSTHNLWLLSFLRRWNGSTAITDDTLGGTLTITLRNLQPHDAGLYQCQSLHGSEADTLRKVLVEVLADPLDHRDAGDLWFPGESESFEDAHVEHSISRAERHVKEDDGRKSPGEVPPGTSPACILATWPPGLLVLLWQETTLPEHCFSWTLEAGTG

SEQ ID NO: 6530 - protein, 647 aa, Homo sapiens
MSESRRRGRGRGKKHPEGRKREREPDPGEKATRPKLKKMKSQTGQVGEKQSLKCEAAAGNPQPSYRWFKDGKELNRSRDIRIKYGNGRKNSRLQFNKVKVEDAGEYVCEAENILGKDTVRGRLYVNSVSTTLSSWSGHARKCNETAKSYCVNGGVCYYIEGINQLSCKCPNGFFGQRCLEKLPLRLYMPDPKQKAEELYQKRVLTITGICVALLVVGIVCVVAYCKTKKQRKQMHNHLRQNMCPAHQNRSLANGPSHPRLDPEEIQMADYISKNVPATDHVIRRETETTFSGSHSCSPSHHCSTATPTSSHRHESHTWSLERSESLTSDSQSGIMLSSVGTSKCNSPACVEARARRAAAYNLEERRRATAPPYHDSVDSLRDSPHSERYVSALTTPARLSPVDFHYSLATQVPTFEITSPNSAHAVSLPPAAPISYRLAEQQPLLRHPAPPGPGPGPGPGPGPGADMQRSYDSYYYPAAGPGPRRGTCALGGSLGSLPASPFRIPEDDEYETTQECAPPPPPRPRARGASRRTSAGPRRWRRSRLNGLAAQRARAARDSLSLSSGSGGGSASASDDDADDADGALAAESTPFLGLRGAHDALRSDSPPLCPAADSRTYYSLDSHSTRASSRHSRGPPPRAKQDSAPL

SEQ ID NO: 6531 - protein, 948 aa, Homo sapiens
MPAARPPAAGLRGISLFLALLLGSPAAALERDALPEGDASPLGPYLLPSGAPERGSPGKEHPEERVVTAPPSSSQSAEVLGELVLDGTAPSAHHDIPALSPLLPEEARPKHALPPKKKLPSLKQVNSARKQLRPKATSAATVQRAGSQPASQGLDLLSSSTEKPGPPGDPDPIVASEEASEVPLWLDRKESAVPTTPAPLQISPFTSQPYVAHTLPQRPEPGEPGPDMAQEAPQEDTSPMALMDKGENELTGSASEESQETTTSTIITTTVITTEQAPALCSVSFSNPEGYIDSSDYPLLPLNNFLECTYNVTVYTGYGVELQVKSVNLSDGELLSIRGVDGPTLTVLANQTLLVEGQVIRSPTNTISVYFRTFQDDGLGTFQLHYQAFMLSCNFPRRPDSGDVTVMDLHSGGVAHFHCHLGYELQGAKMLTCINASKPHWSSQEPICSAPCGGAVHNATIGRVLSPSYPENTNGSQFCIWTIEAPEGQKLHLHFERLLLHDKDRMTVHSGQTNKSALLYDSLQTESVPFEGLLSEGNTIRIEFTSDQARAASTFNIRFEAFEKGHCYEPYIQNGNFTTSDPTYNIGTIVEFTCDPGHSLEQGPAIIECINVRDPYWNDTEPLCRAMCGGELSAVAGVVLSPNWPEPYVEGEDCIWKIHVGEEKRIFLDIQFLNLSNSDILTIYDGDEVMPHILGQYLGNSGPQKLYSSTPDLTIQFHSDPAGLIFGKGQGFIMNYIEVSRNDSCSDLPEIQNGWKTTSHTELVRGARITYQCDPGYDIVGSDTLTCQWDLSWSSDPPFCEKIMYCTDPGEVDHSTRLISDPVLLVGTTIQYTCNPGFVLEGSSLLTCYSRETGTPIWTSRLPHCVLAEAAAETSLEGGNMALAIFIPVLIISLLLGGAYIYITRCRYYSNLRLPLMYSHPYSQITVETEFDNPIYETGETREYEVSI

SEQ ID NO: 6532 - protein, 838 aa, Homo sapiens
MQEQEIGFISKYNEGLCVNTDPVSILTSILDMSLHRQMGSDRDLQSSASSVSLPSVKKAPKKRRISIGSLFRRKKDNKRKSRELNGGVDGIASIESIHSEMCTDKNSIFSTNTSSDNGLTSISKQIGDFIECPLCLLRHSKDRFPDIMTCHHRSCVDCLRQYLRIEISESRVNISCPECTERFNPHDIRLILSDDVLMEKYEEFMLRRWLVADPDCRWCPAPDCGYAVIAFGCASCPKLTCGREGCGTEFCYHCKQIWHPNQTCDAARQERAQSLRLRTIRSSSISYSQESGAAADDIKPCPRCAAYIIKMNDGSCNHMTCAVCGCEFCWLCMKEISDLHYLSPSGCTFWGKKPWSRKKKILWQLGTLVGAPVGIALIAGIAIPAMIIGIPVYVGRKIHNRYEGKDVSKHKRNLAIAGGVTLSVIVSPVVAAVTVGIGVPIMLAYVYGVVPISLCRSGGCGVSAGNGKGVRIEFDDENDINVGGTNTAVDTTSVAEARHNPSIGEGSVGGLTGSLSASGSHMDRIGAIRDNLSETASTMALAGASITGSLSGSAMVNCFNRLEVQADVQKERYSLSGESGTVSLGTVSDNASTKAMAGSILNSYIPLDKEGNSMEVQVDIESKPSKFRHNSGSSSVDDGSATRSHAGGSSSGLPEGKSSATKWSKEATAGKKSKSGKLRKKGNMKINETREDMDAQLLEQQSTNSSEFEAPSLSDSMPSVADSHSSHFSEFSCSDLESMKTSCSHGSSDYHTRFATVNILPEVENDRLENSPHQCSISVVTQTASCSEVSQLNHIAEEHGNNGIKPNVDLYFGDALKETNNNHSHQTMELKVAIQTEI

SEQ ID NO: 6533 - protein, 615 aa, Homo sapiens
MPASAARPRPGPGQPTASPFPLLLLAVLSGPVSGRVPRSVPRTSLPISEADSCLTRFAVPHTYNYSVLLVDPASHTLYVGARDTIFALSLPFSGERPRRIDWMVPEAHRQNCRKKGKKEGDLGGRKTLQQRWTTFLKADLLCPGPEHGRASSVLQDVAVLRPELGAGTPIFYGIFSSQWEGATISAVCAFRPQDIRTVLNGPFRELKHDCNRGLPVVDNDVPQPRPGECITNNMKLRHFGSSLSLPDRVLTFIRDHPLMDRPVFPADGHPLLVTTDTAYLRVVAHRVTSLSGKEYDVLYLGTEDGHLHRAVRIGAQLSVLEDLALFPEPQPVENMKLYHSWLLVGSRTEVTQVNTTNCGRLQSCSECILAQDPVCAWSFRLDECVAHAGEHRGLVQDIESADVSSLCPKEPGERPVVFEVPVATAAHVVLPCSPSSAWASCVWHQPSGVTALTPRRDGLEVVVTPGAMGAYACECQEGGAAHVVAAYSLVWGSQRDAPSRAHTVGAGLAGFFLGILAASLTLILIGRRQQRRRQRELLARDKVGLDLGAPPSGTTSYSQDPPSPSPEDERLPLALAKRGSGFGGFSPPFLLDPCPSPAHIRLTGAPLATCDETSI

SEQ ID NO: 6534 - protein, 503 aa, Homo sapiens
MATQSDMEKEQKHQQDEGQGGLNNETALASGDACGTGNQDPAASVTTVSSQASPSGGAALSSSTAGSSAAAATSAAIFITDEASGLPIIAAVLTERHSDRQDCRSPHEVFGCVVPEGGSQAAVGPQKATGHADEHLAQTKSPGNSRRRKQPCRNQAAPAQKPPGRRLFPEPLPPSSPGFRPSSYPCSGASTSSQATQPGPALLSHASEARPATRSRITLVASALRRRASGPGPVIRGCTAQPGPAFPHRATHLDPARLSPESAPGPARRGRASVPGPARRGCDSAPGPARRGRDSAPVSAPRGRDSAPGSARRGRDSAPGPALRVRTARSDAGHRSTSTTPGTGLRSRSTQQRSALLSRRSLSGSADENPSCGTGSERLAFQSRSGSPDPEVPSRASPPVWHAVRMRASSPSPPGRFFLPIPQQWDESSSSSYASNSSSPSRSPGLSPSSPSPEFLGLRSISTPSPESLRYALMPEFYALSPVPPEEQAEIESTAHPATPPEP

SEQ ID NO: 6535 - protein, 495 aa, Homo sapiens
MPMGSLQPLATLYLLGMLVASCLGRLSWYDPDFQARLTRSNSKCQGQLEVYLKDGWHMVCSQSWGRSSKQWEDPSQASKVCQRLNCGVPLSLGPFLVTYTPQSSIICYGQLGSFSNCSHSRNDMCHSLGLTCLEPQKTTPPTTRPPPTTTPEPTAPPRLQLVAQSGGQHCAGVVEFYSGSLGGTISYEAQDKTQDLENFLCNNLQCGSFLKHLPETEAGRAQDPGEPREHQPLPIQWKIQNSSCTSLEHCFRKIKPQKSGRVLALLCSGFQPKVQSRLVGGSSICEGTVEVRQGAQWAALCDSSSARSSLRWEEVCREQQCGSVNSYRVLDAGDPTSRGLFCPHQKLSQCHELWERNSYCKKVFVTCQDPNPAGLAAGTVASIILALVLLVVLLVVCGPLAYKKLVKKFRQKKQRQWIGPTGMNQNMSFHRNHTATVRSHAENPTASHVDNEYSQPPRNSHLSAYPALEGALHRSSMQPDNSSDSDYDLHGAQRL

SEQ ID NO: 6536 - protein, 584 aa, Homo sapiens
MHTGGETSACKPSSVRLAPSFSFHAAGLQMAGQMPHSHQYSDRRQPNISDQQVSALSYSDQIQQPLTNQVMPDIVMLQRRMPQTFRDPATAPLRKLSVDLIKTYKHINEVYYAKKKRRHQQGQGDDSSHKKERKVYNDGYDDDNYDYIVKNGEKWMDRYEIDSLIGKGSFGQVVKAYDRVEQEWVAIKIIKNKKAFLNQAQIEVRLLELMNKHDTEMKYYIVHLKRHFMFRNHLCLVFEMLSYNLYDLLRNTNFRGVSLNLTRKFAQQMCTALLFLATPELSIIHCDLKPENILLCNPKRSAIKIVDFGSSCQLGQRIYQYIQSRFYRSPEVLLGMPYDLAIDMWSLGCILVEMHTGEPLFSGANEVDQMNKIVEVLGIPPAHILDQAPKARKFFEKLPDGTWNLKKTKDGKREYKPPGTRKLHNILGVETGGPGGRRAGESGHTVADYLKFKDLILRMLDYDPKTRIQPYYALQHSFFKKTADEGTNTSNSVSTSPAMEQSQSSGTTSSTSSSSGGSSGTSNSGRARSDPTHQHRHSGGHFTAAVQAMDCETHSPQVSSHVVHLLVSPAILRWSSTGCQVPLE

SEQ ID NO: 6537 - protein, 497 aa, Homo sapiens
MADPEVVVSSCSSHEEENRCNFNQQTSPSEELLLEDQMRRKLKFFFMNPCEKFWARGRKPWKLAIQILKIAMVTIQYLQLYNVSVGNHAYENKGTKQSAMAICQHFYKRGNIYPGNDTFDIDPEIETECFFVEPDEPFHIGTPAENKLNLTLDFHRLLTVELQFKLKAINLQTVRHQELPDCYDFTLTITFDNKAHSGRIKISLDNDISIRECKDWHVSGSIQKNTHYMMIFDAFVILTCLVSLILCIRSVIRGLQLQQEFVNFFLLHYKKEVSVSDQMEFVNGWYIMIIISDILTIIGSILKMEIQAKSLTSYDVCSILLGTSTMLVWLGVIRYLGFFAKYNLLILTLQAALPNVIRFCCCAAMIYLGYCFCGWIVLGPYHDKFRSLNMVSECLFSLINGDDMFATFAKMQQKSYLVWLFSRIYLYSFISLFIYMILSLFIALITDTYETIKQYQQDGFPETELRTFISECKDLPNSGKYRLEDDPPVSLFCCCKK

SEQ ID NO: 6538 - protein, 367 aa, Homo sapiens
MAAEEEDEVEWVVESIAGFLRGPDWSIPILDFVEQKCEVNCKGGHVITPGSPEPVILVACVPLVFDDEEESKLTYTEIHQEYKELVEKLLEGYLKEIGINEDQFQEACTSPLAKTHTSQAILQPVLAAEDFTIFKAMMVQKNIEMQLQAIRIIQERNGVLPDCLTDGSDVVSDLEHEEMKILREVLRKSKEEYDQEEERKRKKQLSEAKTEEPTVHSSEAAIMNNSQGDGEHFAHPPSEVKMHFANQSIEPLGRKVERSETSSLPQKDLKIPGLEHASIEGPIANLSVLGTEELRQREHYLKQKRDKLMSMRKDMRTKQIQNMEQKGKPTGEVEEMTEKPEMTAEEKQTLLKRRLLAEKLKEEVINK

SEQ ID NO: 6539 - protein, 356 aa, Homo sapiens
MDTQGPVSQPFQQPEKPGRVRRRKTRRERNKALVGSRRPLAHHDPPVAIRDPPVVPTASKLVVITQGRLSREHRGLFNHEVKSLDVARLLSSGTLVPGSPTLPAKPSPSPGRAQEPAPRSRDKENQVPGGSGPGPPSSPELSGVGQLLAELQCQLSLPQAFPRRNLIQDARDAIVHTLQACHGCVPDLALVLRGCQPPLPGAKPGVSERKMTPFWINSPDQVPEQERQRKQQGTKEFTFPMPYTSSMPTAHRGSLAPPRGPWPPYFPSLSSPSGTAWGPPTAFDLLKSIWLVATPPPPRPWGVGLPQPLPQPSSPLLPRTSVLDWSPSPPSPLPSLSWVVAQSSPEAWSFPPMRLY

SEQ ID NO: 6540 - protein, 578 aa, Homo sapiens
MSHQFSSQSAFSSMSRRVYSTSSSAGSGGGSPAVGSVCYARGRCGGGGYGIHGRGFGSRSLYNLGGSRSISINLMGRSTSGFCQGGGVGGFGGGRGFGVGSTGAGGFGGGGFGGAGFGTSNFGLGGFGPYCPPGGIQEVTINQSLLEPLHLEVDPEIQRIKTQEREQIMVLNNKFASFIDKVRFLEQQNQVLQTKWELLQQVNTSTGTNNLEPLLENYIGDLRRQVDLLSAEQMRQNAEVRSMQDVVEDYKSKYEDEINKRTGSENDFVVLKKDVDAAYVSKVDLESRVDTLTGEVNFLKYLFLTELSQVQTHISDTNVILSMDNNRSLDLDSIIDAVRTQYELIAQRSKDEAEALYQTKYQELQITAGRHGDDLKNSKMEIAELNRTVQRLQAEISNVKKQIEQMQSLISDAEERGEQALQDAWQKLQDLEEALQQSKEELARLLRDYQAMLGVKLSLDVEIATYRQLLEGEESRMSGELQSHVSISVQNSQVSVNGGAGGGGSYGSGGYGGGSGGGYGGGRSYRGGGARGRSGGGYGSGCGGGGGSYGGSGRSGRGSSRVQIIQTSTNTSHRRILE

SEQ ID NO: 6541 - protein, 432 aa, Homo sapiens
MDADEGQDMSQVSGKESPPVSDTPDEGDEPMPIPEDLSTTSGGQQSSKSDRVVGERPFQCNQCGASFTQKGNLLRHIKLHSGEKPFKCHLCNYACRRRDALTGHLRTHSVGKPHKCGYCGRSYKQRSSLEEHKERCHNYLESMGLPGTLYPVIKEETNHSEMAEDLCKIGSERSLVLDRLASNVAKRKSSMPQKFLGDKGLSDTPYDSSASYEKENEMMKSHVMDQAINNAINYLGAESLRPLVQTPPGGSEVVPVISPMYQLHKPLAEGTPRSNHSAQDSAVENLLLLSKAKLVPSEREASPSNSCQDSTDTESNNEEQRSGLIYLTNHIAPHARNGLSLKEEHRAYDLLRAASENSQDALRVVSTSGEQMKVYKCEHCRVLFLDHVMYTIHMGCHGFRDPFECNMCGYHSQDRYEFSSHITRGEHRFHMS

SEQ ID NO: 6542 - protein, 170 aa, Homo sapiens
MPVPASWPHPPGPFLLLTLLLGLTEVAGEEELQMIQPEKLLLVTVGKTATLHCTVTSLLPVGPVLWFRGVGPGRELIYNQKEGHFPRVTTVSDLTKRNNMDFSIRISSITPADVGTYYCVKFRKGSPENVEFKSGPGTEMALGGPASSLTALLLIAVLLGPIYVPWKQKT

SEQ ID NO: 6543 - protein, 1642 aa, Homo sapiens
MFINIKSILWMCSTLIVTHALHKVKVGKSPPVRGSLSGKVSLPCHFSTMPTLPPSYNTSEFLRIKWSKIEVDKNGKDLKETTVLVAQNGNIKIGQDYKGRVSVPTHPEAVGDASLTVVKLLASDAGLYRCDVMYGIEDTQDTVSLTVDGVVFHYRAATSRYTLNFEAAQKACLDVGAVIATPEQLFAAYEDGFEQCDAGWLADQTVRYPIRAPRVGCYGDKMGKAGVRTYGFRSPQETYDVYCYVDHLDGDVFHLTVPSKFTFEEAAKECENQDARLATVGELQAAWRNGFDQCDYGWLSDASVRHPVTVARAQCGGGLLGVRTLYRFENQTGFPPPDSRFDAYCFKPKEATTIDLSILAETASPSLSKEPQMVSDRTTPIIPLVDELPVIPTEFPPVGNIVSFEQKATVQPQAITDSLATKLPTPTGSTKKPWDMDDYSPSASGPLGKLDISEIKEEVLQSTTGVSHYATDSWDGVVEDKQTQESVTQIEQIEVGPLVTSMEILKHIPSKEFPVTETPLVTARMILESKTEKKMVSTVSELVTTGHYGFTLGEEDDEDRTLTVGSDESTLIFDQIPEVITVSKTSEDTIHTHLEDLESVSASTTVSPLIMPDNNGSSMDDWEERQTSGRITEEFLGKYLSTTPFPSQHRTEIELFPYSGDKILVEGISTVIYPSLQTEMTHRRERTETLIPEMRTDTYTDEIQEEITKSPFMGKTEEEVFSGMKLSTSLSEPIHVTESSVEMTKSFDFPTLITKLSAEPTEVRDMEEDFTATPGTTKYDENITTVLLAHGTLSVEAATVSKWSWDEDNTTSKPLESTEPSASSKLPPALLTTVGMNGKDKDIPSFTEDGADEFTLIPDSTQKQLEEVTDEDIAAHGKFTIRFQPTTSTGIAEKSTLRDSTTEEKVPPITSTEGQVYATMEGSALGEVEDVDLSKPVSTVPQFAHTSEVEGLAFVSYSSTQEPTTYVDSSHTIPLSVIPKTDWGVLVPSVPSEDEVLGEPSQDILVIDQTRLEATISPETMRTTKITEGTTQEEFPWKEQTAEKPVPALSSTAWTPKEAVTPLDEQEGDGSAYTVSEDELLTGSERVPVLETTPVGKIDHSVSYPPGAVTEHKVKTDEVVTLTPRIGPKVSLSPGPEQKYETEGSSTTGFTSSLSPFSTHITQLMEETTTEKTSLEDIDLGSGLFEKPKATELIEFSTIKVTVPSDITTAFSSVDRLHTTSAFKPSSAITKKPPLIDREPGEETTSDMVIIGESTSHVPPTTLEDIVAKETETDIDREYFTTSSPPATQPTRPPTVEDKEAFGPQALSTPQPPASTKFHPDINVYIIEVRENKTGPDRCKMNPCLNGGTCYPTETSYVCTCVPGYSGDQCELDFDECHSNPCRNGATCVDGFNTFRCLCLPSYVGALCEQDTETCDYGWHKFQGQCYKYFAHRRTWDAAERECRLQGAHLTSILSHEEQMFVNRVGHDYQWIGLNDKMFEHDFRWTDGSTLQYENWRPNQPDSFFSAGEDCVVIIWHENGQWNDVPCNYHLTYTCKKGTVACGQPPVVENAKTFGKMKPRYEINSLIRYHCKDGFIQRHLPTIRCLGNGRWAIPKITCMNPSAYQRTYSMKYFKNSSSAKDNSINTSKHDHRWSRRWQESRR

SEQ ID NO: 6544 - protein, 893 aa, Homo sapiens
MAEAALEAVRSELREFPAAARELCVPLAVPYLDKPPTPLHFYRDWVCPNRPCIIRNALQHWPALQKWSLPYFRATVGSTEVSVAVTPDGYADAVRGDRFMMPAERRLPLSFVLDVLEGRAQHPGVLYVQKQCSNLPSELPQLLPDLESHVPWASEALGKMPDAVNFWLGEAAAVTSLHKDHYENLYCVVSGEKHFLFHPPSDRPFIPYELYTPATYQLTEEGTFKVVDEEAMEKAEVSRTCLLTVRVLQAHRLPSKDLVTPSDCYVTLWLPTACSHRLQTRTVKNSSSPVWNQSFHFRIHRQLKNVMELKVFDQDLVTGDDPVLSVLFDAGTLRAGEFRRESFSLSPQGEGRLEVEFRLQSLADRGEWLVSNGVLVARELSCLHVQLEETGDQKSSEHRVQLVVPGSCEGPQEASVGTGTFRFHCPACWEQELSIRLQDAPEEQLKAPLSALPSGQVVRLVFPTSQEPLMRVELKKEAGLRELAVRLGFGPCAEEQAFLSRRKQVVAAALRQALQLDGDLQEDEIPVVAIMATGGGIRAMTSLYGQLAGLKELGLLDCVSYITGASGSTWALANLYEDPEWSQKDLAGPTELLKTQVTKNKLGVLAPSQLQRYRQELAERARLGYPSCFTNLWALINEALLHDEPHDHKLSDQREALSHGQNPLPIYCALNTKGQSLTTFEFGEWCEFSPYEVGFPKYGAFIPSELFGSEFFMGQLMKRLPESRICFLEGIWSNLYAANLQDSLYWASEPSQFWDRWVRNQANLDKEQVPLLKIEEPPSTAGRIAEFFTDLLTWRPLAQATHNFLRGLHFHKDYFQHPHFSTWKATTLDGLPNQLTPSEPHLCLLDVGYLINTSCLPLLQPTRDVDLILSLDYNLHGAFQGSGGHPRRRQLGR

SEQ ID NO: 6545 - protein, 1074 aa, Homo sapiens
MSLKNEPRVNTSALQKIAADMSNIIENLDTRELHFEGEEVDYDVSPSDPKIQEVYIPFSAIYNTQGFKEPNIQTYLSGCPIKAQVLEVERFTSTTRVPSINLYTIELTHGEFKWQVKRKFKHFQEFHRELLKYKAFIRIPIPTRRHTFRRQNVREEPREMPSLPRSSENMIREEQFLGRRKQLEDYLTKILKMPMYRNYHATTEFLDISQLSFIHDLGPKGIEGMIMKRSGGHRIPGLNCCGQGRACYRWSKRWLIVKDSFLLYMKPDSGAIAFVLLVDKEFKIKVGKKETETKYGIRIDNLSRTLILKCNSYRHARWWGGAIEEFIQKHGTNFLKDHRFGSYAAIQENALAKWYVNAKGYFEDVANAMEEANEEIFITDWWLSPEIFLKRPVVEGNRWRLDCILKRKAQQGVRIFIMLYKEVELALGINSEYTKRTLMRLHPNIKVMRHPDHVSSTVYLWAHHEKLVIIDQSVAFVGGIDLAYGRWDDNEHRLTDVGSVKRVTSGPSLGSLPPAAMESMESLRLKDKNEPVQNLPIQKSIDDVDSKLKGIGKPRKFSKFSLYKQLHRHHLHDADSISSIDSTSSYFNHYRSHHNLIHGLKPHFKLFHPSSESEQGLTRPHADTGSIRSLQTGVGELHGETRFWHGKDYCNFVFKDWVQLDKPFADFIDRYSTPRMPWHDIASAVHGKAARDVARHFIQRWNFTKIMKSKYRSLSYPFLLPKSQTTAHELRYQVPGSVHANVQLLRSAADWSAGIKYHEESIHAAYVHVIENSRHYIYIENQFFISCADDKVVFNKIGDAIAQRILKAHRENQKYRVYVVIPLLPGFEGDISTGGGNALQAIMHFNYRTMCRGENSILGQLKAELGNQWINYISFCGLRTHAELEGNLVTELIYVHSKLLIADDNTVIIGSANINDRSMLGKRDSEMAVIVQDTETVPSVMDGKEYQAGRFARGLRLQCFRVVLGYLDDPSEDIQDPVSDKFFKEVWVSTAARNATIYDKVFRCLPNDEVHNLIQLRDFINKPVLAKEDPIRAEEELKKIRGFLVQFPFYFLSEESLLPSVGTKEAIVPMEVWT

SEQ ID NO: 6546 - protein, 837 aa, Homo sapiens
MAAPGAPAEYGYIRTVLGQQILGQLDSSSLALPSEAKLKLAGSSGRGGQTVKSLRIQEQVQQTLARKGRSSVGNGNLHRTSSVPEYVYNLHLVENDFVGGRSPVPKTYDMLKAGTTATYEGRWGRGTAQYSSQKSVEERSLRHPLRRLEISPDSSPERAHYTHSDYQYSQRSQAGHTLHHQESRRAALLVPPRYARSEIVGVSRAGTTSRQRHFDTYHRQYQHGSVSDTVFDSIPANPALLTYPRPGTSRSMGNLLEKENYLTAGLTVGQVRPLVPLQPVTQNRASRSSWHQSSFHSTRTLREAGPSVAVDSSGRRAHLTVGQAAAGGSGNLLTERSTFTDSQLGNADMEMTLERAVSMLEADHMLPSRISAAATFIQHECFQKSEARKRVNQLRGILKLLQLLKVQNEDVQRAVCGALRNLVFEDNDNKLEVAELNGVPRLLQVLKQTRDLETKKQITGLLWNLSSNDKLKNLMITEALLTLTENIIIPFSGWPEGDYPKANGLLDFDIFYNVTGCLRNMSSAGADGRKAMRRCDGLIDSLVHYVRGTIADYQPDDKATENCVCILHNLSYQLEAELPEKYSQNIYIQNRNIQTDNNKSIGCFGSRSRKVKEQYQDVPMPEEKSNPKGVEWLWHSIVIRMYLSLIAKSVRNYTQEASLGALQNLTAGSGPMPTSVAQTVVQKESGLQHTRKMLHVGDPSVKKTAISLLRNLSRNLSLQNEIAKETLPDLVSIIPDTVPSTDLLIETTASACYTLNNIIQNSYQNARDLLNTGGIQKIMAISAGDAYASNKASKAASVLLYSLWAHTELHHAYKKAQFKKTDFVNSRTAKAYHSLKD

SEQ ID NO: 6547 - protein, 2555 aa, Homo sapiens
MTAITHGSPVGGNDSQGQVLDGQSQHLFQQNQTSSPDSSNENSVATPPPEEQGQGDAPPQHEDEEPAFPHTELANLDDMINRPRWVVPVLPKGELEVLLEAAIDLSVKGLDVKSEACQRFFRDGLTISFTKILMDEAVSGWKFEIHRCIINNTHRLVELCVAKLSQDWFPLLELLAMALNPHCKFHIYNGTRPCELISSNAQLPEDELFARSSDPRSPKGWLVDLINKFGTLNGFQILHDRFFNGSALNIQIIAALIKPFGQCYEFLSQHTLKKYFIPVIEIVPHLLENLTDEELKKEAKNEAKNDALSMIIKSLKNLASRISGQDETIKNLEIFRLKMILRLLQISSFNGKMNALNEINKVISSVSYYTHRHSNPEEEEWLTAERMAEWIQQNNILSIVLQDSLHQPQYVEKLEKILRFVIKEKALTLQDLDNIWAAQAGKHEAIVKNVHDLLAKLAWDFSPGQLDHLFDCFKASWTNASKKQREKLLELIRRLAEDDKDGVMAHKVLNLLWNLAQSDDVPVDIMDLALSAHIKILDYSCSQDRDAQKIQWIDHFIEELRTNDKWVIPALKQIREICSLFGEASQNLSQTQRSPHIFYRHDLINQLQQNHALVTLVAENLATYMNSIRLYAGDHEDYDPQTVRLGSRYSHVQEVQERLNFLRFLLKDGQLWLCAPQAKQIWKCLAENAVYLCDREACFKWYSKLMGDEPDLDPDINKDFFESNVLQLDPSLLTENGMKCFERFFKAVNCRERKLIAKRRSYMMDDLELIGLDYLWRVVIQSSDEIANRAIDLLKEIYTNLGPRLKANQVVIHEDFIQSCFDRLKASYDTLCVFDGDKNSINCARQEAIRMVRVLTVIKEYINECDSDYHKERMILPMSRAFRGKHLSLIVRFPNQGRQVDELDIWSHTNDTIGSVRRCIVNRIKANVAHKKIELFVGGELIDSEDDRKLIGQLNLKDKSLITAKLTQINFNMPSSPDSSSDSSTASPGNHRNHYNDGPNLEVESCLPGVIMSVHPRYISFLWQVADLGSNLNMPPLRDGARVLMKLMPPDRTAVEKLRAVCLDHAKLGEGKLSPPLDSLFFGPSASQVLYLTEVVYALLMPAGVPLTDGSSDFQVHFLKSGGLPLVLSMLIRNNFLPNTDMETRRGAYLNALKIAKLLLTAIGYGHVRAVAEACQPVVDGTDPITQINQVTHDQAVVLQSALQSIPNPSSECVLRNESILLAQEISNEASRYMPDICVIRAIQKIIWASACGALGLVFSPNEEITKIYQMTTNGSNKLEVEDEQVCCEALEVMTLCFALLPTALDALSKEKAWQTFIIDLLLHCPSKTVRQLAQEQFFLMCTRCCMGHRPLLFFITLLFTILGSTAREKGKYSGDYFTLLRHLLNYAYNGNINIPNAEVLLVSEIDWLKRIRDNVKNTGETGVEEPILEGHLGVTKELLAFQTSEKKYHFGCEKGGANLIKELIDDFIFPASKVYLQYLRSGELPAEQAIPVCSSPVTINAGFELLVALAIGCVRNLKQIVDCLTEMYYMGTAITTCEALTEWEYLPPVGPRPPKGFVGLKNAGATCYMNSVIQQLYMIPSIRNSILAIEGTGSDLHDDMFGDEKQDSESNVDPRDDVFGYPHQFEDKPALSKTEDRKEYNIGVLRHLQVIFGHLAASQLQYYVPRGFWKQFRLWGEPVNLREQHDALEFFNSLVDSLDEALKALGHPAILSKVLGGSFADQKICQGCPHRYECEESFTTLNVDIRNHQNLLDSLEQYIKGDLLEGANAYHCEKCDKKVDTVKRLLIKKLPRVLAIQLKRFDYDWERECAIKFNDYFEFPRELDMGPYTVAGVANLERDNVNSENELIEQKEQSDNETAGGTKYRLVGVLVHSGQASGGHYYSYIIQRNGKDDQTDHWYKFDDGDVTECKMDDDEEMKNQCFGGEYMGEVFDHMMKRMSYRRQKRWWNAYILFYEQMDMIDEDDEMIRYISELTIARPHQIIMSPAIERSVRKQNVKFMHNRLQYSLEYFQFVKKLLTCNGVYLNPAPGQDYLLPEAEEITMISIQLAARFLFTTGFHTKKIVRGPASDWYDALCVLLRHSKNVRFWFTHNVLFNVSNRFSEYLLECPSAEVRGAFAKLIVFIAHFSLQDGSCPSPFASPGPSSQACDNLSLSDHLLRATLNLLRREVSEHGHHLQQYFNLFVMYANLGVAEKTQLLKLNVPATFMLVSLDEGPGPPIKYQYAELGKLYSVVSQLIRCCNVSSTMQSSINGNPPLPNPFGDLNLSQPIMPIQQNVLDILFVRTSYVKKIIEDCSNSEDTIKLLRFCSWENPQFSSTVLSELLWQVAYSYTYELRPYLDLLFQILLIEDSWQTHRIHNALKGIPDDRDGLFDTIQRSKNHYQKRAYQCIKCMVALFSSCPVAYQILQGNGDLKRKWTWAVEWLGDELERRPYTGNPQYSYNNWSPPVQSNETANGYFLERSHSARMTLAKACELCPEEEPDDQDAPDEHEPSPSEDAPLYPHSPASQYQQNNHVHGQPYTGPAAHHLNNPQKTGQRTQENYEGNEEVSSPQMKDQ

SEQ ID NO: 6548 - protein, 611 aa, Homo sapiens
MSAVSQPQAAPSPLEKSPSTAILCNTCGNVCKGEVLRVQDKYFHIKCFVCKACGCDLAEGGFFVRQGEYICTLDYQRLYGTRCFSCDQFIEGEVVSALGKTYHPDCFVCAVCRLPFPPGDRVTFNGKECMCQKCSLPVSVGSSAHLSQGLRSCGGCGTEIKNGQALVALDKHWHLGCFKCKSCGKLLNAEYISKDGLPYCEADYHAKFGIRCDSCEKYITGRVLEAGEKHYHPSCALCVRCGQMFAEGEEMYLQGSSIWHPACRQAARTEDRNKETRTSSESIISVPASSTSGSPSRVIYAKLGGEILDYRDLAALPKSKAIYDIDRPDMISYSPYISHSAGDRQSYGEGDQDDRSYKQCRTSSPSSTGSVSLGRYTPTSRSPQHYSRPGSESGRSTPSLSVLSDSKPPPSTYQQAPRHFHVPDTGVKDNIYRKPPIYRQHAARRSDGEDGSLDQDNRKKSSWLMLKGDADTRTNSPDLDTQSLSHSSGTDRDPLQRMAGDSFHSRFPYSKSDPLPGHGKNGLDQRNANLAPCGADPDASWGMREYKIYPYDSLIVTNRIRVKLPKDVDRTRLERHLSPEEFQEVFGMSIEEFDRLALWKRNDLKKKALLF

SEQ ID NO: 6549 - protein, 464 aa, Homo sapiens
MVSGLRLASRSGEEGWLKPAVARLGPPRHRLRNLRTESPWRSRGSVLFCSGPGRAGRAAEPLHPVCTCGRHFRRPEPCREPLASPIQDSVAFEDVAVNFTQEEWALLDSSQKNLYREVMQETCRNLASVGSQWKDQNIEDHFEKPGKDIRNHIVQRLCESKEDGQYGEVVSQIPNLDLNENISTGLKPCECSICGKVFVRHSLLNRHILAHSGYKPYGEKQYKCEQCGKFFVSVPGVRRHMIMHSGNPAYKCTICGKAFYFLNSVERHQRTHTGEKPYKCKQCGKAFTVSGSCLIHERTHTGEKPYECKECGKTFRFSCSFKTHERTHTGERPYKCTKCDKAFSCSTSLRYHGSIHTGERPYECKQCGKAFSRLSSLCNHRSTHTGEKPYECKQCDQAFSRLSSLHLHERIHTGEKPYECKKCGKAYTRSSHLTRHERSHDIEAGCSDSAYNPSTLGGQGVWIA

SEQ ID NO: 6550 - protein, 312 aa, Homo sapiens
MRNHTTVANFILLGLTDDPQLQVIIFLLLFFTYMLSITGNLTIITLTLLDLHLKTPMYFFLRNFSFLEVSFTTVYIPKFLVSMATGDKTISYNDCAAQLFFTILLGATEFFLLAAMSYERYVAICKPLHYTTIMSSRVCSLLVFASWMAGFLIIFPPLLMGLQLDFCAANTVDHFFCDVSPILQLSCTDTDIIELMMLLSAILTLLVTLVLVILSYTNIIRTILKIPSSQQRKKAFSTCSSHMVVVSISYGSCIFMYVKPSAKERVSLNKGIALLSTSVAPMLNPFIYTLRNKQVKDVFKHTVKKIELFSMK

SEQ ID NO: 6551 - protein, 1370 aa, Homo sapiens
MATGGRRGAAAAPLLVAVAALLLGAAGHLYPGEVCPGMDIRNNLTRLHELENCSVIEGHLQILLMFKTRPEDFRDLSFPKLIMITDYLLLFRVYGLESLKDLFPNLTVIRGSRLFFNYALVIFEMVHLKELGLYNLMNITRGSVRIEKNNELCYLATIDWSRILDSVEDNYIVLNKDDNEECGDICPGTAKGKTNCPATVINGQFVERCWTHSHCQKVCPTICKSHGCTAEGLCCHSECLGNCSQPDDPTKCVACRNFYLDGRCVETCPPPYYHFQDWRCVNFSFCQDLHHKCKNSRRQGCHQYVIHNNKCIPECPSGYTMNSSNLLCTPCLGPCPKVCHLLEGEKTIDSVTSAQELRGCTVINGSLIINIRGGNNLAAELEANLGLIEEISGYLKIRRSYALVSLSFFRKLRLIRGETLEIGNYSFYALDNQNLRQLWDWSKHNLTITQGKLFFHYNPKLCLSEIHKMEEVSGTKGRQERNDIALKTNGDQASCENELLKFSYIRTSFDKILLRWEPYWPPDFRDLLGFMLFYKEAPYQNVTEFDGQDACGSNSWTVVDIDPPLRSNDPKSQNHPGWLMRGLKPWTQYAIFVKTLVTFSDERRTYGAKSDIIYVQTDATNPSVPLDPISVSNSSSQIILKWKPPSDPNGNITHYLVFWERQAEDSELFELDYCLKGLKLPSRTWSPPFESEDSQKHNQSEYEDSAGECCSCPKTDSQILKELEESSFRKTFEDYLHNVVFVPRPSRKRRSLGDVGNVTVAVPTVAAFPNTSSTSVPTSPEEHRPFEKVVNKESLVISGLRHFTGYRIELQACNQDTPEERCSVAAYVSARTMPEAKADDIVGPVTHEIFENNVVHLMWQEPKEPNGLIVLYEVSYRRYGDEELHLCVSRKHFALERGCRLRGLSPGNYSVRIRATSLAGNGSWTEPTYFYVTDYLDVPSNIAKIIIGPLIFVFLFSVVIGSIYLFLRKRQPDGPLGPLYASSNPEYLSASDVFPCSVYVPDEWEVSREKITLLRELGQGSFGMVYEGNARDIIKGEAETRVAVKTVNESASLRERIEFLNEASVMKGFTCHHVVRLLGVVSKGQPTLVVMELMAHGDLKSYLRSLRPEAENNPGRPPPTLQEMIQMAAEIADGMAYLNAKKFVHRDLAARNCMVAHDFTVKIGDFGMTRDIYETDYYRKGGKGLLPVRWMAPESLKDGVFTTSSDMWSFGVVLWEITSLAEQPYQGLSNEQVLKFVMDGGYLDQPDNCPERVTDLMRMCWQFNPKMRPTFLEIVNLLKDDLHPSFPEVSFFHSEENKAPESEELEMEFEDMENVPLDRSSHCQREEAGGRDGGSSLGFKRSYEEHIPYTHMNGGKKNGRILTLPRSNPS

SEQ ID NO: 6552 - protein, 297 aa, Homo sapiens
MAVGTRGTLLKKSLTVWFCGPGARSATRAVSTSLPRREQVTWCCCSGSWPRRTASTSWRCSMAANTFYFRPNGAGDTRQNLIPDFYAFRVINNGKVADIKKVNNFIREQDLYALKSVKIPVRNHGILMETHKELKPLLSPSSETTVTVELPEADRAGAGTGAQAGQLMGFFKGIDQDIERAVQSEIFLHESYCMDTSHQPLLPAPPKTPMDGADCGIQWWNAVFIMLLIGIVLPVFYLVYFKIQASGETPNSLNTTVIPNGSMAMGTVPGQAPRLAVAVPAVTSADSQFSQTTQAGS

SEQ ID NO: 6553 - protein, 2718 aa, Homo sapiens
MADEEAEQERLSCGEGGCVAELQRLGERLQELELQLRESRVPAVEAATDYCQQLCQTLLEYAEKWKTSEDPLPLLEVYTVAIQSYVKARPYLTSECENVALVLERLALSCVELLLCLPVELSDKQWEQFQTLVQVAHEKLMENGSCELHFLATLAQETGVWKNPVLCTILSQEPLDKDKAFEGPILLDMRIKHLIKTNQLSQATALAKLCSDHPEIGIKGSFKQTYLVCLCTSSPNGKLIEEISEVDCKDALEMICNLESEGDEKSALVLCTAFLSRQLQQGDMYCAWELTLFWSKLQQRVEPSIQVYLERCRQLSLLTKTVYHIFFLIKVINSETEGAGLATCIELCVKALRLESTENTEVKISICKTISCLLPDDLEVKRACQLSEFLIEPTVDAYYAVEMLYNQPDQKYDEENLPIPNSLRCELLLVLKTQWPFDPEFWDWKTLKRQCLALMGEEASIVSSIDELNDSEVYEKVVDYQEESKETSMNGLSGGVGANSGLLKDIGDEKQKKREIKQLRERGFISARFRNWQAYMQYCVLCDKEFLGHRIVRHAQKHYKDGIYSCPICAKNFNSKETFVPHVTLHVKQSSKERLAAMKPLRRLGRPPKITTTNENQKTNTVAKQEQRPIKKNSLYSTDFIVFNDNDGSDDENDDKDKSYEPEVIPVQKPVPVNEFNCPVTFCKKGFKYFKNLIAHVKGHKDNEDAKRFLEMQSKKVICQYCRRHFVSVTHLNDHLQMHCGSKPYICIQMKCKAGFNSYAELLTHRKEHQVFRAKCMFPKCGRIFSEAYLLYDHEAQHYNTYTCKFTGCGKVYRSQGELEKHLDDHSTPPEKVLPPEAQLNSSGDSIQPSEVNQNTAENIEKERSMLPSENNIENSLLADRSDAWDKSKAESAVTKQDQISASELRQANGPLSNGLENPATTPLLQSSEVAVSIKVSLNQGIEDNFGKQENSTVEGSGEALVTDLHTPVEDTCNDLCHPGFQERKEQDCFNDAHVTQNSLVNSETLKIGDLTPQNLERQVNNLMTFSVQNQAAFQNNLPTSKFECGDNVKTSSNLYNLPLKTLESIAFVPPQSDLSNSLGTPSVPPKAPVQKFSCQVEGCTRTYNSSQSIGKHMKTAHPDQYAAFKMQRKSKKGQKANNLNTPNNGKFVYFLPSPVNSSNPFFTSQTKANGNPACSAQLQHVSPPIFPAHLASVSTPLLSSMESVINPNITSQDKNEQGGMLCSQMENLPSTALPAQMEDLTKTVLPLNIDSGSDPFLPLPAESSSMSLFPSPADSGTNSVFSQLENNTNHYSSQIEGNTNSSFLKGGNGENAVFPSQVNVANNFSSTNAQQSAPEKVKKDRGRGPNGKERKPKHNKRAKWPAIIRDGKFICSRCYRAFTNPRSLGGHLSKRSYCKPLDGAEIAQELLQSNGQPSLLASMILSTNAVNLQQPQQSTFNPEACFKDPSFLQLLAENRSPAFLPNTFPRSGVTNFNTSVSQEGSEIIKQALETAGIPSTFEGAEMLSHVSTGCVSDASQVNATVMPNPTVPPLLHTVCHPNTLLTNQNRTSNSKTSSIEECSSLPVFPTNDLLLKTVENGLCSSSFPNSGGPSQNFTSNSSRVSVISGPQNTRSSHLNKKGNSASKRRKKVAPPLIAPNASQNLVTSDLTTMGLIAKSVEIPTTNLHSNVIPTCEPQSLVENLTQKLNNVNNQLFMTDVKENFKTSLESHTVLAPLTLKTENGDSQMMALNSCTTSINSDLQISEDNVIQNFEKTLEIIKTAMNSQILEVKSGSQGAGETSQNAQINYNIQLPSVNTVQNNKLPDSSPFSSFISVMPTKSNIPQSEVSHKEDQIQEILEGLQKLKLENDLSTPASQCVLINTSVTLTPTPVKSTADITVIQPVSEMINIQFNDKVNKPFVCQNQGCNYSAMTKDALFKHYGKIHQYTPEMILEIKKNQLKFAPFKCVVPTCTKTFTRNSNLRAHCQLVHHFTTEEMVKLKIKRPYGRKSQSENVPASRSTQVKKQLAMTEENKKESQPALELRAETQNTHSNVAVIPEKQLVEKKSPDKTESSLQVITVTSEQCNTNALTNTQTKGRKIRRHKKEKEEKKRKKPVSQSLEFPTRYSPYRPYRCVHQGCFAAFTIQQNLILHYQAVHKSDLPAFSAEVEEESEAGKESEETETKQTLKEFRCQVSDCSRIFQAITGLIQHYMKLHEMTPEEIESMTASVDVGKFPCDQLECKSSFTTYLNYVVHLEADHGIGLRASKTEEDGVYKCDCEGCDRIYATRSNLLRHIFNKHNDKHKAHLIRPRRLTPGQENMSSKANQEKSKSKHRGTKHSRCGKEGIKMPKTKRKKKNNLENKNAKIVQIEENKPYSLKRGKHVYSIKARNDALSECTSRFVTQYPCMIKGCTSVVTSESNIIRHYKCHKLSKAFTSQHRNLLIVFKRCCNSQVKETSEQEGAKNDVKDSDTCVSESNDNSRTTATVSQKEVEKNEKDEMDELTELFITKLINEDSTSVETQANTSSNVSNDFQEDNLCQSERQKASNLKRVNKEKNVSQNKKRKVEKAEPASAAELSSVRKEEETAVAIQTIEEHPASFDWSSFKPMGFEVSFLKFLEESAVKQKKNTDKDHPNTGNKKGSHSNSRKNIDKTAVTSGNHVCPCKESETFVQFANPSQLQCSDNVKIVLDKNLKDCTELVLKQLQEMKPTVSLKKLEVHSNDPDMSVMKDISIGKATGRGQY

SEQ ID NO: 6554 - protein, 345 aa, Homo sapiens
MPARALLPRRMGHRTLASTPALWASIPCPRSELRLDLVLPSGQSFRWREQSPAHWSGVLADQVWTLTQTEEQLHCTVYRGDKSQASRPTPDELEAVRKYFQLDVTLAQLYHHWGSVDSHFQEVAQKFQGVRLLRQDPIECLFSFICSSNNNIARITGMVERLCQAFGPRLIQLDDVTYHGFPSLQALAGPEVEAHLRKLGLGYRARYVSASARAILEEQGGLAWLQQLRESSYEEAHKALCILPGVGTKVADCICLMALDKPQAVPVDVHMWHIAQRDYSWHPTTSQAKGPSPQTNKELGNFFRSLWGPYAGWAQAVLFSADLRQSRHAQEPPAKRRKGSKGPEG

SEQ ID NO: 6555 - protein, 687 aa, Homo sapiens
MALDGIRMPDGCYADGTWELSVHVTDLNRDVTLRVTGEVHIGGVMLKLVEKLDVKKDWSDHALWWEKKRTWLLKTHWTLDKYGIQADAKLQFTPQHKLLRLQLPNMKYVKVKVNFSDRVFKAVSDICKTFNIRHPEELSLLKKPRDPTKKKKKKLDDQSEDEALELEGPLITPGSGSIYSSPGLYSKTMTPTYDAHDGSPLSPTSAWFGDSALSEGNPGILAVSQPITSPEILAKMFKPQALLDKAKINQGWLDSSRSLMEQDVKENEALLLRFKYYSFFDLNPKYDAIRINQLYEQAKWAILLEEIECTEEEMMMFAALQYHINKLSIMTSENHLNNSDKEVDEVDAALSDLEITLEGGKTSTILGDITSIPELADYIKVFKPKKLTLKGYKQYWCTFKDTSISCYKSKEESSGTPAHQMNLRGCEVTPDVNISGQKFNIKLLIPVAEGMNEIWLRCDNEKQYAHWMAACRLASKGKTMADSSYNLEVQNILSFLKMQHLNPDPQLIPEQITTDITPECLVSPRYLKKYKNKQPGYIRDLITARILEAHQNVAQMSLIEAKMRFIQAWQSLPEFGITHFIARFQGGKKEELIGIAYNRLIRMDASTGDAIKTWRFSNMKQWNVNWEIKMVTVEFADEVRLSFICTEVDCKVVHEFIGGYIFLSTRAKDQNESLDEEMFYKLTSGWV

SEQ ID NO: 6556 - protein, 532 aa, Homo sapiens
MHCTLTMETEAIDGYITCDNELSPEREHSNMAIDLTSSTPNGQHASPSHMTSTNSVKLEMQSDEECDRKPLSREDEIRGHDEGSSLEEPLIESSEVADNRKVQELQGEGGIRLPNGKLKCDVCGMVCIGPNVLMVHKRSHTGERPFHCNQCGASFTQKGNLLRHIKLHSGEKPFKCPFCSYACRRRDALTGHLRTHSVGKPHKCNYCGRSYKQRSSLEEHKERCHNYLQNVSMEAAGQVMSHHVPPMEDCKEQEPIMDNNISLVPFERPAVIEKLTGNMGKRKSSTPQKFVGEKLMRFSYPDIHFDMNLTYEKEAELMQSHMMDQAINNAITYLGAEALHPLMQHPPSTIAEVAPVISSAYSQVYHPNRIERPISRETADSHENNMDGPISLIRPKSRPQEREASPSNSCLDSTDSESSHDDHQSYQGHPALNPKRKQSPAYMKEDVKALDTTKAPKGSLKDIYKVFNGEGEQIRAFKCEHCRVLFLDHVMYTIHMGCHGYRDPLECNICGYRSQDRYEFSSHIVRGEHTFH

SEQ ID NO: 6557 - protein, 1102 aa, Homo sapiens
MFQLPVNNLGSLRKARKTVKKILSDIGLEYCKEHIEDFKQFEPNDFYLKNTTWEDVGLWDPSLTKNQDYRTKPFCCSACPFSSKFFSAYKSHFRNVHSEDFENRILLNCPYCTFNADKKTLETHIKIFHAPNASAPSSSLSTFKDKNKNDGLKPKQADSVEQAVYYCKKCTYRDPLYEIVRKHIYREHFQHVAAPYIAKAGEKSLNGAVPLGSNAREESSIHCKRCLFMPKSYEALVQHVIEDHERIGYQVTAMIGHTNVVVPRSKPLMLIAPKPQDKKSMGLPPRIGSLASGNVRSLPSQQMVNRLSIPKPNLNSTGVNMMSSVHLQQNNYGVKSVGQGYSVGQSMRLGLGGNAPVSIPQQSQSVKQLLPSGNGRSYGLGSEQRSQAPARYSLQSANASSLSSGQLKSPSLSQSQASRVLGQSSSKPAAAATGPPPGNTSSTQKWKICTICNELFPENVYSVHFEKEHKAEKVPAVANYIMKIHNFTSKCLYCNRYLPTDTLLNHMLIHGLSCPYCRSTFNDVEKMAAHMRMVHIDEEMGPKTDSTLSFDLTLQQGSHTNIHLLVTTYNLRDAPAESVAYHAQNNPPVPPKPQPKVQEKADIPVKSSPQAAVPYKKDVGKTLCPLCFSILKGPISDALAHHLRERHQVIQTVHPVEKKLTYKCIHCLGVYTSNMTASTITLHLVHCRGVGKTQNGQDKTNAPSRLNQSPSLAPVKRTYEQMEFPLLKKRKLDDDSDSPSFFEEKPEEPVVLALDPKGHEDDSYEARKSFLTKYFNKQPYPTRREIEKLAASLWLWKSDIASHFSNKRKKCVRDCEKYKPGVLLGFNMKELNKVKHEMDFDAEWLFENHDEKDSRVNASKTADKKLNLGKEDDSSSDSFENLEEESNESGSPFDPVFEVEPKISNDNPEEHVLKVIPEDASESEEKLDQKEDGSKYETIHLTEEPTKLMHNASDSEVDQDDVVEWKDGASPSESGPGSQQVSDFEDNTCEMKPGTWSDESSQSEDARSSKPAAKKKATMQGDREQLKWKNSSYGKVEGFWSKDQSQWKNASENDERLSNPQIEWQNSTIDSEDGEQFDNMTDGVAEPMHGSLAGVKLSSQQA

SEQ ID NO: 6558 - protein, 835 aa, Homo sapiens
MAAPILKDVVAYVEVWSSNGTENYSKTFTTQLVDMGAKVSKTFNKQVTHVIFKDGYQSTWDKAQKRGVKLVSVLWVEKCRTAGAHIDESLFPAANMNEHLSSLIKKKRKCMQPKDFNFKTPENDKRFQKKFEKMAKELQRQKTNLDDDVPILLFESNGSLIYTPTIEINSRHHSAMEKRLQEMKEKRENLSPTSSQMIQQSHDNPSNSLCEAPLNISRDTLCSDEYFAGGLHSSFDDLCGNSGCGNQERKLEGSINDIKSDVCISSLVLKANNIHSSPSFTHLDKSSPQKFLSNLSKEEINLQRNIAGKVVTPDQKQAAGMSQETFEEKYRLSPTLSSTKGHLLIHSRPRSSSVKRKRVSHGSHSPPKEKCKRKRSTRRSIMPRLQLCRSEDRLQHVAGPALEALSCGESSYDDYFSPDNLKERYSENLPPESQLPSSPAQLSCRSLSKKERTSIFEMSDFSCVGKKTRTVDITNFTAKTISSPRKTGNGEGRATSSCVTSAPEEALRCCRQAGKEDACPEGNGFSYTIEDPALPKGHDDDLTPLEGSLEEMKEAVGLKSTQNKGTTSKISNSSEGEAQSEHEPCFIVDCNMETSTEEKENLPGGYSGSVKNRPTRHDVLDDSCDGFKDLIKPHEELKKSGRGKKPTRTLVMTSMPSEKQNVVIQVVDKLKGFSIAPDVCETTTHVLSGKPLRTLNVLLGIARGCWVLSYDWVLWSLELGHWISEEPFELSHHFPAAPLCRSECHLSAGPYRGTLFADQPAMFVSPASSPPVAKLCELVHLCGGRVSQVPRQASIVIGPYSGKKKATVKYLSEKWVLDSITQHKVCAPENYLLSQ

SEQ ID NO: 6559 - protein, 811 aa, Homo sapiens
MDRRSMGETESGDAFLDLKKPPASKCPHRYTKEELLDIKELPHSKQRPSCLSEKYDSDGVWDPEKWHASLYPASGRSSPVESLKKELDTDRPSLVRRIVGIVECNGGVAEEDEVEVILAQEPAADQEVPRDAVLPEQSPGDFDFNEFFNLDKVPCLASMIEDVLGEGSVSASRFSRWFSNPSRSGSRSSSLGSTPHEELERLAGLEQAILSPGQNSGNYFAPIPLEDHAENKVDILEMLQKAKVDLKPLLSSLSANKEKLKESSHSGVVLSVEEVEAGLKGLKVDQQVKNSTPFMAEHLEETLSAVTNNRQLKKDGDMTAFNKLVSTMKRNLESHLMSPAEIPGQPVPKNILQELLGQPVQRPASSNLLSGLMGSLEPTTSLLGQRAPSPPLSQVFQTRAASADYLRPRIPSPIGFTPGPQQLLGDPFQGMRKPMSPITAQQMSQLELQQAALEGLALPHDLAVQAANFYQPGFGKPQVDRTRDGFRNRQQRVTKSPAPVHRGNSSSPAPAASITSMLSPSFTPTSVIRKMYESKEKSKEEPASGKAALGDSKEDTQKASEENLLSSSSVPSADRDSSPTTNSKLSALQRSSCSTPLSQANRYTKEQDYRPKATGRKTPTLASPVPTTPFLRPVHQVPLVPHVPMVRPAHQLHPGLVQRMLAQGVHPQHLPSLLQTGVLPPGMDLSHLQGISGPILGQPFYPLPAASHPLLNPRPGTPLHLAMVQQQLQRSVLHPPGSGSHAAAVSVQTTPQNVPSRSGLPHMHSQLEHRPSQRSSSPVGLAKWFGSDVLQQPLPSMPAKVISVDELEYRQ

SEQ ID NO: 6560 - protein, 317 aa, Homo sapiens
MSCQAFTSADTFIPLNSDASATLPLIMHHSAAECLPVSNHATNVMSTVPSILSLIQTPKCLCTHFSVTTLGNTATGLHYSVPSCHYGNQPSTYGVMAGSLTPCLYKFPDHTLSHGFPPIHQPLLAEDPTAADFKQELRRKSKLVEEPIDMDSPEIRELEKFANEFKVRRIKLGYTQTNVGEALAAVHGSEFSQTTICRFENLQLSFKNACKLKAILSKWLEEAEQVGALYNEKVGANERKRKRRTTISIAAKDALERHFGEQNKPSSQEIMRMAEELNLEKEVVRVWFCNRRQREKRVKTSLNQSLFSISKEHLECR

SEQ ID NO: 6561 - protein, 1091 aa, Homo sapiens
MWQEAMRRRRYLRDRSEEAAGGGDGLPRSRDWLYESYYCMSQQHPLIVFLLLIVMGSCLALLAVFFALGLEVEDHVAFLITVPTALAIFFAIFILVCIESVFKKLLRLFSLVIWICLVAMGYLFMCFGGTVSPWDQVSFFLFIIFVVYTMLPFNMRDAIIASVLTSSSHTIVLSVCLSATPGGKEHLVWQILANVIIFICGNLAGAYHKHLMELALQQTYQDTCNCIKSRIKLEFEKRQQERLLLSLLPAHIAMEMKAEIIQRLQGPKAGQMENTNNFHNLYVKRHTNVSILYADIVGFTRLASDCSPGELVHMLNELFGKFDQIAKENECMRIKILGDCYYCVSGLPISLPNHAKNCVKMGLDMCEAIKKVRDATGVDINMRVGVHSGNVLCGVIGLQKWQYDVWSHDVTLANHMEAGGVPGRVHISSVTLEHLNGAYKVEEGDGDIRDPYLKQHLVKTYFVINPKGERRSPQHLFRPRHTLDGAKMRASVRMTRYLESWGAAKPFAHLHHRDSMTTENGKISTTDVPMGQHNFQNRTLRTKSQKKRFEEELNERMIQAIDGINAQKQWLKSEDIQRISLLFYNKVLEKEYRATALPAFKYYVTCACLIFFCIFIVQILVLPKTSVLGISFGAAFLLLAFILFVCFAGQLLQCSKKASPLLMWLLKSSGIIANRPWPRISLTIITTAIILMMAVFNMFFLSDSEETIPPTANTTNTSFSASNNQVAILRAQNLFFLPYFIYSCILGLISCSVFLRVNYELKMLIMMVALVGYNTILLHTHAHVLGDYSQVLFERPGIWKDLKTMGSVSLSIFFITLLVLGRQNEYYCRLDFLWKNKFKKEREEIETMENLNRVLLENVLPAHVAEHFLARSLKNEELYHQSYDCVCVMFASIPDFKEFYTESDVNKEGLECLRLLNEIIADFDDLLSKPKFSGVEKIKTIGSTYMAATGLSAVPSQEHSQEPERQYMHIGTMVEFAFALVGKLDAINKHSFNDFKLRVGINHGPVIAGVIGAQKPQYDIWGNTVNVASRMDSTGVLDKIQVTEETSLVLQTLGYTCTCRGIINVKGKGDLKTYFVNTEMSRSLSQSNVAS

SEQ ID NO: 6562 - protein, 802 aa, Homo sapiens
MEEMEEELKCPVCGSFYREPIILPCSHNLCQACARNILVQTPESESPQSHRAAGSGVSDYDYLDLDKMSLYSEADSGYGSYGGFASAPTTPCQKSPNGVRVFPPAMPPPATHLSPALAPVPRNSCITCPQCHRSLILDDRGLRGFPKNRVLEGVIDRYQQSKAAALKCQLCEKAPKEATVMCEQCDVFYCDPCRLRCHPPRGPLAKHRLVPPAQGRVSRRLSPRKVSTCTDHELENHSMYCVQCKMPVCYQCLEEGKHSSHEVKALGAMWKLHKSQLSQALNGLSDRAKEAKEFLVQLRNMVQQIQENSVEFEACLVAQCDALIDALNRRKAQLLARVNKEHEHKLKVVRDQISHCTVKLRQTTGLMEYCLEVIKENDPSGFLQISDALIRRVHLTEDQWGKGTLTPRMTTDFDLSLDNSPLLQSIHQLDFVQVKVPATPILQLEECCTHNNSATLSWKQPPLSTVPADGYILELDDGNGGQFREVYVGKETMCTVDGLHFNSTYNARVKAFNKTGVSPYSKTLVLQTSEDTDSEEQTLPFPVPSERLPLRRMSPFSSTLNLQPSFPGRSYFDFRSSPHQLSLHSSLQSLNAPGCNFETQSAPYSQLVDIKKLLAVAWFAFDPGSAHSDIILSNDNLTVTCSSYDDRVVLGKTGFSKGIHYWELTVDRYDNHPDPAFGVARMDVMKDVMLGKDDKAWAMYVDNNRSWFMHNNSHTNRTEGGITKGATIGVLLDLNRKNLTFFINDEQQGPIAFDNVEGLFFPAVSLNRNVQVSTLPLRLNSCCWLPVQRLPRAVQSNRREGS

SEQ ID NO: 6563 - protein, 576 aa, Homo sapiens
MDSVAFEDVSVSFSQEEWALLAPSQKKLYRDVMQETFKNLASIGEKWEDPNVEDQHKNQGRNLRSHTGERLCEGKEGSQCAENFSPNLSVTKKTAGVKPYECTICGKAFMRLSSLTRHMRSHTGYELFEKPYKCKECEKAFSYLKSFQRHERSHTGEKPYKCKQCGKTFIYHQPFQRHERTHIGEKPYECKQCGKALSCSSSLRVHERIHTGEKPYECKQCGKAFSCSSSIRVHERTHTGEKPYACKECGKAFISHTSVLTHMITHNGDRPYKCKECGKAFIFPSFLRVHERIHTGEKPYKCKQCGKAFRCSTSIQIHERIHTGEKPYKCKECGKSFSARPAFRVHVRVHTGEKPYKCKECGKAFSRISYFRIHERTHTGEKPYECKKCGKTFNYPLDLKIHKRNHTGEKPYECKECAKTFISLENFRRHMITHTGDGPYKCRDCGKVFIFPSALRTHERTHTGEKPYECKQCGKAFSCSSYIRIHKRTHTGEKPYECKECGKAFIYPTSFQGHMRMHTGEKPYKCKECGKAFSLHSSFQRHTRIHNYEKPLECKQCGKAFSVSTSLKKHMRMHNR

SEQ ID NO: 6564 - protein, 1302 aa, Homo sapiens
MEELSADEIRRRRLARLAGGQTSQPTTPLTSPQRENPPGPPIAASAPGPSQSLGLNVHNMTPATSPIGASGVAHRSQSSEGVSSLSSSPSNSLETQSQSLSRSQSMDIDGVSCEKSMSQVDVDSGIENMEVDENDRREKRSLSDKEPSSGPEVSEEQALQLVCKIFRVSWKDRDRDVIFLSSLSAQFKQNPKEVFSDFKDLIGQILMEVLMMSTQTRDENPFASLTATSQPIAAAARSPDRNLLLNTGSNPGTSPMFCSVASFGASSLSSLYESSPAPTPSFWSSVPVMGPSLASPSRAASQLAVPSTPLSPHSAASGTAAGSQPSSPRYRPYTVTHPWASSGVSILSSSPSPPALASSPQAVPASSSRQRPSSTGPPLPPASPSATSRRPSSLRISPSLGASGGASNWDSYSDHFTIETCKETDMLNYLIECFDRVGIEEKKAPKMCSQPAVSQLLSNIRSQCISHTALVLQGSLTQPRSLQQPSFLVPYMLCRNLPYGFIQELVRTTHQDEEVFKQIFIPILQGLALAAKECSLDSDYFKYPLMALGELCETKFGKTHPVCNLVASLRLWLPKSLSPGCGRELQRLSYLGAFFSFSVFAEDDVKVVEKYFSGPAITLENTRVVSQSLQHYLELGRQELFKILHSILLNGETREAALSYMAAVVNANMKKAQMQTDDRLVSTDGFMLNFLWVLQQLSTKIKLETVDPTYIFHPRCRITLPNDETRVNATMEDVNDWLTELYGDQPPFSEPKFPTECFFLTLHAHHLSILPSCRRYIRRLRAIRELNRTVEDLKNNESQWKDSPLATRHREMLKRCKTQLKKLVRCKACADAGLLDESFLRRCLNFYGLLIQLLLRILDPAYPDITLPLNSDVPKVFAALPEFYVEDVAEFLFFIVQYSPQALYEPCTQDIVMFLVVMLCNQNYIRNPYLVAKLVEVMFMTNPAVQPRTQKFFEMIENHPLSTKLLVPSLMKFYTDVEHTGATSEFYDKFTIRYHISTIFKSLWQNIAHHGTFMEEFNSGKQFVRYINMLINDTTFLLDESLESLKRIHEVQEEMKNKEQWDQLPRDQQQARQSQLAQDERVSRSYLALATETVDMFHILTKQVQKPFLRPELGPRLAAMLNFNLQQLCGPKCRDLKVENPEKYGFEPKKLLDQLTDIYLQLDCARFAKAIADDQRSYSKELFEEVISKMRKAGIKSTIAIEKFKLLAEKVEEIVAKNARAEIDYSDAPDEFRDPLMDTLMTDPVRLPSGTIMDRSIILRHLLNSPTDPFNRQTLTESMLEPVPELKEQIQAWMREKQNSDH

SEQ ID NO: 6565 - protein, 1131 aa, Homo sapiens
MAGARSRDPWGASGICYLFGSLLVELLFSRAVAFNLDVMGALRKEGEPGSLFGFSVALHRQLQPRPQSWLLVGAPQALALPGQQANRTGGLFACPLSLEETDCYRVDIDQGADMQKESKENQWLGVSVRSQGPGGKIVTCAHRYEARQRVDQILETRDMIGRCFVLSQDLAIRDELDGGEWKFCEGRPQGHEQFGFCQQGTAAAFSPDSHYLLFGAPGTYNWKGLLFVTNIDSSDPDQLVYKTLDPADRLPGPAGDLALNSYLGFSIDSGKGLVRAEELSFVAGAPRANHKGAVVILRKDSASRLVPEVMLSGERLTSGFGYSLAVADLNSDGWPDLIVGAPYFFERQEELGGAVYVYLNQGGHWAGISPLRLCGSPDSMFGISLAVLGDLNQDGFPDIAVGAPFDGDGKVFIYHGSSLGVVAKPSQVLEGEAVGIKSFGYSLSGSLDMDGNQYPDLLVGSLADTAVLFRARPILHVSHEVSIAPRSIDLEQPNCAGGHSVCVDLRVCFSYIAVPSSYSPTVDADTDRRLRGQVPRVTFLSRNLEEPKHQASGTVWLKHQHDRVCGDAMFQLQENVKDKLRAIVVTLSYSLQTPRLRRQAPGQGLPPVAPILNAHQPSTQRAEIHFLKQGCGEDKICQSNLQLVRARFCTRVSDTEFQPLPMDVDGTTALFALSGQPVIGLELMVTNLPSDPAQPQADGDDAHEAQLLVMLPDSLHYSGVRALDPAEKPLCLSNENASHVECELGNPMKRGAQVTFYLILSTSGISIETTELEVELLLATISEQELHPVSARARVFIELPLSIAGMAIPQQLFFSGVVRGERAMQSERDVGSKVKYEVTVSNQGQSLRTLGSAFLNIMWPHEIANGKWLLYPMQVELEGGQGPGQKGLCSPRPNILHLDVDSRDRRRRELEPPEQQEPGERQEPSMSWWPVSSAEKKKNITLDCARGTANCVVFSCPLYSFDRAAVLHVWGRLWNSTFLEEYSAVKSLEVIVRANITVKSSIKNLMLRDASTVIPVMVYLDPMAVVAEGVPWWVILLAVLAGLLVLALLVLLLWKMGFFKRAKHPEATVPQYHAVKIPREDRQQFKEEKTGTILRNNWGSPRREGPDAHPILAADGHPELGPDGHPGPGTA

SEQ ID NO: 6566 - protein, 885 aa, Homo sapiens
MAGGGGDLSTRRLNECISPVANEMNHLPAHSHDLQRMFTEDQGVDDRLLYDIVFKHFKRNKVEISNAIKKTFPFLEGLRDRDLITNKMFEDSQDSCRNLVPVQRVVYNVLSELEKTFNLPVLEALFSDVNMQEYPDLIHIYKGFENVIHDKLPLQESEEEEREERSGLQLSLEQGTGENSFRSLTWPPSGSPSHAGTTPPENGLSEHPCETEQINAKRKDTTSDKDDSLGSQQTNEQCAQKAEPTESCEQIAVQVNNGDAGREMPCPLPCDEESPEAELHNHGIQINSCSVRLVDIKKEKPFSNSKVECQAQARTHHNQASDIIVISSEDSEGSTDVDEPLEVFISAPRSEPVINNDNPLESNDEKEGQEATCSRPQIVPEPMDFRKLSTFRESFKKRVIGQDHDFSESSEEEAPAEASSGALRSKHGEKAPMTSRSTSTWRIPSRKRRFSSSDFSDLSNGEELQETCSSSLRRGSGSQPQEPENKKCSCVMCFPKGVPRSQEARTESSQASDMMDTMDVENNSTLEKHSGKRRKKRRHRSKVNGLQRGRKKDRPRKHLTLNNKVQKKRWQQRGRKANTRPLKRRRKRGPRIPKDENINFKQSELPVTCGEVKGTLYKERFKQGTSKKCIQSEDKKWFTPREFEIEGDRGASKNWKLSIRCGGYTLKVLMENKFLPEPPSTRKKRILESHNNTLVDPCPENSNICEVCNKWGRLFCCDTCPRSFHEHCHIPSVEANKNPWSCIFCRIKTIQERCPESQSGHQESEVLMRQMLPEEQLKCEFLLLKVYCDSKSCFFASEPYYNREGSQGPQKPMWLNKVKTSLNEQMYTRVEGFVQDMRLIFHNHKEFYREDKFTRLGIQVQDIFEKNFRNIFAIQETSKNIIMFI

SEQ ID NO: 6567 - protein, 1422 aa, Homo sapiens
MDPSMGVNSVTISVEGMTCNSCVWTIEQQIGKVNGVHHIKVSLEEKNATIIYDPKLQTPKTLQEAIDDMGFDAVIHNPDPLPVLTDTLFLTVTASLTLPWDHIQSTLLKTKGVTDIKIYPQKRTVAVTIIPSIVNANQIKELVPELSLDTGTLEKKSGACEDHSMAQAGEVVLKMKVEGMTCHSCTSTIEGKIGKLQGVQRIKVSLDNQEATIVYQPHLISVEEMKKQIEAMGFPAFVKKQPKYLKLGAIDVERLKNTPVKSSEGSQQRSPSYTNDSTATFIIDGMHCKSCVSNIESTLSALQYVSSIVVSLENRSAIVKYNASSVTPESLRKAIEAVSPGLYRVSITSEVESTSNSPSSSSLQKIPLNVVSQPLTQETVINIDGMTCNSCVQSIEGVISKKPGVKSIRVSLANSNGTVEYDPLLTSPETLRGAIEDMGFDATLSDTNEPLVVIAQPSSEMPLLTSTNEFYTKGMTPVQDKEEGKNSSKCYIQVTGMTCASCVANIERNLRREEGIYSILVALMAGKAEVRYNPAVIQPPMIAEFIRELGFGATVIENADEGDGVLELVVRGMTCASCVHKIESSLTKHRGILYCSVALATNKAHIKYDPEIIGPRDIIHTIESLGFEASLVKKDRSASHLDHKREIRQWRRSFLVSLFFCIPVMGLMIYMMVMDHHFATLHHNQNMSKEEMINLHSSMFLERQILPGLSVMNLLSFLLCVPVQGKTSEALAKLISLQATEATIVTLDSDNILLSEEQVDVELVQRGDIIKVVPGGKFPVDGRVIEGHSMVDESLITGEAMPVAKKPGSTVIAGSINQNGSLLICATHVGADTTLSQIVKLVEEAQTSKAPIQQFADKLSGYFVPFIVFVSIATLLVWIVIGFLNFEIVETYFPGYNRSISRTETIIRFAFQASITVLCIACPCSLGLATPTAVMVGTGVGAQNGILIKGGEPLEMAHKVKVVVFDKTGTITHGTPVVNQVKVLTESNRISHHKILAIVGTAESNSEHPLGTAITKYCKQELDTETLGTCIDFQVVPGCGISCKVTNIEGLLHKNNWNIEDNNIKNASLVQIDASNEQSSTSSSMIIDAQISNALNAQQYKVLIGNREWMIRNGLVINNDVNDFMTEHERKGRTAVLVAVDDELCGLIAIADTVKPEAELAIHILKSMGLEVVLMTGDNSKTARSIASQVGITKVFAEVLPSHKVAKVKQLQEEGKRVAMVGDGINDSPALAMANVGIAIGTGTDVAIEAADVVLIRNDLLDVVASIDLSRKTVKRIRINFVFALIYNLVGIPIAAGVFMPIGLVLQPWMGSAAMAASSVSVVLSSLFLKLYRKPTYESYELPARSQIGQKSPSEISVHVGIDDTSRNSPKLGLLDRIVNYSRASINSLLSDKRSLNSVVTSEPDKHSLLVGDFREDDDTAL

SEQ ID NO: 6568 - protein, 377 aa, Homo sapiens
MDSALSDPHNGSAEAGGPTNSTTRPPSTPEGIALAYGSLLLMALLPIFFGALRSVRCARGKNASDMPETITSRDAARFPIIASCTLLGLYLFFKIFSQEYINLLLSMYFFVLGILALSHTISPFMNKFFPASFPNRQYQLLFTQGSGENKEEIINYEFDTKDLVCLGLSSIVGVWYLLRKHWIANNLFGLAFSLNGVELLHLNNVSTGCILLGGLFIYDVFWVFGTNVMVTVAKSFEAPIKLVFPQDLLEKGLEANNFAMLGLGDVVIPGIFIALLLRFDISLKKNTHTYFYTSFAAYIFGLGLTIFIMHIFKHAQPALLYLVPACIGFPVLVALAKGEVTEMFSYEESNPKDPAAVTESKEGTEASASKGLEKKEK

SEQ ID NO: 6569 - protein, 671 aa, Homo sapiens
MKQIFFLDDSGPPFGHMVLALGGYLGGFDGNFLWNRIGAEYSSNVPVWSLRLLPALAGALSVPMAYQIVLELHFSHCAAMGAALLMLIENALITQSRLMLLESVLIFFNLLAVLSYLKFFNCQKHSPFSLSWWFWLTLTGVACSCAVGIKYMGVFTYVLVLGVAAVHAWHLLGDQTLSNVCVFCHLLARAVALLVIPVVLYLLFFYVHLILVFRSGPHDQIMSSAFQASLEGGLARITQGQPLEVAFGSQVTLRNVFGKPVPCWLHSHQDTYPMIYENGRGSSHQQQVTCYPFKDVNNWWIVKDPRRHQLVVSSPPRPVRHGDMVQLVHGMTTRSLNTHDVAAPLSPHSQEVSCYIDYNISMPAQNLWRLEIVNRGSDTDVWKTILSEVRFVHVNTSAVLKLSGAHLPDWGYRQLEIVGEKLSRGYHGSTVWNVEEHRYGASQEQRERERELHSPAQVDVSRNLSFMARFSELQWRMLALRSDDSEHKYSSSPLEWVTLDTNIAYWLHPRTSAQIHLLGNIVIWVSGSLALAIYALLSLWYLLRRRRNVHDLPQDAWLRWVLAGALCAGGWAVNYLPFFLMEKTLFLYHYLPALTFQILLLPVVLQHISDHLCRSQLQRSIFSALVVAWYSSACHVSNTLRPLTYGDKSLSPHELKALRWKDSWDILIRKH

SEQ ID NO: 6570 - protein, 479 aa, Homo sapiens
MTTLAGAVPRMMRPGPGQNYPRSGFPLEVSTPLGQGRVNQLGGVFINGRPLPNHIRHKIVEMAHHGIRPCVISRQLRVSHGCVSKILCRYQETGSIRPGAIGGSKPKQVTTPDVEKKIEEYKRENPGMFSWEIRDKLLKDAVCDRNTVPSVSSISRILRSKFGKGEEEEADLERKEAEESEKKAKHSIDGILSERASAPQSDEGSDIDSEPDLPLKRKQRRSRTTFTAEQLEELERAFERTHYPDIYTREELAQRAKLTEARVQVWFSNRRARWRKQAGANQLMAFNHLIPGGFPPTAMPTLPTYQLSETSYQPTSIPQAVSDPSSTVHRPQPLPPSTVHQSTIPSNPDSSSAYCLPSTRHGFSSYTDSFVPPSGPSNPMNPTIGNGLSPQVMGLLTNHGGVPHQPQTDYALSPLTGGLEPTTTVSASCSQRLDHMKSLDSLPTSQSYCPPTYSTTGYSMDPVTGYQYGQYGQSKPWTF

SEQ ID NO: 6571 - protein, 945 aa, Homo sapiens
MAEGQGGGGQRWDWAGGGRAAEEEVVRRRCRRGEEAQVAQPWPEGSRGTAAGPPVEERFRQLHLRKQVSYRKAITKSGLQHLAPPPPTPGAPCSESERQIRSTVDWSESATYGEHIWFETNVSGDFCYVGEQYCVARMLKSVSRRKCAACKIVVHTPCIEQLEKINFRCKPSFRESGSRNVREPTFVRHHWVHRRRQDGKCRHCGKGFQQKFTFHSKEIVAISCSWCKQAYHSKVSCFMLQQIEEPCSLGVHAAVVIPPTWILRARRPQNTLKASKKKKRASFKRKSSKKGPEEGRWRPFIIRPTPSPLMKPLLVFVNPKSGGNQGAKIIQSFLWYLNPRQVFDLSQGGPKEALEMYRKVHNLRILACGGDGTVGWILSTLDQLRLKPPPPVAILPLGTGNDLARTLNWGGGYTDEPVSKILSHVEEGNVVQLDRWDLHAEPNPEAGPEDRDEGATDRLPLDVFNNYFSLGFDAHVTLEFHESREANPEKFNSRFRNKMFYAGTAFSDFLMGSSKDLAKHIRVVCDGMDLTPKIQDLKPQCVVFLNIPRYCAGTMPWGHPGEHHDFEPQRHDDGYLEVIGFTMTSLAALQVGGHGERLTQCREVVLTTSKAIPVQVDGEPCKLAASRIRIALRNQATMVQKAKRRSAAPLHSDQQPVPEQLRIQVSRVSMHDYEALHYDKEQLKEASVPLGTVVVPGDSDLELCRAHIERLQQEPDGAGAKSPTCQKLSPKWCFLDATTASRFYRIDRAQEHLNYVTEIAQDEIYILDPELLGASARPDLPTPTSPLPTSPCSPTPRSLQGDAAPPQGEELIEAAKRNDFCKLQELHRAGGDLMHRDEQSRTLLHHAVSTGSKDVVRYLLDHAPPEILDAVEENGETCLHQAAALGQRTICHYIVEAGASLMKTDQQGDTPRQRAEKAQDTELAAYLENRQHYQMIQREDQETAV

SEQ ID NO: 6572 - protein, 701 aa, Homo sapiens
MEEDTDYRIRFSSLCFFNDHVGFHGTIKSSPSDFIVIEIDEQGQLVNKTIDEPIFKISEIQLEPNNFPKKPKLDLQNLSLEDGRNQEVHTLIKYTDGDQNHQSGSEKEDTIVDGTSKCEEKADVLSSFLDEKTHELLNNFACDVREKWLSKTELIGLPPEFSIGRILDKNQRASLHSAIRQKFPFLVTVGKNSEIVVKPNLEYKELCHLVSEEEAFDFFKYLDAKKENSKFTFKPDTNKDHRKAVHHFVNKKFGNLVETKSFSKMNCSAGNPNVVVTVRFREKAHKRGKRPLSECQEGKVIYTAFTLRKENLEMFEAIGFLAIKLGVIPSDFSYAGLKDKKAITYQAMVVRKVTPERLKNIEKEIEKKRMNVFNIRSVDDSLRLGQLKGNHFDIVIRNLKKQINDSANLRERIMEAIENVKKKGFVNYYGPQRFGKGRKVHTDQIGLALLKNEMMKAIKLFLTPEDLDDPVNRAKKYFLQTEDAKGTLSLMPEFKVRERALLEALHRFGMTEEGCIQAWFSLPHSMRIFYVHAYTSKIWNEAVSYRLETYGARVVQGDLVCLDEDIDDENFPNSKIHLVTEEEGSANMYAIHQVVLPVLGYNIQYPKNKVGQWYHDILSRDGLQTCRFKVPTLKLNIPGCYRQILKHPCNLSYQLMEDHDIDVKTKGSHIDETALSLLISFDLDASCYATVCLKEIMKHDV

SEQ ID NO: 6573 - protein, 247 aa, Homo sapiens
MTEDSQRNFRSVYYEKVGFRGVEEKKSLEILLKDDRLDTEKLCTFSQRFPLPSMYRALVWKVLLGILPPHHESHAKVMMYRKEQYLDVLHALKVVRFVSDATPQAEVYLRMYQLESGKLPRSPSFPLPKAFEQYLNLEDGRLLTHLRMCSAAPKLPYDLWFKRCFAGCLPESSLQRVWDKVVSGSCKILVFVAVEILLTFKIKVMALNSAEKITKFLENIPQDSSDAIVSKAIDLWHKHCGTPVHSS

SEQ ID NO: 6574 - protein, 692 aa, Homo sapiens
MKIFCSRANPTTGSVEWLEEDEHYDYHQEIARSSYADMLHDKDRNVKYYQGIRAAVSRVKDRGQKALVLDIGTGTGLLSMMAVTAGADFCYAIEVFKPMADAAVKIVEKNGFSDKIKVINKHSTEVTVGPEGDMPCRANILVTELFDTELIGEGALPSYEHAHRHLVEENCEAVPHRATVYAQLVESGRMWSWNKLFPIHVQTSLGEQVIVPPVDVESCPGAPSVCDIQLNQVSPADFTVLSDVLPMFSIDFSKQVSSSAACHSRRFEPLTSGRAQVVLSWWDIEMDPEGKIKCTMAPFWAHSDPEEMQWRDHWMQCVYFLPQEEPVVQGSALYLVAHHDDYCVWYSLQRTSPEKNERVRQMRPVCDCQAHLLWNRPRFGEINDQDRTDRYVQALRTVLKPDSVCLCVSDGSLLSVLAHHLGVEQVFTVESSAASHKLLRKIFKANHLEDKINIIEKRPELLTNEDLQGRKVSLLLGEPFFTTSLLPWHNLYFWYVRTAVDQHLGPGAMVMPQAASLHAVVVEFRDLWRIRSPCGDCEGFDVHIMDDMIKRALDFRESREAEPHPLWEYPCRSLSEPWQILTFDFQQPVPLQPLCAEGTVELRRPGQSHAAVLWMEYHLTPECTLSTGLLEPADPEGGCCWNPHCKQAVYFFSPAPDPRALLGGPRTVSYAVEFHPDTGDIIMEFRHADTPD

SEQ ID NO: 6575 - protein, 538 aa, Homo sapiens
MFFLYTDFFLSLVAVPAAAPVCQPKSATNGQPPAPAPTPTPRLSISSRATVVARMEGTSQGGLQTVMKWKTVVAIFVVVVVYLVTGGLVFRALEQPFESSQKNTIALEKAEFLRDHVCVSPQELETLIQHALDADNAGVSPIGNSSNNSSHWDLGSAFFFAGTVITTIGYGNIAPSTEGGKIFCILYAIFGIPLFGFLLAGIGDQLGTIFGKSIARVEKVFRKKQVSQTKIRVISTILFILAGCIVFVTIPAVIFKYIEGWTALESIYFVVVTLTTVGFGDFVAGGNAGINYREWYKPLVWFWILVGLAYFAAVLSMIGDWLRVLSKKTKEEVGEIKAHAAEWKANVTAEFRETRRRLSVEIHDKLQRAATIRSMERRRLGLDQRAHSLDMLSPEKRSVFAALDTGRFKASSQESINNRPNNLRLKGPEQLNKHGQGASEDNIINKFGSTSRLTKRKNKDLKKTLPEDVQKIYKTFRNYSLDEEKKEEETEKMCNSDNSSTAMLTDCIQQHAELENGMIPTDTKDREPENNSLLEDRN

SEQ ID NO: 6576 - protein, 911 aa, Homo sapiens
MASHVQVFSPHTLQSSAFCSVKKLKIEPSSNWDMTGYGSHSKVYSQSKNIPLSQPATTTVSTSLPVPNPSLPYEQTIVFPGSTGHIVVTSASSTSVTGQVLGGPHNLMRRSTVSLLDTYQKCGLKRKSEEIENTSSVQIIEEHPPMIQNNASGATVATATTSTATSKNSGSNSEGDYQLVQHEVLCSMTNTYEVLEFLGRGTFGQVVKCWKRGTNEIVAIKILKNHPSYARQGQIEVSILARLSTESADDYNFVRAYECFQHKNHTCLVFEMLEQNLYDFLKQNKFSPLPLKYIRPVLQQVATALMKLKSLGLIHADLKPENIMLVDPSRQPYRVKVIDFGSASHVSKAVCSTYLQSRYYRAPEIILGLPFCEAIDMWSLGCVIAELFLGWPLYPGASEYDQIRYISQTQGLPAEYLLSAGTKTTRFFNRDTDSPYPLWRLKTPDDHEAETGIKSKEARKYIFNCLDDMAQVNMTTDLEGSDMLVEKADRREFIDLLKKMLTIDADKRITPIETLNHPFVTMTHLLDFPHSTHVKSCFQNMEICKRRVNMYDTVNQSKTPFITHVAPSTSTNLTMTFNNQLTTVHNQAPSSTSATISLANPEVSILNYPSTLYQPSAASMAAVAQRSMPLQTGTAQICARPDPFQQALIVCPPGFQGLQASPSKHAGYSVRMENAVPIVTQAPGAQPLQIQPGLLAQQAWPSGTQQILLPPAWQQLTGVATHTSVQHATVIPETMAGTQQLADWRNTHAHGSHYNPIMQQPALLTGHVTLPAAQPLNVGVAHVMRQQPTSTTSSRKSKHTVSKQRKNVISCVTVHDSPYSDSSSNTSPYSVQQRAGHNNANAFDTKGSLENHCTGNPRTIIVPPLKTQASEVLVECDSLVPGNLGPGQGRNLSLESGFPAFLLLEMLLYGS

SEQ ID NO: 6577 - protein, 588 aa, Homo sapiens
MEAADASRSNGSSPEARDARSPSGPSGSLENGTKADGKDAKTTNGHGGEAAEGKSLGSALKPGEGRSALFAGNEWRRPIIQFVESGDDKNSNYFSMDSMEGKRSPYAGLQLGAAKKPPVTFAEKGELRKSIFSESRKPTVSIMEPGETRRNSYPRADTGLFSRSKSGSEEVLCDSCIGNKQKAVKSCLVCQASFCELHLKPHLEGAAFRDHQLLEPIRDFEARKCPVHGKTMELFCQTDQTCICYLCMFQEHKNHSTVTVEEAKAEKETELSLQKEQLQLKIIEIEDEAEKWQKEKDRIKSFTTNEKAILEQNFRDLVRDLEKQKEEVRAALEQREQDAVDQVKVIMDALDERAKVLHEDKQTREQLHSISDSVLFLQEFGALMSNYSLPPPLPTYHVLLEGEGLGQSLGNFKDDLLNVCMRHVEKMCKADLSRNFIERNHMENGGDHRYVNNYTNSFGGEWSAPDTMKRYSMYLTPKGGVRTSYQPSSPGRFTKETTQKNFNNLYGTKGNYTSRVWEYSSSIQNSDNDLPVVQGSSSFSLKGYPSLMRSQSPKAQPQTWKSGKQTMLSHYRPFYVNKGNGIGSNEAP

SEQ ID NO: 6578 - protein, 1843 aa, Homo sapiens
MADTQTQVAPTPTMRMATAEDLPLPPPPALEDLPLPPPKESFSKFHQQRQASELRRLYRHIHPELRKNLAEAVAEDLAEVLGSEEPTEGDVQCMRWIFENWRLDAIGEHERPAAKEPVLCGDVQATSRKFEEGSFANSTDQEPTRPQPGGGDVRAARWLFETKPLDELTGQAKELEATVREPAASGDVQGTRMLFETRPLDRLGSRPSLQEQSPLELRSEIQELKGDVKKTVKLFQTEPLCAIQDAEGAIHEVKAACREEIQSNAVRSARWLFETRPLDAINQDPSQVRVIRGISLEEGARPDVSATRWIFETQPLDAIREILVDEKDFQPSPDLIPPGPDVQQQQHLFETRALDTLKGDEEAGAEAPPKEEVVPGDVRSTLWLFETKPLDAFRDKVQVGHLQRVDPQDGEGHLSSDSSSALPFSQSAPQRDELKGDVKTFKNLFETLPLDSIGQGEVLAHGSPSREEGTDSAGQAQGIGSPVYAMQDSKGRLHALTSVSREQIVGGDVQGYRWMFETQPLDQLGRSPSTIDVVRGITRQEVVAGDVGTARWLFETQPLEMIHQREQQERQKEEGKSQGDPQPEAPPKGDVQTIRWLFETCPMSELAEKQGSEVTDPTAKAEAQSCTWMFKPQPVDRPVGSREQHLQVSQVPAGERQTDRHVFETEPLQASGRPCGRRPVRYCSRVEIPSGQVSRQKEVFQALEAGKKEEQEPRVIAGSIPAGSVHKFTWLFENCPMGSLAAESIQGGNLLEEQPMSPSGNRMQESQETAAEGTLRTLHATPGILHHGGILMEARGPGELCLAKYVLSGTGQGHPYIRKEELVSGELPRIICQVLRRPDVDQQGLLVQEDPTGQLQLKPLRLPTPGSSGNIEDMDPELQQLLACGLGTSVARTGLVMQETEQGLVALTAYSLQPRLTSKASERSSVQLLASCIDKGDLSGLHSLRWEPPADPSPVPASEGAQSLHPTESIIHVPPLDPSMGMGHLRASGATPCPPQAIGKAVPLAGEAAAPAQLQNTEKQEDSHSGQKGMAVLGKSEGATTTPPGPGAPDLLAAMQSLRMATAEAQSLHQQVLNKHKQGPTPTATSNPIQDGLRKAGATQSNIRPGGGSDPRIPAAPRKVSREEQALPRGLPGGWVTIQDGIYTAHPVRTFDPPGGVQLSQREPQSRHRETALSVQAPRPLQGGPGQSTGPGREEPGGCTQMAWGPPGKAMAEVCPGGLQAAETTLKTAPLGRHILASGPQAAGASPHPHNAFVPPPPTLPAAVTGPDFPAGAHRAEDSIQQASEPLKDPLLHSHSSPAGQRTPGGSQTKTPKLDPTMPPKKKPQLPPKPAHLTQSHPPQRLPKPLPLSPSFSSEVGQREHQRGERDTAIPQPAKVPTTVDQGHIPLARCPSGHSQPSLQHGLSTTAPRPTKNQATGSNAQSSEPPKLNALNHDPTSPQWGPGPSGEQPMEGSHQGAPESPDSLQRNQKELQGLLNQVQALEKEAASSVDVQALRRLFEAVPQLGGAAPQAPAAHQKPEASVEQAFGELTRVSTEVAQLKEQTLARLLDIEEAVHKALSSMSSLQPEASARGHFQGPPKDHSAHKISVTVSSSARPSGSGQEVGGQTAVKNQAKVECHTEAQSQVKIRNHTEARGHTASTAPSTRRQETSREYLCPPRVLPSSRDSPSSPTFISIQSATRKPLETPSFKGNPDVSVKSTQLAQDIGQALLHQKGVQDKTGKKDITQCSVQPEPAPPSASPLPRGWQKSVLELQTGPGSSQHYGAMRTVTEQYEEVDQFGNTVLMSSTTVTEQAEPPRNPGSHLGLHASPLLRQFLHSPAGFSSDLTEAETVQVSCSYSQPAAQ

SEQ ID NO: 6579 - protein, 376 aa, Homo sapiens
MNRSFHKSQTLRFYDCSAVEVKSKFGAEFRRFSLDRHKPGKFEDFYKLVVHTHHISNSDVTIGYADVHGDLLPINNDDNFCKAVSSANPLLRVFIQKREEAERGSLGAGSLCRRRRALGALRDEGPRRRAHLDIGLPRDFRPVSSIIDVDLVPETHRRVRLHRHGCEKPLGFYIRDGASVRVTPHGLEKVPGIFISRMVPGGLAESTGLLAVNDEVLEVNGIEVAGKTLDQVTDMMIANSHNLIVTVKPANQRNNVVRGGRALGSSGPPSDGTAGFVGPPAPRVLQNFHPDEAESDEDNDVVIEGTLEPARPPQTPGAPAGSLSRVNGAGLAQRLQRDLALDGGLQRLLSSLRADPRHSLALPPGGVEEHGPAVTL

SEQ ID NO: 6580 - protein, 496 aa, Homo sapiens
MAAPEPARAAPPPPPPPPPPPGADRVVKAVPFPPTHRLTSEEVFDLDGIPRVDVLKNHLVKEGRVDEEIALRIINEGAAILRREKTMIEVEAPITVCGDIHGQFFDLMKLFEVGGSPANTRYLFLGDYVDRGYFSIECVLYLWVLKILYPSTLFLLRGNHECRHLTEYFTFKQECKIKYSERVYEACMEAFDSLPLAALLNQQFLCVHGGLSPEIHTLDDIRRLDRFKEPPAFGPMCDLLWSDPSEDFGNEKSQEHFSHNTVRGCSYFYNYPAVCEFLQNNNLLSIIRAHEAQDAGYRMYRKSQTTGFPSLITIFSAPNYLDVYNNKAAVLKYENNVMNIRQFNCSPHPYWLPNFMDVFTWSLPFVGEKVTEMLVNVLSICSDDELMTEGEDQFDGSAAARKEIIRNKIRAIGKMARVFSVLREESESVLTLKGLTPTGMLPSGVLAGGRQTLQSGNDVMQLAVPQMDWGTPHSFANNSHNACREFLLFFSSCLSS

SEQ ID NO: 6581 - protein, 1087 aa, Homo sapiens
MTTESGSDSESKPDQEAEPQEAAGAQGRAGAPVPEPPKEEQQQALEQFAAAAAHSTPVRREVTDKEQEFAARAAKQLEYQQLEDDKLSQKSSSSKLSRSPLKIVKKPKSMQCKVILLDGSEYTCDVEKRSRGQVLFDKVCEHLNLLEKDYFGLTYRDAENQKNWLDPAKEIKKQVRSGAWHFSFNVKFYPPDPAQLSEDITRYYLCLQLRDDIVSGRLPCSFVTLALLGSYTVQSELGDYDPDECGSDYISEFRFAPNHTKELEDKVIELHKSHRGMTPAEAEMHFLENAKKLSMYGVDLHHAKDSEGVEIMLGVCASGLLIYRDRLRINRFAWPKVLKISYKRNNFYIKIRPGEFEQFESTIGFKLPNHRAAKRLWKVCVEHHTFFRLLLPEAPPKKFLTLGSKFRYSGRTQAQTRRASALIDRPAPYFERSSSKRYTMSRSLDGEVGTGQYATTKGISQTNLITTVTPEKKAEEERDEEEDKRRKGEEVTPISAIRHEGKSPGLGTDSCPLSPPSTHCAPTSPTELRRRCKENDCKLPGYEPSRAEHLPGEPALDSDGPGRPYLGDQDVAFSYRQQTGKGTTLFSFSLQLPESFPSLLDDDGYLSFPNLSETNLLPQSLQHYLPIRSPSLVPCFLFIFFFLLSASFSVPYALTLSFPLALCLCYLEPKAASLSASLDNDPSDSSEEETDSERTDTAADGETTATESDQEEDAELKAQELEKTQDDLMKHQTNISELKRTFLETSTDTAVTNEWEKRLSTSPVRLAARQEDAPMIEPLVPEETKQSSGEKLMDGSEIFSLLESARKPTEFIGGVTSTSQSWVQKMETKTESSGIETEPTVHHLPLSTEKVVQETVLVEERRVVHASGDASYSAGDSGDAAAQPAFTGIKGKEGSALTEGAKEEGGEEVAKAVLEQEETAAASRERQEEQSAAIHISETLEQKPHFESSTVKTETISFGSVSPGGVKLEISTKEVPVVHTETKTITYESSQVDPGTDLEPGVLMSAQTITSETTSTTTTTHITKTVKGGISETRIEKRIVITGDADIDHDQALAQAIKEAKEQHPDMSVTKVVVHKETEITPEDGED

SEQ ID NO: 6582 - protein, 484 aa, Homo sapiens
MELGPEPPHRRRLLFACSPPPASQPVVKALFGASAAGGLSPVTNLTVTMDQLQGLGSDYEQPLEVKNNSNLQRMGSSESTDSGFCLDSPGPLDSKENLENPMRRIHSLPQKLLGCSPALKRSHSDSLDHDIFQLIDPDENKENLSSNERDSSEPGNFIPLFTPQSPVTATLSDEDDGFVDLLDGENLKNEEETPSCMASLWTAPLVMRTTNLDNRCKLFDSPSLCSSSTRSVLKRPERSQEESPPGSTKRRKSMSGASPKESTNPEKAHETLHQSLSLASSPKGTIENILDNDPRDLIGDFSKGYLFHTVAGKHQDLKYISPEIMASVLNGKFANLIKEFVIIDCRYPYEYEGGHIKGAVNLHMEEEVEDFLLKKPIVPTDGKRVIVVFHCEFSSERGPRMCRYVRERDRLGNEYPKLHYPELYVLKGGYKEFFMKCQSYCEPPSYRPMHHEDFKEDLKKFRTKSRTWAGEKSKREMYSRLKKL

SEQ ID NO: 6583 - protein, 602 aa, Homo sapiens
MRPKRLGRCCAGSRLGPGDPAALTCAPSPSASPAPEPSAQPQARGTGQRVGSRATSGSQFLSEARTGARPASEAGAKAGARRPSAFSAIQGDVRSMPDNSDAPWTRFVFQGPFGSRATGRGTGKAAGIWKTPAAYVGRRPGVSGPERAAFIRELEEALCPNLPPPVKKITQEDVKVMLYLLEEVCTAFLIQLLPPVWESVTYGMVLQRERDLNTAARIGQSLVKQNSVLMEENSKLEALLGSAKEEILYLRHQVNLRDELLQLYSDSDEEDEDEEEEEEEKEAEEEQEEEEAEEDLQCAHPCDAPKLISQEALLHQHHCPQLEALQEKLRLLEEENHQLREEASQLDTLEDEEQMLILECVEQFSEASQQMAELSEVLVLRLENYERQQQEVARLQAQVLKLQQRCRMETLPGFQETLAEELRTSLRRMISDPVYFMERNYEMPRGDTSSLRYDFRYSEDREQVRGFEAEEGLMLAADIMRGEDFTPAEEFVPQEELGAAKKVPAEEGVMEEAELVSEETEGWEEVELELDEATRMNVVTSALEASGLGPSHLDMNYVLQQLANWQDAHYRRQLRWKMLQKGECPHGALPAASRTSCRSSCR

SEQ ID NO: 6584 - protein, 2403 aa, Homo sapiens
MGISTVILEMCLLWGQVLSTGGWIPRTTDYASLIPSEVPLDPTVAEGSPFPSESTLESTVAEGSPISLESTLESTVAEGSLIPSESTLESTVAEGSDSGLALRLVNGDGRCQGRVEILYRGSWGTVCDDSWDTNDANVVCRQLGCGWAMSAPGNAWFGQGSGPIALDDVRCSGHESYLWSCPHNGWLSHNCGHGEDAGVICSAAQPQSTLRPESWPVRISPPVPTEGSESSLALRLVNGGDRCRGRVEVLYRGSWGTVCDDYWDTNDANVVCRQLGCGWAMSAPGNAQFGQGSGPIVLDDVRCSGHESYLWSCPHNGWLTHNCGHSEDAGVICSAPQSRPTPSPDTWPTSHASTAGPESSLALRLVNGGDRCQGRVEVLYRGSWGTVCDDSWDTSDANVVCRQLGCGWATSAPGNARFGQGSGPIVLDDVRCSGYESYLWSCPHNGWLSHNCQHSEDAGVICSDTLPTITLPASTVGSESSLALRLVNGGDRCQGRVEVLYRGSWGTVCDDSWDTNDANVVCRQLGCGWAMLAPGNARFGQGSGPIVLDDVRCSGNESYLWSCPHNGWLSHNCGHSEDAGVICSGPESSLALRLVNGGDRCQGRVEVLYRGSWGTVCDDSWDTNDANVVCRQLGCGWATSAPGNARFGQGSGPIVLDDVRCSGHESYLWSCPNNGWLSHNCGHHEDAGVICSAAQSRSTPRPDTLSTITLPPSTVGSESSLTLRLVNGSDRCQGRVEVLYRGSWGTVCDDSWDTNDANVVCRQLGCGWATSAPGNARFGQGSGPIVLDDVRCSGHESYLWSCPHNGWLSHNCGHHEDAGVICSVSQSRPTPSPDTWPTSHASTAGPESSLALRLVNGGDRCQGRVEVLYRGSWGTVCDDSWDTSDANVVCRQLGCGWATSAPGNARFGQGSGPIVLDDVRCSGYESYLWSCPHNGWLSHNCQHSEDAGVICSAAHSWSTPSPDTLPTITLPASTVGSESSLALRLVNGGDRCQGRVEVLYQGSWGTVCDDSWDTNDANVVCRQLGCGWAMSAPGNARFGQGSGPIVLDDVRCSGHESYLWSCPHNGWLSHNCGHSEDAGVICSASQSRPTPSPDTWPTSHASTAGSESSLALRLVNGGDRCQGRVEVLYRGSWGTVCDDYWDTNDANVVCRQLGCGWAMSAPGNARFGQGSGPIVLDDVRCSGHESYLWSCPHNGWLSHNCGHHEDAGVICSASQSQPTPSPDTWPTSHASTAGSESSLALRLVNGGDRCQGRVEVLYRGSWGTVCDDYWDTNDANVVCRQLGCGWATSAPGNARFGQGSGPIVLDDVRCSGHESYLWSCPHNGWLSHNCGHHEDAGVICSASQSQPTPSPDTWPTSHASTAGSESSLALRLVNGGDRCQGRVEVLYRGSWGTVCDDYWDTNDANVVCRQLGCGWATSAPGNARFGQGSGPIVLDDVRCSGHESYLWSCPHNGWLSHNCGHHEDAGVICSASQSQPTPSPDTWPTSRASTAGSESTLALRLVNGGDRCRGRVEVLYQGSWGTVCDDYWDTNDANVVCRQLGCGWAMSAPGNAQFGQGSGPIVLDDVRCSGHESYLWSCPHNGWLSHNCGHHEDAGVICSAAQSQSTPRPDTWLTTNLPALTVGSESSLALRLVNGGDRCRGRVEVLYRGSWGTVCDDSWDTNDANVVCRQLGCGWAMSAPGNARFGQGSGPIVLDDVRCSGNESYLWSCPHKGWLTHNCGHHEDAGVICSATQINSTTTDWWHPTTTTTARPSSNCGGFLFYASGTFSSPSYPAYYPNNAKCVWEIEVNSGYRINLGFSNLKLEAHHNCSFDYVEIFDGSLNSSLLLGKICNDTRQIFTSSYNRMTIHFRSDISFQNTGFLAWYNSFPSDATLRLVNLNSSYGLCAGRVEIYHGGTWGTVCDDSWTIQEAEVVCRQLGCGRAVSALGNAYFGSGSGPITLDDVECSGTESTLWQCRNRGWFSHNCNHREDAGVICSGNHLSTPAPFLNITRPNTDYSCGGFLSQPSGDFSSPFYPGNYPNNAKCVWDIEVQNNYRVTVIFRDVQLEGGCNYDYIEVFDGPYRSSPLIARVCDGARGSFTSSSNFMSIRFISDHSITRRGFRAEYYSSPSNDSTNLLCLPNHMQASVSRSYLQSLGFSASDLVISTWNGYYECRPQITPNLVIFTIPYSGCGTFKQADNDTIDYSNFLTAAVSGGIIKRRTDLRIHVSCRMLQNTWVDTMYIANDTIHVANNTIQVEEVQYGNFDVNISFYTSSSFLYPVTSRPYYVDLNQDLYVQAEILHSDAVLTLFVDTCVASPYSNDFTSLTYDLIRSGCVRDDTYGPYSSPSLRIARFRFRAFHFLNRFPSVYLRCKMVVCRAYDPSSRCYRGCVLRSKRDVGSYQEKVDVVLGPIQLQTPPRREEEPR

SEQ ID NO: 6585 - protein, 868 aa, Homo sapiens
MIPKSLVQAAETQRGLCEPGGKGREGRSGGKGETRPRGVGTQEGKGTIPGSPREKRGERGEGDPALLPAEDLWRLPGSKDRLRSSLLPPPGPPSSDSGPGPPSSHSGKTAQGPRTLNWARKQSARTSSNLCAWSLAMATKMAEIPSSPYEPGQRGMKDTQRGDAPQRGSPEPRILQLARVGNVYLKEESSRSGRLEAKKWIPTKFLENLSVPHVDLGGNQLWSGGMEALTTQLGPGREGSSSPNSKQELQPYSGSSALKPNQVGETSLYGVPIVSLVIDGQERLCLAQISNTLLKNYSYNEIHNRRVALGITCVQCTPVQLEILRRAGAMPISSRRCGMITKREAERLCKSFLGEHKPPKLPENFAFDVVHECAWGSRGSFIPARYNSSRAKCIKCGYCSMYFSPNKFIFHSHRTPDAKYTQPDAANFNSWRRHLKLSDKSATDELSHAWEDRGLGLATGASGPAGPGGPGGGAGVRSYPVIPVPSKGFGLLQKLPPPLFPHPYGFPTAFGLCPKKDDPVLGAGEPKGGSYVSAFRPVVKDTESIAKLYGSAREAYGAGPARGPGPGAGSGGYVSPDFLSEGSSSYNSASPDVDTADEPEVDVESNRFPDDEDAQEETEPSAPSAGGGPDAGRPAFGDLAAEDLVRRPERSPPSGGGGYELREPCGPLGGPAPAKVFAPERDEHVKSAAVALGPAASYVCTPEAHEPDKEDNHSPADDLETRKSYPDQRSISQPSPANTDRGEDGLTLDVTGTHLVEKDIENLAREELQKLLLEQMELRKKLEREFQSLKDNFQDQMKRELAYREEMVQQLQIVRDTLCNELDQERKARYAIQQKLKEAHDALHHFSCKMLTPRHCTGNCSFKPPLLP

SEQ ID NO: 6586 - protein, 1154 aa, Homo sapiens
MQYLNIKEDCNAMAFCAKMRSSKKTEVNLEAPEPGVEVIFYLSDREPLRLGSGEYTAEELCIRAAQACRISPLCHNLFALYDENTKLWYAPNRTITVDDKMSLRLHYRMRFYFTNWHGTNDNEQSVWRHSPKKQKNGYEKKKIPDATPLLDASSLEYLFAQGQYDLVKCLAPIRDPKTEQDGHDIENECLGMAVLAISHYAMMKKMQLPELPKDISYKRYIPETLNKSIRQRNLLTRMRINNVFKDFLKEFNNKTICDSSVSTHDLKVKYLATLETLTKHYGAEIFETSMLLISSENEMNWFHSNDGGNVLYYEVMVTGNLGIQWRHKPNVVSVEKEKNKLKRKKLENKHKKDEEKNKIREEWNNFSYFPEITHIVIKESVVSINKQDNKKMELKLSSHEEALSFVSLVDGYFRLTADAHHYLCTDVAPPLIVHNIQNGCHGPICTEYAINKLRQEGSEEGMYVLRWSCTDFDNILMTVTCFEKSEQVQGAQKQFKNFQIEVQKGRYSLHGSDRSFPSLGDLMSHLKKQILRTDNISFMLKRCCQPKPREISNLLVATKKAQEWQPVYPMSQLSFDRILKKDLVQGEHLGRGTRTHIYSGTLMDYKDDEGTSEEKKIKVILKVLDPSHRDISLAFFEAASMMRQVSHKHIVYLYGVCVRDVENIMVEEFVEGGPLDLFMHRKSDVLTTPWKFKVAKQLASALSYLEDKDLVHGNVCTKNLLLAREGIDSECGPFIKLSDPGIPITVLSRQECIERIPWIAPECVEDSKNLSVAADKWSFGTTLWEICYNGEIPLKDKTLIEKERFYESRCRPVTPSCKELADLMTRCMNYDPNQRPFFRAIMRDINKLEEQNPDIVSEKKPATEVDPTHFEKRFLKRIRDLGEGHFGKVELCRYDPEGDNTGEQVAVKSLKPESGGNHIADLKKEIEILRNLYHENIVKYKGICTEDGGNGIKLIMEFLPSGSLKEYLPKNKNKINLKQQLKYAVQICKGMDYLGSRQYVHRDLAARNVLVESEHQVKIGDFGLTKAIETDKEYYTVKDDRDSPVFWYAPECLMQSKFYIASDVWSFGVTLHELLTYCDSDSSPMALFLKMIGPTHGQMTVTRLVNTLKEGKRLPCPPNCPDEVYQLMRKCWEFQPSNRTSFQNLIEGFEALLK

SEQ ID NO: 6587 - protein, 777 aa, Homo sapiens
MDSKESLTPGREENPSSVLAQERGDVMDFYKTLRGGATVKVSASSPSLAVASQSDSKQRRLLVDFPKGSVSNAQQPDLSKAVSLSMGLYMGETETKVMGNDLGFPQQGQISLSSGETDLKLLEESIANLNRSTSVPENPKSSASTAVSAAPTEKEFPKTHSDVSSEQQHLKGQTGTNGGNVKLYTTDQSTFDILQDLEFSSGSPGKETNESPWRSDLLIDENCLLSPLAGEDDSFLLEGNSNEDCKPLILPDTKPKIKDNGDLVLSSPSNVTLPQVKTEKEDFIELCTPGVIKQEKLGTVYCQASFPGANIIGNKMSAISVHGVSTSGGQMYHYDMNTASLSQQQDQKPIFNVIPPIPVGSENWNRCQGSGDDNLTSLGTLNFPGRTVFSNGYSSPSMRPDVSSPPSSSSTATTGPPPKLCLVCSDEASGCHYGVLTCGSCKVFFKRAVEGQHNYLCAGRNDCIIDKIRRKNCPACRYRKCLQAGMNLEARKTKKKIKGIQQATTGVSQETSENPGNKTIVPATLPQLTPTLVSLLEVIEPEVLYAGYDSSVPDSTWRIMTTLNMLGGRQVIAAVKWAKAIPGFRNLHLDDQMTLLQYSWMFLMAFALGWRSYRQSSANLLCFAPDLIINEQRMTLPCMYDQCKHMLYVSSELHRLQVSYEEYLCMKTLLLLSSVPKDGLKSQELFDEIRMTYIKELGKAIVKREGNSSQNWQRFYQLTKLLDSMHEVVENLLNYCFQTFLDKTMSIEFPEMLAEIITNQIPKYSNGNIKKLLFHQK

SEQ ID NO: 6588 - protein, 2427 aa, Homo sapiens
MPLKTRTALSDDPDSSTSTLGNMLELPGTSSSSTSQELPFCQPKKKSTPLKYEVGDLIWAKFKRRPWWPCRICSDPLINTHSKMKVSNRRPYRQYYVEAFGDPSERAWVAGKAIVMFEGRHQFEELPVLRRRGKQKEKGYRHKVPQKILSKWEASVGLAEQYDVPKGSKNRKCIPGSIKLDSEEDMPFEDCTNDPESEHDLLLNGCLKSLAFDSEHSADEKEKPCAKSRARKSSDNPKRTSVKKGHIQFEAHKDERRGKIPENLGLNFISGDISDTQASNELSRIANSLTGSNTAPGSFLFSSCGKNTAKKEFETSNGDSLLGLPEGALISKCSREKNKPQRSLVCGSKVKLCYIGAGDEEKRSDSISICTTSDDGSSDLDPIEHSSESDNSVLEIPDAFDRTENMLSMQKNEKIKYSRFAATNTRVKAKQKPLISNSHTDHLMGCTKSAEPGTETSQVNLSDLKASTLVHKPQSDFTNDALSPKFNLSSSISSENSLIKGGAANQALLHSKSKQPKFRSIKCKHKENPVMAEPPVINEECSLKCCSSDTKGSPLASISKSGKVDGLKLLNNMHEKTRDSSDIETAVVKHVLSELKELSYRSLGEDVSDSGTSKPSKPLLFSSASSQNHIPIEPDYKFSTLLMMLKDMHDSKTKEQRLMTAQNLVSYRSPGRGDCSTNSPVGVSKVLVSGGSTHNSEKKGDGTQNSANPSPSGGDSALSGELSASLPGLLSDKRDLPASGKSRSDCVTRRNCGRSKPSSKLRDAFSAQMVKNTVNRKALKTERKRKLNQLPSVTLDAVLQGDRERGGSLRGGAEDPSKEDPLQIMGHLTSEDGDHFSDVHFDSKVKQSDPGKISEKGLSFENGKGPELDSVMNSENDELNGVNQVVPKKRWQRLNQRRTKPRKRMNRFKEKENSECAFRVLLPSDPVQEGRDEFPEHRTPSASILEEPLTEQNHADCLDSAGPRLNVCDKSSASIGDMEKEPGIPSLTPQAELPEPAVRSEKKRLRKPSKWLLEYTEEYDQIFAPKKKQKKVQEQVHKVSSRCEEESLLARGRSSAQNKQVDENSLISTKEEPPVLEREAPFLEGPLAQSELGGGHAELPQLTLSVPVAPEVSPRPALESEELLVKTPGNYESKRQRKPTKKLLESNDLDPGFMPKKGDLGLSKKCYEAGHLENGITESCATSYSKDFGGGTTKIFDKPRKRKRQRHAAAKMQCKKVKNDDSSKEIPGSEGELMPHRTATSPKETVEEGVEHDPGMPASKKMQGERGGGAALKENVCQNCEKLGELLLCEAQCCGAFHLECLGLTEMPRGKFICNECRTGIHTCFVCKQSGEDVKRCLLPLCGKFYHEECVQKYPPTVMQNKGFRCSLHICITCHAANPANVSASKGRLMRCVRCPVAYHANDFCLAAGSKILASNSIICPNHFTPRRGCRNHEHVNVSWCFVCSEGGSLLCCDSCPAAFHRECLNIDIPEGNWYCNDCKAGKKPHYREIVWVKVGRYRWWPAEICHPRAVPSNIDKMRHDVGEFPVLFFGSNDYLWTHQARVFPYMEGDVSSKDKMGKGVDGTYKKALQEAAARFEELKAQKELRQLQEDRKNDKKPPPYKHIKVNRPIGRVQIFTADLSEIPRCNCKATDENPCGIDSECINRMLLYECHPTVCPAGGRCQNQCFSKRQYPEVEIFRTLQRGWGLRTKTDIKKGEFVNEYVGELIDEEECRARIRYAQEHDITNFYMLTLDKDRIIDAGPKGNYARFMNHCCQPNCETQKWSVNGDTRVGLFALSDIKAGTELTFNYNLECLGNGKTVCKCGAPNCSGFLGVRPKNQPIATEEKSKKFKKKQQGKRRTQGEITKEREDECFSCGDAGQLVSCKKPGCPKVYHADCLNLTKRPAGKWECPWHQCDICGKEAASFCEMCPSSFCKQHREGMLFISKLDGRLSCTEHDPCGPNPLEPGEIREYVPPPVPLPPGPSTHLAEQSTGMAAQAPKMSDKPPADTNQMLSLSKKALAGTCQRPLLPERPLERTDSRPQPLDKVRDLAGSGTKSQSLVSSQRPLDRPPAVAGPRPQLSDKPSPVTSPSSSPSVRSQPLERPLGTADPRLDKSIGAASPRPQSLEKTSVPTGLRLPPPDRLLITSSPKPQTSDRPTDKPHASLSQRLPPPEKVLSAVVQTLVAKEKALRPVDQNTQSKNRAALVMDLIDLTPRQKERAASPHQVTPQADEKMPVLESSSWPASKGLGHMPRAVEKGCVSDPLQTSGKAAAPSEDPWQAVKSLTQARLLSQPPAKAFLYEPTTQASGRASAGAEQTPGPLSQSPGLVKQAKQMVGGQQLPALAAKSGQSFRSLGKAPASLPTEEKKLVTTEQSPWALGKASSRAGLWPIVAGQTLAQSCWSAGSTQTLAQTCWSLGRGQDPKPEQNTLPALNQAPSSHKCAESEQK

SEQ ID NO: 6589 - protein, 1044 aa, Homo sapiens
MALSPGANLVFHEDPKMTPSPPSCGAPGLGSGTIPQPHPDMAQVPMLNLLPSPGLALVPDLNDSLSPVSGEASGLVSENTPRPDDSRAIAPASLQITSSCSGEALDLDSKDVSRPDSQGRLCPASNPILSPSSTEAPRLSSGNHPQSNSEDAFKCLSSKIFKLGQRNSNPSRHELNPFIRHHSREGLVLGHCISRPSSKALLIPTSNSSLDLDSNPLLNMGSRNTSKLNLNVAPDSHGTLIPDTNETITLASHNISESVSKGAFSTTWSTSSKETMNVASSGHSRSDLSVTITQASYVTLIPGSSYGISLHSSTHEPNSTISPPSCMTLILGSNETLSLDSSLLFSDTSTLTLSSQQDDAKDNSIHTVPLEENLESWSEMASIKVGQFPLGFPISNPAGKDAVTLQGIPEGAFDEVTSCLVKVPEKTEGGNNMALVENVTTLQKSQDLLEAEGEKKTMIKKIMRQIQEEPLDSLSSSVRKQAMEILTQLSHTQPTLGMRERSELVNVCVHSVFSLPSVQAMQEKDEAKAETIQALYHQTLEALQTLLKALFIEDPTPAGLKSILEALGPWMNSGKAHERARAVNTNVSVLNHMLLTLPFFMPLGFPALGLLLGRLILHIGDPDEEIGCEALDGIIILYTILELQKRARDKEETNKKELYESNKHFLGPYNPVSPCQNILRVIEEFGDFLGPQQIKDLLLAALEGLKGSSEAPGKDSREMMQLASEVMLSSVLEWYRHRALEVIPEIMQGIYMQLSHIQEPRARQVALLPVSLLASSFMTEVVVALLMCPLPLNSNGAEMWRQLILCKPSCDVRDLLDLLLGSLKEKPVTKEGRASIVPLAAASGLCELLSVNSCMGRVRRIYPQLLLALLIQVHYHIGLNLPGCVAPPKDTKKGAQPSPFVPVRWVVKVVKTLLLRMGCSYETTFLEDQGGWELMEQVESHHRGVALLARAMVQYSCQELCRILYLLIPLLERGDEKHRITATAFFVEQPCEEGIVILMLRISWERQQQAVTGARSWRVTHSALPHGADGHQTETSSNLLVLQV

SEQ ID NO: 6590 - protein, 423 aa, Homo sapiens
MLPPQKKPWESMAKGLVLGALFTSFLLLVYSYAVPPLHAGLASTTPEAAASCSPPALEPEAVIRANGSAGECQPRRNIVFLKTHKTASSTLLNILFRFGQKHRLKFAFPNGRNDFDYPTFFARSLVQDYRPGACFNIICNHMRFHYDEVRGLVPTNAIFITVLRDPARLFESSFHYFGPVVPLTWKLSAGDKLTEFLQDPDRYYDPNGFNAHYLRNLLFFDLGYDNSLDPSSPQVQEHILEVERRFHLVLLQEYFDESLVLLKDLLCWELEDVLYFKLNARRDSPVPRLSGELYGRATAWNMLDSHLYRHFNASFWRKVEAFGRERMAREVAALRHANERMRTICIDGGHAVDAAAIQDEAMQPWQPLGTKSILGYNLKKSIGQRHAQLCRRMLTPEIQYLMDLGANLWVTKLWKFIRDFLRW

SEQ ID NO: 6591 - protein, 586 aa, Homo sapiens
MAASGVEKSSKKKTEKKLAAREEAKLLAGFMGVMNNMRKQKTLCDVILMVQERKIPAHRVVLAAASHFFNLMFTTNMLESKSFEVELKDAEPDIIEQLVEFAYTARISVNSNNVQSLLDAANQYQIEPVKKMCVDFLKEQVDASNCLGISVLAECLDCPELKATADDFIHQHFTEVYKTDEFLQLDVKRVTHLLNQDTLTVRAEDQVYDAAVRWLKYDEPNRQPFMVDILAKVRFPLISKNFLSKTVQAEPLIQDNPECLKMVISGMRYHLLSPEDREELVDGTRPRRKKHDYRIALFGGSQPQSCRYFNPKDYSWTDIRCPFEKRRDAACVFWDNVVYILGGSQLFPIKRMDCYNVVKDSWYSKLGPPTPRDSLAACAAEGKIYTSGGSEVGNSALYLFECYDTRTESWHTKPSMLTQRCSHGMVEANGLIYVCGGSLGNNVSGRVLNSCEVYDPATETWTELCPMIEARKNHGLVFVKDKIFAVGGQNGLGGLDNVEYYDIKLNEWKMVSPMPWKGVTVKCAAVGSIVYVLAGFQGVGRLGHILEYNTETDKWVANSKVRAFPVTSCLICVVDTCGANEETLET

SEQ ID NO: 6592 - protein, 758 aa, Homo sapiens
MSAEAADREAATSSRPCTPPQTCWFEFLLEESLLEKHLRKPCPDPAPVQLIVQFLEQASKPSVNEQNQVQPPPDNKRNRILKLLALKVAAHLKWDLDILEKSLSVPVLNMLLNELLCISKVPPGTKHVDMDLATLPPTTAMAVLLYNRWAIRTIVQSSFPVKQAKPGPPQLSVMNQMQQEKELTENILKVLKEQAADSILVLEAALKLNKDLYVHTMRTLDLLAMEPGMVNGETESSTAGLKVKTEEMQCQVCYDLGAAYFQQGSTNSAVYENAREKFFRTKELIAEIGSLSLHCTIDEKRLAGYCQACDVLVPSSDSTSQQLTPYSQVHICLRSGNYQEVIQIFIEDNLTLSLPVQFRQSVLRELFKKAQQGNEALDEICFKVCACNTVRDILEGRTISVQFNQLFLRPNKEKIDFLLEVCSRSVNLEKASESLKGNMAAFLKNVCLGLEDLQYVFMISSHELFITLLKDEERKLLVDQMRKRSPRVNLCIKPVTSFYDIPASASVNIGQLEHQLILSVDPWRIRQILIELHGMTSERQFWTVSNKWEVPSVYSGVILGIKDNLTRDLVYILMAKGLHCSTVKDFSHAKQLFAACLELVTEFSPKLRQVMLNEMLLLDIHTHEAGTGQAGERPPSDLISRVRGYLEMRLPDIPLRQVIAEECVAFMLNWRENEYLTLQVPAFLLQSNPYVKLGQLLAATCKELPGPKESRRTAKDLWEVVVQICSVSSQHKRGNDGRVSLIKQRESTLGIMYRYVLE

SEQ ID NO: 6593 - protein, 823 aa, Homo sapiens
MAFSQVQCLDDNHVNWRSSESKPEFFYSEEQRLALEALVARGRDAFYEVLKRENIRDFLSELELKRILETIEVYDPGSEDPRGTGPSQGPEDNGVGDGEEASGADGVPIEAEPLPSLEYWPQKSDRSIPQLDLGWPDTIAYRGVTRASVYMQPPIDGQAHIKEVVRKMISQAQKVIAVVMDMFTDVDIFKDLLDAGFKRKVAVYIIVDESNVKYFLHMCERACMHLGHLKNLRVRSSGGTEFFTRSATKFKGALAQKFMFVDGDRAVCGSYSFTWSAARTDRNVISVLSGQVVEMFDRQFQELYLMSHSVSLKGIPMEKEPEPEPIVLPSVVPLVPAGTVAKKLVNPKYALVKAKSVDEIAKISSEKQEAKKPLGLKGPALAEHPGELPELLPPIHPGLLHLERANMFEYLPTWVEPDPEPGSDILGYINIIDPNIWNPQPSQMNRIKIRDTSQASAQHQLWKQSQDSRPRPEPCPPPEPSAPQDGVPAENGLPQGDPEPLPPVPKPRTVPVADVLARDSSDIGWVLELPKEEAPQNGTDHRLPRMAGPGHAPLQRQLSVTQDDPESLGVGLPNGLDGVEEEDDDDYVTLSDQDSHSGSSGRGPGPRRPSVASSVSEEYFEVREHSVPLRRRHSEQVANGPTPPPRRQLSAPHITRGTFVGPQGGSPWAQSRGREEADALKRMQAQRSTDKEAQGQQFHHHRVPASGTRDKDGFPGPPRYRSAADSVQSSTRNAGPAMAGPHHWQAKGGQVPRLLPDPGSPRLAQNARPMTDGRATEEHPSPFGIPYSKLSQSKHLKARTGGSQWASSDSKRRAQAPRDRKDP

SEQ ID NO: 6594 - protein, 812 aa, Homo sapiens
MAAPEAWRARSCWFCEVAAATTMEATSREAAPAKSSASGPNAPPALFELCGRAVSAHMGVLESGVWALPGPILQSILPLLNIYYLERIEETALKKGLSTQAIWRRLWDELMKTRPSSLESVTCWRAKFMEAFFSHVLRGTIDVSSDRRLCDQRFSPLLHSSRHVRQLTICNMLQGATELVAEPNRRVLETLASSLHTLKFRHLLFSDVAAQQSLRQLLHQLIHHGAVSQVSLYSWPVPESALFILILTMSAGFWQPGPGGPPCRLCGEASRGRAPSRDEGSLLLGSRRPRRDAAERCAAALMASRRKSEAKQMPRAAPATRVTRRSTQESLTAGGTDLKRELHPPATSHEAPGTKRSPSAPAATSSASSSTSSYKRAPASSAPQPKPLKRFKRAAGKKGARTRQGPGAESEDLYDFVFIVAGEKEDGEEMEIGEVACGALDGSDPSCLGLPALEASQRFRSISTLELFTVPLSTEAALTLCHLLSSWVSLESLTLSYNGLGSNIFRLLDSLRALSGQAGCRLRALHLSDLFSPLPILELTRAIVRALPLLRVLSIRVDHPSQRDNPGVPGNAGPPSHIIGDEEIPENCLEQLEMGFPRGAQPAPLLCSVLKASGSLQQLSLDSATFASPQDFGLVLQTLKEYNLALKRLSFHDMNLADCQSEVLFLLQNLTLQEITFSFCRLFEKRPAQFLPEMVAAMKGNSTLKGLRLPGNRLGNAGLLALADVFSEDSSSSLCQLDISSNCIKPDGLLEFAKRLERWGRGAFGHLRLFQNWLDQDAVTAREAIRRLRATCHVVSDSWDSSQAFADYVSTM

SEQ ID NO: 6595 - protein, 310 aa, Homo sapiens
MAFPKMRLMYICLLVLGALCLYFSMYSLNPFKEQSFVYKKDGNFLKLPDTDCRQTPPFLVLLVTSSHKQLAERMAIRQTWGKERMVKGKQLKTFFLLGTTSSAAETKEVDQESQRHGDIIQKDFLDVYYNLTLKTMMGIEWVHRFCPQAAFVMKTDSDMFINVDYLTELLLKKNRTTRFFTGFLKLNEFPIRQPFSKWFVSKSEYPWDRYPPFCSGTGYVFSGDVASQVYNVSKSVPYIKLEDVFVGLCLERLNIRLEELHSQPTFFPGGLRFSVCLFRRIVACHFIKPRTLLDYWQALENSRGEDCPPV

SEQ ID NO: 6596 - protein, 948 aa, Homo sapiens
MAEANNPSEQELESEPRSWSLLEQLGLAGADLAAPGVQQQLELERERLRREIRKELKLKEGAENLRRATTDLGRSLGPVELLLRGSSRRLDLLHQQLQELHAHVVLPDPAATHDGPQSPGAGGPTCSATNLSRVAGLEKQLAIELKVKQGAENMIQTYSNGSTKDRKLLLTAQQMLQDSKTKIDIIRMQLRRALQAGQLENQAAPDDTQGSPDLGAVELRIEELRHHFRVEHAVAEGAKNVLRLLSAAKAPDRKAVSEAQEKLTESNQKLGLLREALERRLGELPADHPKGRLLREELAAASSAAFSTRLAGPFPATHYSTLCKPAPLTGTLEVRVVGCRDLPETIPWNPTPSMGGPGTPDSRPPFLSRPARGLYSRSGSLSGRSSLKAEAENTSEVSTVLKLDNTVVGQTSWKPCGPNAWDQSFTLELERARELELAVFWRDQRGLCALKFLKLEDFLDNERHEVQLDMEPQGCLVAEVTFRNPVIERIPRLRRQKKIFSKQQGKAFQRARQMNIDVATWVRLLRRLIPNATGTGTFSPGASPGSEARTTGDISVEKLNLGTDSDSSPQKSSRDPPSSPSSLSSPIQESTAPELPSETQETPGPALCSPLRKSPLTLEDFKFLAVLGRGHFGKVLLSEFRPSGELFAIKALKKGDIVARDEVESLMCEKRILAAVTSAGHPFLVNLFGCFQTPEHVCFVMEYSAGGDLMLHIHSDVFSEPRAIFYSACVVLGLQFLHEHKIVYRDLKLDNLLLDTEGYVKIADFGLCKEGMGYGDRTSTFCGTPEFLAPEVLTDTSYTRAVDWWGLGVLLYEMLVGESPFPGDDEEEVFDSIVNDEVRYPRFLSAEAIGIMRRLLRRNPERRLGSSERDAEDVKKQPFFRTLGWEALLARRLPPPFVPTLSGRTDVSNFDEEFTGEAPTLSPPRDARPLTAAEQAAFLDFDFVAGGC

SEQ ID NO: 6597 - protein, 481 aa, Homo sapiens
MLLKCLHNNLCQKYSAHAFQFSPRNVLWLLVVCLRSDNKRPCLEFSQLSVKDSFRDLFIPRIETILMMYTRNNLNCAEPLFEQNNSLNVNFNTQKKTVWLIHGYRPVGSIPLWLQNFVRILLNEEDMNVIVVDWSRGATTFIYNRAVKNTRKVAVSLSVHIKNLLKHGASLDNFHFIGVSLGAHISGFVGKIFHGQLGRITGLDPAGPRFSRKPPYSRLDYTDAKFVDVIHSDSNGLGIQEPLGHIDFYPNGGNKQPGCPKSIFSGIQFIKCNHQRAVHLFMASLETNCNFISFPCRSYKDYKTSLCVDCDCFKEKSCPRLGYQAKLFKGVLKERMEGRPLRTTVFLDTSGTYPFCTYYFVLSIIVPDKTMMDGSFSFKLLNQLGMIEEPRLYEKNKPFYKLQEVKILAQFYNDFVNISSIGLTYFQSSNLQCSTCTYKIQSLMLKSLTYPERPPLCRYNIVLKDREEVFLNPNTCTPKNT

SEQ ID NO: 6598 - protein, 1169 aa, Homo sapiens
MAEEEVAKLEKHLMLLRQEYVKLQKKLAETEKRCALLAAQANKESSSESFISRLLAIVADLYEQEQYSDLKIKVGDRHISAHKFVLAARSDSWSLANLSSTKELDLSDANPEVTMTMLRWIYTDELEFREDDVFLTELMKLANRFQLQLLRERCEKGVMSLVNVRNCIRFYQTAEELNASTLMNYCAEIIASHWDDLRKEDFSSMSAQLLYKMIKSKTEYPLHKAIKVEREDVVFLYLIEMDSQLPGKLNEADHNGDLALDLALSRRLESIATTLVSHKADVDMVDKSGWSLLHKGIQRGDLFAATFLIKNGAFVNAATLGAQETPLHLVALYSSKKHSADVMSEMAQIAEALLQAGANPNMQDSKGRTPLHVSIMAGNEYVFSQLLQCKQLDLELKDHEGSTALWLAVQHITVSSDQSVNPFEDVPVVNGTSFDENSFAARLIQRGSHTDAPDTATGNCLLQRAAGAGNEAAALFLATNGAHVNHRNKWGETPLHTACRHGLANLTAELLQQGANPNLQTEEALPLPKEAASLTSLADSVHLQTPLHMAIAYNHPDVVSVILEQKANALHATNNLQIIPDFSLKDSRDQTVLGLALWTGMHTIAAQLLGSGAAINDTMSDGQTLLHMAIQRQDSKSALFLLEHQADINVRTQDGETALQLAIRNQLPLVVDAICTRGADMSVPDEKGNPPLWLALANNLEDIASTLVRHGCDATCWGPGPGGCLQTLLHRAIDENNEPTACFLIRSGCDVNSPRQPGANGEGEEEARDGQTPLHLAASWGLEETVQCLLEFGANVNAQDAEGRTPIHVAISSQHGVIIQLLVSHPDIHLNVRDRQGLTPFACAMTFKNNKSAEAILKRESGAAEQVDNKGRNFLHVAVQNSDIESVLFLISVHANVNSRVQDASKLTPLHLAVQAGSEIIVRNLLLAGAKVNELTKHRQTALHLAAQQDLPTICSVLLENGVDFAAVDENGNNALHLAVMHGRLNNIRVLLTECTVDAEAFNLRGQSPLHILGQYGKENAAAIFDLFLECMPGYPLDKPDADGSTVLLLAYMKGNANLCRAIVRSGARLGVNNNQGVNIFNYQVATKQLLFRLLDMLSKEPPWCDGSYCYECTARFGVTTRKHHCRHCGRLLCHKCSTKEIPIIKFDLNKPVRVCNICFDVLTLGGVS

SEQ ID NO: 6599 - protein, 421 aa, Homo sapiens
MSAHSMLCERIAIAKELIKRAESLSRSRKGGIEGGAKLCSKLKAELKFLQKVEAGKVAIKESHLQSTNLTHLRAIVESAENLEEVVSVLHVFGYTDTLGEKQTLVVDVVANGGHTWVKAIGRKAEALHNIWLGRGQYGDKSIIEQAEDFLQASHQQPVQYSNPHIIFAFYNSVSSPMAEKLKEMGISVRGDIVAVNALLDHPEELQPSESESDDEGPELLQVTRVDRENILASVAFPTEIKVDVCKRVNLDITTLITYVSALSYGGCHFIFKEKVLTEQAEQERKEQVLPQLEAFMKDKELFACESAVKDFQSILDTLGGPGERERATVLIKRINVVPDQPSERALRLVASSKINSRSLTIFGTGDTLKAITMTANSGFVRAANNQGVKFSVFIHQPRALTESKEALATPLPKDYTTDSEH

SEQ ID NO: 6600 - protein, 1454 aa, Homo sapiens
MESSSSDYYNKDNEEESLLANVASLRHELKITEWSLQSLGEELSSVSPSENSDYAPNPSRSEKLILDVQPSHPGLLNYSPYENVCKISGSSTDFQKKPRDKMFSSSAPVDQEIKSLREKLNKLRQQNACLVTQNHSLMTKFESIHFELTQSRAKVSMLESAQQQAASVPILEEQIINLEAEVSAQDKVLREAENKLEQSQKMVIEKEQSLQESKEECIKLKVDLLEQTKQGKRAERQRNEALYNAEELSKAFQQYKKKVAEKLEKVQAEEEILERNLTNCEKENKRLQERCGLYKSELEILKEKLRQLKEENNNGKEKLRIMAVKNSEVMAQLTESRQSILKLESELENKDEILRDKFSLMNENRELKVRVAAQNERLDLCQQEIESSRVELRSLEKIISQLPLKRELFGFKSYLSKYQMSSFSNKEDRCIGCCEANKLVISELRIKLAIKEAEIQKLHANLTANQLSQSLITCNDSQESSKLSSLETEPVKLGGHQVESVKDQNQHTMNKQYEKERQRLVTGIEELRTKLIQIEAENSDLKVNMAHRTSQFQLIQEELLEKASNSSKLESEMTKKCSQLLTLEKQLEEKIVAYSSIAAKNAELEQELMEKNEKIRSLETNINTEHEKICLAFEKAKKIHLEQHKEMEKQIERLEAQLEKKDQQFKEQEKTMSMLQQDIICKQHHLESLDRLLTESKGEMKKENMKKDEALKALQNQVSEETIKVRQLDSALEICKEELVLHLNQLEGNKEKFEKQLKKKSEEVYCLQKELKIKNHSLQETSEQNVILQHTLQQQQQMLQQETIRNGELEDTQTKLEKQVSKLEQELQKQRESSAEKLRKMEEKCESAAHEADLKRQKVIELTGTARQVKIEMDQYKEELSKMEKEIMHLKRDGENKAMHLSQLDMILDQTKTELEKKTNAVKELEKLQHSTETELTEALQKREVLETELQNAHGELKSTLRQLQELRDVLQKAQLSLEEKYTTIKDLTAELRECKMEIEDKKQELLEMDQALKERNWELKQRAAQVTHLDMTIREHRGEMEQKIIKLEGTLEKSELELKECNKQIESLNDKLQNAKEQLREKEFIMLQNEQEISQLKKEIERTQQRMKEMESVMKEQEQYIATQYKEAIDLGQELRLTREQVQNSHTELAEARHQQVQAQREIERLSSELEDMKQLSKEKDAHGNHLAEELGASKVREAHLEARMQAEIKKLSAEVESLKEAYHMEMISHQENHAKWKISADSQKSSVQQLNEQLEKAKLELEEAQDTVSNLHQQVQDRNEVIEAANEALLTKESELTRLQAKISGHEKAEDIKFLPAPFTSPTEIMPDVQDPKFAKCFHTSFSKCTKLRRSISASDLTFKIHGDEDLSEELLQDLKKMQLEQPSTLEESHKNLTYTQPDSFKPLTYNLEADSSENNDFNTLSGMLRYINKEVRLLKKSSMQTGAGLNQGENV

SEQ ID NO: 6601 - protein, 755 aa, Homo sapiens
MDEDGLELQQEPNSFFDATGADGTHMDGDQIVVEVQETVFVSDVVDSDITVHNFVPDDPDSVVIQDVIEDVVIEDVQCPDIMEEADVSETVIIPEQVLDSDVTEEVSLAHCTVPDDVLASDITSASMSMPEHVLTGDSIHVSDVGHVGHVGHVEHVVHDSVVEAEIVTDPLTTDVVSEEVLVADCASEAVIDANGIPVDQQDDDKGNCEDYLMISCGTVDIVESEPENDHGVELLDQNSSIRVPREKMVYMTVNDSQPEDEDLNVAEIADEVYMEVIVGEEDAAAAAAAAAVHEQQMDDNEIKTFMPIAWAAAYGNNSDGIENRNGTASALLHIDESAGLGRLAKQKPKKRRRPDSRQYQTAIIIGPDGHPLTVYPCMICGKKFKSRGFLKRHMKNHPEHLAKKKYRCTDCDYTTNKKISLHNHLESHKLTSKAEKAIECDECGKHFSHAGALFTHKMVHKEKGANKMHKCKFCEYETAEQGLLNRHLLAVHSKNFPHICVECGKGFRHPSELKKHMRIHTGEKPYQCQYCEYRSADSSNLKTHVKTKHSKEMPFKCDICLLTFSDTKEVQQHALIHQESKTHQCLHCDHKSSNSSDLKRHIISVHTKDYPHKCDMCDKGFHRPSELKKHVAAHKGKKMHQCRHCDFKIADPFVLSRHILSVHTKDLPFRCKRCRKGFRQQSELKKHMKTHSGRKVYQCEYCEYSTTDASGFKRHVISIHTKDYPHRCEYCKKGFRRPSEKNQHIMRHHKEVGLP

SEQ ID NO: 6602 - protein, 415 aa, Homo sapiens
MSPEVALNRISPMLSPFISSVVRNGKVGLDATNCLRITDLKSGCTSLTPGPNCDRFKLHIPYAGETLKWDIIFNAQYPELPPDFIFGEDAEFLPDPSALQNLASWNPSNPECLLLVVKELVQQYHQFQCSRLRESSRLMFEYQTLLEEPQYGENMEIYAGKKNNWTGEFSARFLLKLPVDFSNIPTYLLKDVNEDPGEDVALLSVSFEDTEATQVYPKLYLSPRIEHALGGSSALHIPAFPGGGCLIDYVPQVCHLLTNKVQYVIQGYHKRREYIAAFLSHFGTGVVEYDAEGFTKLTLLLMWKDFCFLVHIDLPLFFPRDQPTLTFQSVYHFTNSGQLYSQAQKNYPYSPRWDGNEMAKRAKGCQGSRDACSPWEQVLAFAVAKTGCKLLQPQRNWPSSRGPPWRASEGERTAQ

SEQ ID NO: 6603 - protein, 695 aa, Homo sapiens
MNPTETKAIPVSQQMEGPHLPNKKKHKKQAVKTEPEKKSQSTKLSVVHEKKSQEGKPKEHTEPKSLPKQASDTGSNDAHNKKAVSRSAEQQPSEKSTEPKTKPQDMISAGGESVAGITAISGKPGDKKKEKKSLTPAVPVESKPDKPSGKSGMDAALDDLIDTLGGPEETEEENTTYTGPEVSDPMSSTYIEELGKREVTIPPKYRELLAKPIGPDDAIDALSSDFTCGSPTAAGKKTEKEESTEVLKAQSAGTVRSAAPPQEKKRKVEKDTMSDQALEALSASLGTRQAEPELDLRSIKEVDEAKAKEEKLEKCGEDDETIPSEYRLKPATDKDGKPLLPEPEEKPKPRSESELIDELSEDFDRSECKEKPSKPTEKTEESKAAAPAPVSEAVCRTSMCSIQSAPPEPATLKGTVPDDAVEALADSLGKKEADPEDGKPVMDKVKEKAKEEDREKLGEKEETIPPDYRLEEVKDKDGKPLLPKESKEQLPPMSEDFLLDALSEDFSGPQNASSLKFEDAKLAAAISEVVSQTPASTTQAGAPPRDTSQSDKDLDDALDKLSDSLGQRQPDPDENKPMEDKVKEKAKAEHRDKLGERDDTIPPEYRHLLDDNGQDKPVKPPTKKSEDSKKPADDQDPIDALSGDLDSCPSTTETSQNTAKDKCKKAASSSKAPKNGGKAKDSAKTTEETSKPKDD

SEQ ID NO: 6604 - protein, 1188 aa, Homo sapiens
MGHLPTGIHGARRLLPLLWLFVLFKNATAFHVTVQDDNNIVVSLEASDVISPASVYVVKITGESKNYFFEFEEFNSTLPPPVIFKASYHGLYYIITLVVVNGNVVTKPSRSITVLTKPLPVTSVSIYDYKPSPETGVLFEIHYPEKYNVFTRVNISYWEGKDFRTMLYKDFFKGKTVFNHWLPGMCYSNITFQLVSEATFNKSTLVEYSGVSHEPKQHRTAPYPPQNISVRIVNLNKNNWEEQSGNFPEESFMRSQDTIGKEKLFHFTEETPEIPSGNISSGWPDFNSSDYETTSQPYWWDSASAAPESEDEFVSVLPMEYENNSTLSETEKSTSGSFSFFPVQMILTWLPPKPPTAFDGFHIHIEREENFTEYLMVDEEAHEFVAELKEPGKYKLSVTTFSSSGSCETRKSQSAKSLSFYISPSGEWIEELTEKPQHVSVHVLSSTTALMSWTSSQENYNSTIVSVVSLTCQKQKESQRLEKQYCTQVNSSKPIIENLVPGAQYQVVIYLRKGPLIGPPSDPVTFAIVPTGIKDLMLYPLGPTAVVLSWTRPYLGVFRKYVVEMFYFNPATMTSEWTTYYEIAATVSLTASVRIANLLPAWYYNFRVTMVTWGDPELSCCDSSTISFITAPVAPEITSVEYFNSLLYISWTYGDDTTDLSHSRMLHWMVVAEGKKKIKKSVTRNVMTAILSLPPGDIYNLSVTACTERGSNTSMLRLVKLEPAPPKSLFAVNKTQTSVTLLWVEEGVADFFEVFCQQVGSSQKTKLQEPVAVSSHVVTISSLLPATAYNCSVTSFSHDSPSVPTFIAVSTMVTEMNPNVVVISVLAILSTLLIGLLLVTLIILRKKHLQMARECGAGTFVNFASLERDGKLPYNWSKNGLKKRKLTNPVQLDDFDAYIKDMAKDSDYKFSLQFEELKLIGLDIPHFAADLPLNRCKNRYTNILPYDFSRVRLVSMNEEEGADYINANYIPGYNSPQEYIATQGPLPETRNDFWKMVLQQKSQIIVMLTQCNEKRRVKCDHYWPFTEEPIAYGDITVEMISEEEQDDWACRHFRINYADEMQDVMHFNYTAWPDHGVPTANAAESILQFVHMVRQQATKSKGPMIIHCSAGVGRTGTFIALDRLLQHIRDHEFVDILGLVSEMRSYRMSMVQTEEQYIFIHQCVQLMWMKKKQQFCISDVIYENVSKS

SEQ ID NO: 6605 - protein, 1166 aa, Homo sapiens
MCVNPTPGGTISRASRDLLKEFPQPKNLLNSVIGRALGISHAKDKLVYVHTNGPKKKKVTLHIKWPKSVEVEGYGSKKIDAERQAAAAACQLFKGWGLLGPRNELFDAAKYRVLADRFGSPADSWWRPEPTMPPTSWRQLNPESIRPGGPGGLSRSLGREEEEDEEEELEEGTIDVTDFLSMTQQDSHAPLRDSRGSSFEMTDDDSAIRALTQFPLPKNLLAKVIQIATSSSTAKNLMQFHTVGTKTKLSTLTLLWPCPMTFVAKGRRKAEAENKAAALACKKLKSLGLVDRNNEPLTHAMYNLASLRELGETQRRPCTIQVPEPILRKIETFLNHYPVESSWIAPELRLQSDDILPLGKDSGPLSDPITGKPYVPLLEAEEVRLSQSLLELWRRRGPVWQEAPQLPVDPHRDTILNAIEQHPVVVISGDTGCGKTTRIPQLLLERYVTEGRGARCNVIITQPRRISAVSVAQRVSHELGPSLRRNVGFQVRLESKPPSRGGALLFCTVGILLRKLQSNPSLEGVSHVIVDEVHERDVNTDFLLILLKGLQRLNPALRLVLMSATGDNERFSRYFGGCPVIKVPGFMYPVKEHYLEDILAKLGKHQYLHRHRHHESEDECALDLDLVTDLVLHIDARGEPGGILCFLPGWQEIKGVQQRLQEALGMHESKYLILPVHSNIPMMDQKAIFQQPPVGVRKIVLATNIAETSITINDIVHVVDSGLHKEERYDLKTKVSCLETVWVSRANVIQRRGRAGRCQSGFAYHLFPRSRLEKMVPFQVPEILRTPLENLVLQAKIHMPEKTAVEFLSKAVDSPNIKAVDEAVILLQEIGVLDQREYLTTLGQRLAHISTDPRLAKAIVLAAIFRCLHPLLVVVSCLTRDPFSSSLQNRAEVDKVKALLSHDSGSDHLAFVRAVAGWEEVLRWQDRSSRENYLEENLLYAPSLRFIHGLIKQFSENIYEAFLVGKPSDCTLASAQCNEYSEEEELVKGVLMAGLYPNLIQVRQGKVTRQGKFKPNSVTYRTKSGNILLHKSTINREATRLRSRWLTYFMAVKSNGSVFVRDSSQVHPLAVLLLTDGDVHIRDDGRRATISLSDSDLLRLEGDSRTVRLLKELRRALGRMVERSLRSELAALPPSVQEEHGQLLALLAELLRGPCGSFDVRKTADD

SEQ ID NO: 6606 - protein, 783 aa, Homo sapiens
MVAKPPVMSFHFAQDLWPEQNIKDSFQKVTLRRYGKCEYENLQLRKGCKHVDECTGHKGGHNTVNQCLTATPSKIFQCNKYVKVFDKFSNSNRYKRRHTGNKHFKCKECSKSFCVLSQLTQHRRIHTRVNSYKCEECGKAFNWFSTLTKHKRIHTGEKPYKCEECGKAFNQSSQLTRHKIIHTEEKPNKCEECGKAFKQASHLTIHKIIHTGEKPYKYEECGKVFSQSSHLTTQKILHTGENLYKCKECGKAFNLFSNLTNHKRIHAGEKPYKCKECGRAFNISSNLNKQEKIHTGGKLNKCEECDKAFNRSLKLTAHKKILMEEKPYKCEECGKVFNQFSTLTRHKIIHTGEKPYKCKECGKAFNQSSNLTEHKKIHTAEKSYKCEECGKAFNQHSNLINHRKIYSGEKPYKCEECGKAFNRSSTLTRHKKIHTGEKPYKCEECDRAFSQSSNLTEHKKIHTGEKPYKCEECGKAFNRFSTLTKHKRIHTGEKPYKCEECGKAFNQSYQLTRHKIVHTKEKLNKCEEFGKAFKQSSHRTIHKIIHTGEKPYKCEEHGKVFNQSSNLTTQKIIHTGENLYKFEEHGKAFNLFSNITNHKIIYTGEKPHKCEECGKAYNRFSNLTIHKRIHTGEKPYQCAECGKAFNCSSTLNRHKIIHTGEKPYKCKECGKAFNLSSTLTAHKKIHTGEKPYKCEECGKAFNQSSNLTTHKKIHTSEKPYKCEECGKSFNQFSSLNIHKIIHTGEKPYKCGDYGRAFNLSSNLTTHKKIHTGEKPYKCEYGKT

SEQ ID NO: 6607 - protein, 390 aa, Homo sapiens
MNSLSEANTKFMFDLFQQFRKSKENNIFYSPISITSALGMVLLGAKDNTAQQISKVLHFDQVTENTTEKAATYHVDRSGNVHHQFQKLLTEFNKSTDAYELKIANKLFGEKTYQFLQEYLDAIKKFYQTSVESTDFANAPEESRKKINSWVESQTNEKIKNLFPDGTIGNDTTLVLVNAIYFKGQWENKFKKENTKEEKFWPNKNTYKSVQMMRQYNSFNFALLEDVQAKVLEIPYKGKDLSMIVLLPNEIDGLQKLEEKLTAEKLMEWTSLQNMRETCVDLHLPRFKMEESYDLKDTLRTMGMVNIFNGDADLSGMTWSHGLSVSKVLHKAFVEVTEEGVEAAAATAVVVVELSSPSTNEEFCCNHPFLFFIRQNKTNSILFYGRFSSP

SEQ ID NO: 6608 - protein, 840 aa, Homo sapiens
MDPTAGSKKEPGGGAATEEGVNRIAVPKPPSIEEFSIVKPISRGAFGKVYLGQKGGKLYAVKVVKKADMINKNMTHQVQAERDALALSKSPFIVHLYYSLQSANNVYLVMEYLIGGDVKSLLHIYGYFDEEMAVKYISEVALALDYLHRHGIIHRDLKPDNMLISNEGHIKLTDFGLSKVTLNRDINMMDILTTPSMAKPRQDYSRTPGQVLSLISSLGFNTPIAEKNQDPANILSACLSETSQLSQGLVCPMSVDQKDTTPYSSKLLKSCLETVASNPGMPVKCLTSNLLQSRKRLATSSASSQSHTFISSVESECHSSPKWEKDCQESDEALGPTMMSWNAVEKLCAKSANAIETKGFNKKDLELALSPIHNSSALPTTGRSCVNLAKKCFSGEVSWEAVELDVNNINMDTDTSQLGFHQSNQWAVDSGGISEEHLGKRSLKRNFELVDSSPCKKIIQNKKTCVEYKHNEMTNCYTNQNTGLTVEVQDLKLSVHKSQQNDCANKENIVNSFTDKQQTPEKLPIPMIAKNLMCELDEDCEKNSKRDYLSSSFLCSDDDRASKNISMNSDSSFPGISIMESPLESQPLDSDRSIKESSFEESNIEDPLIVTPDCQEKTSPKGVENPAVQESNQKMLGPPLEVLKTLASKRNAVAFRSFNSHINASNNSEPSRMNMTSLDAMDISCAYSGSYPMAITPTQKRRSCMPHQTPNQIKSGTPYRTPKSVRRGVAPVDDGRILGTPDYLAPELLLGRAHDIPWPEGEEKLSDNAQSAVEILLTIDDTKRAGMKELKRHPLFSDVDWENLQHQTMPFIPQPDDETDTSYFEARNTAQHLTVSGFSL

SEQ ID NO: 6609 - protein, 1600 aa, Homo sapiens
MNKAPQSTGPPPAPSPGLPQPAFPPGQTAPVVFSTPQATQMNTPSQPRQHFYPSRAQPPSSAASRVQSAAPARPGPAAHVYPAGSQVMMIPSQISYPASQGAYYIPGQGRSTYVVPTQQYPVQPGAPGFYPGASPTEFGTYAGAYYPAQGVQQFPTGVAPTPVLMNQPPQIAPKRERKTIRIRDPNQGGKDITEEIMSGARTASTPTPPQTGGGLEPQANGETPQVAVIVRPDDRSQGAIIADRPGLPGPEHSPSESQPSSPSPTPSPSPVLEPGSEPNLAVLSIPGDTMTTIQMSVEESTPISRETGEPYRLSPEPTPLAEPILEVEVTLSKPVPESEFSSSPLQAPTPLASHTVEIHEPNGMVPSEDLEPEVESSPELAPPPACPSESPVPIAPTAQPEELLNGAPSPPAVDLSPVSEPEEQAKEVTASMAPPTIPSATPATAPSATSPAQEEEMEEEEEEEEGEAGEAGEAESEKGGEELLPPESTPIPANLSQNLEAAAATQVAVSVPKRRRKIKELNKKEAVGDLLDAFKEANPAVPEVENQPPAGSNPGPESEGSGVPPRPEEADETWDSKEDKIHNAENIQPGEQKYEYKSDQWKPLNLEEKKRYDREFLLGFQFIFASMQKPEGLPHISDVVLDKANKTPLRPLDPTRLQGINCGPDFTPSFANLGRTTLSTRGPPRGGPGGELPRGPQAGLGPRRSQQGPRKEPRKIIATVLMTEDIKLNKAEKAWKPSSKRTAADKDRGEEDADGSKTQDLFRRVRSILNKLTPQMFQQLMKQVTQLAIDTEERLKGVIDLIFEKAISEPNFSVAYANMCRCLMALKVPTTEKPTVTVNFRKLLLNRCQKEFEKDKDDDEVFEKKQKEMDEAATAEERGRLKEELEEARDIARRRSLGNIKFIGELFKLKMLTEAIMHDCVVKLLKNHDEESLECLCRLLTTIGKDLDFEKAKPRMDQYFNQMEKIIKEKKTSSRIRFMLQDVLDLRGSNWVPRRGDQGPKTIDQIHKEAEMEEHREHIKVQQLMAKGSDKRRGGPPGPPISRGLPLVDDGGWNTVPISKGSRPIDTSRLTKITKPGSIDSNNQLFAPGGRLSWGKGSSGGSGAKPSDAASEAARPATSTLNRFSALQQAVPTESTDNRRVVQRSSLSRERGEKAGDRGDRLERSERGGDRGDRLDRARTPATKRSFSKEVEERSRERPSQPEGLRKAASLTEDRDRGRDAVKREAALPPVSPLKAALSEEELEKKSKAIIEEYLHLNDMKEAVQCVQELASPSLLFIFVRHGVESTLERSAIAREHMGQLLHQLLCAGHLSTAQYYQGLYEILELAEDMEIDIPHVWLYLAELVTPILQEGGVPMGELFREITKPLRPLGKAASLLLEILGLLCKSMGPKKVGTLWREAGLSWKEFLPEGQDIGAFVAEQKVEYTLGEESEAPGQRALPSEELNRQLEKLLKEGSSNQRVFDWIEANLSEQQIVSNTLVRALMTAVCYSAIIFETPLRVDVAVLKARAKLLQKYLCDEQKELQALYALQALVVTLEQPPNLLRMFFDALYDEDVVKEDAFYSWESSKDPAEQQGKGVALKSVTAFFKWLREAEEESDHN

SEQ ID NO: 6610 - protein, 619 aa, Homo sapiens
MDDQQALNSIMQDLAVLHKASRPALSLQETRKAKSSSPKKQNDVRVKFEHRGEKRILQFPRPVKLEDLRSKAKIAFGQSMDLHYTNNELVIPLTTQDDLDKAVELLDRSIHMKSLKILLVINGSTQATNLEPLPSLEDLDNTVFGAERKKRLSIIGPTSRDRSSPPPGYIPDELHQVARNGSFTSINSEGEFIPESMDQMLDPLSLSSPENSGSGSCPSLDSPLDGESYPKSRMPRAQSYPDNHQEFSDYDNPIFEKFGKGGTYPRRYHVSYHHQEYNDGRKTFPRARRTQGTSLRSPVSFSPTDHSLSTSSGSSIFTPEYDDSRIRRRGSDIDNPTLTVMDISPPSRSPRAPTNWRLGKLLGQGAFGRVYLCYDVDTGRELAVKQVQFDPDSPETSKEVNALECEIQLLKNLLHERIVQYYGCLRDPQEKTLSIFMEYMPGGSIKDQLKAYGALTENVTRKYTRQILEGVHYLHSNMIVHRDIKGANILRDSTGNVKLGDFGASKRLQTICLSGTGMKSVTGTPYWMSPEVISGEGYGRKADIWSVACTVVEMLTEKPPWAEFEAMAAIFKIATQPTNPKLPPHVSDYTRDFLKRIFVEAKLRPSADELLRHMFVHYH

SEQ ID NO: 6611 - protein, 429 aa, Homo sapiens
MASNSIFDSFPTYSPTFIRDPSTSRRFTPPSPAFPCGGGGGKMGENSGALSAQAAVGPGGRARPEVRSMVDVLADHAGELVRTDSPNFLCSVLPSHWRCNKTLPVAFKVVALGDVPDGTVVTVMAGNDENYSAELRNASAVMKNQVARFNDLRFVGRSGRGKSFTLTITVFTNPTQVATYHRAIKVTVDGPREPRRHRQKLEDQTKPFPDRFGDLERLRMRVTPSTPSPRGSLSTTSHFSSQPQTPIQGTSELNPFSDPRQFDRSFPTLPTLTESRFPDPRMHYPGAMSAAFPYSATPSGTSISSLSVAGMPATSRFHHTYLPPPYPGAPQNQSGPFQANPSPYHLYYGTSSGSYQFSMVAGSSSGGDRSPTRMLASCTSSAASVAAGNLMNPSLGGQSDGVEADGSHSNSPTALSTPGRMDEAVWRPY

SEQ ID NO: 6612 - protein, 966 aa, Homo sapiens
MEPQVTLNVTFKNEIQSFLVSDPENTTWADIEAMVKVSFDLNTIQIKYLDEENEEVSINSQGEYEEALKMAVKQGNQLQMQVHEGHHVVDEAPPPVVGAKRLAARAGKKPLAHYSSLVRVLGSDMKTPEDPAVQSFPLVPCDTDQPQDKPPDWFTSYLETFREQVVNETVEKLEQKLHEKLVLQNPSLGSCPSEVSMPTSEETLFLPENQFSWHIACNNCQRRIVGVRYQCSLCPSYNICEDCEAGPYGHDTNHVLLKLRRPVVGSSEPFCHSKYSTPRLPAALEQVRLQKQVDKNFLKAEKQRLRAEKKQRKAEVKELKKQLKLHRKIHLWNSIHGLQSPKSPLGRPESLLQSNTLMLPLQPCTSVMPMLSAAFVDENLPDGTHLQPGTKFIKHWRMKNTGNVKWSADTKLKFMWGNLTLASTEKKDVLVPCLKAGHVGVVSVEFIAPALEGTYTSHWRLSHKGQQFGPRVWCSIIVDPFPSEESPDNIEKGMISSSKTDDLTCQQEETFLLAKEERQLGEVTEQTEGTAACIPQKAKNVASERELYIPSVDLLTAQDLLSFELLDINIVQELERVPHNTPVDVTPCMSPLPHDSPLIEKPGLGQIEEENEGAGFKALPDSMVSVKRKAENIASVEEAEEDLSGTQFVCETVIRSLTLDAAPDHNPPCRQKSLQMTFALPEGPLGNEKEEIIHIAEEEAVMEEEEDEEDEEEEDELKDEVQSQSSASSEDYIIILPECFDTSRPLGDSMYSSALSQPGLERGAEGKPGVEAGQEPAEAGERLPGGENQPQEHSISDILTTSQTLETVPLIPEVVELPPSLPRSSPCVHHHGSPGVDLPVTIPEVSSVPDQIRGEPRGSSGLVNSRQKSYDHSRHHHGSSIAGGLVKGALSVAASAYKALFAGPPVTAQPIISEDQTAALMAHLFEMGFCDRQLNLRLLKKHNYNILQVVTELLQLNNNDWYSQRY

SEQ ID NO: 6613 - protein, 630 aa, Homo sapiens
MAAKTPSSEESGLPKLPVPPLQQTLATYLQCMRHLVSEEQFRKSQAIVQQFGAPGGLGETLQQKLLERQEKTANWVSEYWLNDMYLNNRLALPVNSSPAVIFARQHFPGTDDQLRFAASLISGVLSYKALLDSHSIPTDCAKGQLSGQPLCMKQYYGLFSSYRLPGHTQDTLVAQNSSIMPEPEHVIVACCNQFFVLDVVINFRRLSEGDLFTQLRKIVKMASNEDERLPPIGLLTSDGRSEWAEARTVLVKDSTNRDSLDMIERCICLVCLDAPGGVELSDTHRALQLLHGGGYSKNGANRWYDKSLQFVVGRDGTCGVVCEHSPFDGIVLVQCTEHLLKHVTQSSRKLIRADSVSELPAPRRLRWKCSPEIQGHLASSAEKLQRIVKNLDFIVYKFDNYGKTFIKKQKCSPDAFIQVALQLAFYRLHRRLVPTYESASIRRFQEGRVDNIRSATPEALAFVRAVTDHKAAVPASEKLLLLKDAIRAQTAYTVMAITGMAIDNHLLALRELARAMCKELPEMFMDETYLMSNRFVLSTSQVPTTTEMFCCYGPVVPNGYGACYNPQPETILFCISSFHSCKETSSSKFAKAVEESLIDMRDLCSLLPPTESKPLATKEKATRPSQGHQP

SEQ ID NO: 6614 - protein, 567 aa, Homo sapiens
MKPVWVATLLWMLLLVPRLGAARKGSPEEASFYYGTFPLGFSWGVGSSAYQTEGAWDQDGKGPSIWDVFTHSGKGKVLGNETADVACDGYYKVQEDIILLRELHVNHYRFSLSWPRLLPTGIRAEQVNKKGIEFYSDLIDALLSSNITPIVTLHHWDLPQLLQVKYGGWQNVSMANYFRDYANLCFEAFGDRVKHWITFSDPRAMAEKGYETGHHAPGLKLRGTGLYKAAHHIIKAHAKAWHSYNTTWRSKQQGLVGISLNCDWGEPVDISNPKDLEAAERYLQFCLGWFANPIYAGDYPQVMKDYIGRKSAEQGLEMSRLPVFSLQEKSYIKGTSDFLGLGHFTTRYITERNYPSRQGPSYQNDRDLIELVDPNWPDLGSKWLYSVPWGFRRLLNFAQTQYGDPPIYVMENGASQKFHCTQLCDEWRIQYLKGYINEMLKAIKDGANIKGYTSWSLLDKFEWEKGYSDRYGFYYVEFNDRNKPRYPKASVQYYKKIIIANGFPNPREVESWYLKALETCSINNQMLAAEPLLSHMQMVTEIVVPTVCSLCVLITAVLLMLLLRRQS

SEQ ID NO: 6615 - protein, 265 aa, Homo sapiens
MGLPGLFCLAVLAASSFSKAREEEITPVVSIAYKVLEVFPKGRWVLITCCAPQPPPPITYSLCGTKNIKVAKKVVKTHEPASFNLNVTLKSSPDLLTYFCWASSTSGAHVDSARLQMHWELWSKPVSELRANFTLQDRGAGPRVEMICQASSGSPPITNSLIGKDGQVHLQQRPCHRQPANFSFLPSQTSDWFWCQAANNANVQHSALTVVPPGGDQKMEDWQGPLESPILALPLYRSTRRLSEEEFGGFRIGNGEVRGRKAAAM

SEQ ID NO: 6616 - protein, 304 aa, Homo sapiens
MTRHGKNCTAGAVYTYHEKKKDTAASGYGTQNIRLSRDAVKDFDCCCLSLQPCHDPVVTPDGYLYEREAILEYILHQKKEIARQMKAYEKQRGTRREEQKELQRAASQDHVRGFLEKESAIVSRPLNPFTAKALSGTSPGDSDDVQPGPSVGPPSKDKDKVLPSFWIPSLTPEAKATKLEKPSRTVTCPMSGKPLRMSDLTPVHFTPLDSSVDRVGLITRSERYVCAVTRDSLSNATPCAVLRPSGAVVTLECVEKLIRKDMVDPVTGDKLTDRDIIVLQRGGTGFAGSGVKLQAEKSRPVMQA

SEQ ID NO: 6617 - protein, 250 aa, Homo sapiens [sequence omitted]

SEQ ID NO: 6618 - protein, 360 aa, Homo sapiens
MPGTVATLRFQLLPPEPDDAFWGAPCEQPLERRYQALPALVCIMCCLFGVVYCFFGYRCFKAVLFLTGLLFGSVVIFLLCYRERVLETQLSAGASAGIALGIGLLCGLVAMLVRSVGLFLVGLLLGLLLAAAALLGSAPYYQPGSVWGPLGLLLGGGLLCALLTLRWPRPLTTLATAVTGAALIATAADYFAELLLLGRYVVERLRAAPVPPLCWRSWALLALWPLLSLMGVLVQWRVTAEGDSHTEVVISRQRRRVQLMRIRQQEDRKEKRRKKRPPRAPLRGPRAPPRPGPPDPAYRRRPVPIKRFNGDVLSPSYIQSFRDRQTGSSLSSFMASPTDADYEYGSRGPLTACSGPPVRV

SEQ ID NO: 6619 - protein, 444 aa, Homo sapiens
MWQIVFFTLSCDLVLAAAYNNFRKSMDSIGKKQYQVQHGSCSYTFLLPEMDNCRSSSSPYVSNAVQRDAPLEYDDSVQRLQVLENIMENNTQWLMKVLNQTTRLELQLLEHSLSTNKLEKQILDQTSEINKLQDKNSFLEKKVLAMEDKHIIQLQSIKEEKDQLQVLVSKQNSIIEELEKKIVTATVNNSVLQKQQHDLMETVNNLLTMMSTSNSAKDPTVAKEEQISFRDCAEVFKSGHTTNGIYTLTFPNSTEEIKAYCDMEAGGGGWTIIQRREDGSVDFQRTWKEYKVGFGNPSGEYWLGNEFVSQLTNQQRYVLKIHLKDWEGNEAYSLYEHFYLSSEELNYRIHLKGLTGTAGKISSISQPGNDFSTKDGDNDKCICKCSQMLTGGWWFDACGPSNLNGMYYPQRQNTNKFNGIKWYYWKGSGYSLKATTMMIRPADF

SEQ ID NO: 6620 - protein, 313 aa, Homo sapiens
MKRENQSSVSEFLLLDLPIWPEQQAVFFTLFLGMYLITVLGNLLIILLIRLDSHLHTPMFFFLSHLALTDISLSSVTVPKMLLSMQTQDQSILYAGCVTQMYFFIFFTDLDNFLLTSMAYDRYVAICHPLRYTTIMKEGLCNLLVTVSWILSCTNALSHTLLLAQLSFCADNTIPHFFCDLVALLKLSCSDISLNELVIFTVGQAVITLPLICILISYGHIGVTILKAPSTKGIFKALSTCGSHLSVVSLYYGTIIGLYFLPSSSASSDKDVIASVMYTVITPLLNPFIYSLRNRDIKGALERLFNRATVLSQ

SEQ ID NO: 6621 - protein, 785 aa, Homo sapiens
MPGVIPSESNGLSRGSPSKKNRLSLKFFQKKETKRALDFTDSQENEEKASEYRASEIDQVVPAAQSSPINCEKRENLLPFVGLNNLGNTCYLNSILQVLYFCPGFKSGVKHLFNIISRKKEALKDEANQKDKGNCKEDSLASYELICSLQSLIISVEQLQASFLLNPEKYTDELATQPRRLLNTLRELNPMYEGYLQHDAQEVLQCILGNIQETCQLLKKEEVKNVAELPTKVEEIPHPKEEMNGINSIEMDSMRHSEDFKEKLPKGNGKRKSDTEFGNMKKKVKLSKEHQSLEENQRQTRSKRKATSDTLESPPKIIPKYISENESPRPSQKKSRVKINWLKSATKQPSILSKFCSLGKITTNQGVKGQSKENECDPEEDLGKCESDNTTNGCGLESPGNTVTPVNVNEVKPINKGEEQIGFELVEKLFQGQLVLRTRCLECESLTERREDFQDISVPVQEDELSKVEESSEISPEPKTEMKTLRWAISQFASVERIVGEDKYFCENCHHYTEAERSLLFDKMPEVITIHLKCFAASGLEFDCYGGGLSKINTPLLTPLKLSLEEWSTKPTNDSYGLFAVVMHSGITISSGHYTASVKVTDLNSLELDKGNFVVDQMCEIGKPEPLNEEEARGVVENYNDEEVSIRVGGNTQPSKVLNKKNVEAIGLLGGQKSKADYELYNKASNPDKVASTAFAENRNSETSDTTGTHESDRNKESSDQTGINISGFENKISYVVQSLKEYEGKWLLFDDSEVKVTEEKDFLNSLSPSTSPTSTPYLLFYKKL

SEQ ID NO: 6622 - protein, 1102 aa, Homo sapiens
MNHQQQQQQQKAGEQQLSEPEDMEMEAGDTDDPPRITQNPVINGNVALSDGHNTAEEDMEDDTSWRSEATFQFTVERFSRLSESVLSPPCFVRNLPWKIMVMPRFYPDRPHQKSVGFFLQCNAESDSTSWSCHAQAVLKIINYRDDEKSFSRRISHLFFHKENDWGFSNFMAWSEVTDPEKGFIDDDKVTFEVFVQADAPHGVAWDSKKHTGYVGLKNQGATCYMNSLLQTLFFTNQLRKAVYMMPTEGDDSSKSVPLALQRVFYELQHSDKPVGTKKLTKSFGWETLDSFMQHDVQELCRVLLDNVENKMKGTCVEGTIPKLFRGKMVSYIQCKEVDYRSDRREDYYDIQLSIKGKKNIFESFVDYVAVEQLDGDNKYDAGEHGLQEAEKGVKFLTLPPVLHLQLMRFMYDPQTDQNIKINDRFEFPEQLPLDEFLQKTDPKDPANYILHAVLVHSGDNHGGHYVVYLNPKGDGKWCKFDDDVVSRCTKEEAIEHNYGGHDDDLSVRHCTNAYMLVYIRESKLSEVLQAVTDHDIPQQLVERLQEEKRIEAQKRKERQEAHLYMQVQIVAEDQFCGHQGNDMYDEEKVKYTVFKVLKNSSLAEFVQSLSQTMGFPQDQIRLWPMQARSNGTKRPAMLDNEADGNKTMIELSDNENPWTIFLETVDPELAASGATLPKFDKDHDVMLFLKMYDPKTRSLNYCGHIYTPISCKIRDLLPVMCDRAGFIQDTSLILYEEVKPNLTERIQDYDVSLDKALDELMDGDIIVFQKDDPENDNSELPTAKEYFRDLYHRVDVIFCDKTIPNDPGFVVTLSNRMNYFQVAKTVAQRLNTDPMLLQFFKSQGYRDGPGNPLRHNYEGTLRDLLQFFKPRQPKKLYYQQLKMKITDFENRRSFKCIWLNSQFREEEITLYPDKHGCVRDLLEECKKAVELGEKASGKLRLLEIVSYKIIGVHQEDELLECLSPATSRTFRIEEIPLDQVDIDKENEMLVTVAHFHKEVFGTFGIPFLLRIHQGEHFREVMKRIQSLLDIQEKEFEKFKFAIVMMGRHQYINEDEYEVNLKDFEPQPGNMSHPRPWLGLDHFNKAPKRSRYTYLEKAIKIHN

SEQ ID NO: 6623 - protein, 649 aa, Homo sapiens
MGTALVYHEDMTATRLLWDDPECEIERPERLTAALDRLRQRGLEQRCLRLSAREASEEELGLVHSPEYVSLVRETQVLGKEELQALSGQFDAIYFHPSTFHCARLAAGAGLQLVDAVLTGAVQNGLALVRPPGHHGQRAAANGFCVFNNVAIAAAHAKQKHGLHRILVVDWDVHHGQGIQYLFEDDPSVLYFSWHRYEHGRFWPFLRESDADAVGRGQGLGFTVNLPWNQVGMGNADYVAAFLHLLLPLAFEGQMQATPECFAHLTQLLQVLAGGRVCAVLEGGYHLESLAESVCMTVQTLLGDPAPPLSGPMAPCQSALESIQSARAAQAPHWKSLQQQDVTAVPMSPSSHSPEGRPPPLLPGGPVCKAAASAPSSLLDQPCLCPAPSVRTAVALTTPDITLVLPPDVIQQEASALREETEAWARPHESLAREEALTALGKLLYLLDGMLDGQVNSGIAATPASAAAATLDVAVRRGLSHGAQRLLCVALGQLDRPPDLAHDGRSLWLNIRGKEAAALSMFHVSTPLPVMTGGFLSCILGLVLPLAYGFQPDLVLVALGPGHGLQGPHAALLAAMLRGLAGGRVLALLEENSTPQLAGILARVLNGEAPPSLGPSSVASPEDVQALMYLRGQLEPQWKMLQCHPHLVA

SEQ ID NO: 6624 - protein, 877 aa, Homo sapiens [sequence omitted]

SEQ ID NO: 6625 - protein, 519 aa, Homo sapiens
MARDLVMFRDVAVDFSQEEWECLNSYQRNLYRDVILENYSNLVSLAGCSISKPDVITLLEQGKEPWMVVRDEKRRWTLDLESRYDTKKLFQGKDIYEMNLSQWKVMERIKSCGLEEQESPHEVCFRQVTKTTSEKMPTYRKLTSLPLYQKSHNREKPYECGECGKAFRVRQQLTFHQRIHTGEKPYECKECGKAFRQCAHLSRHQRIHTSDKLYECKKCGKIFTCGSDLRVHQRIHIGEKPYECKECGKAFRVRGQLNLHQRIHTGEKPYECKECGKAFRQYAHLTRHQRLNIAEKCYECKECGQAFLCSTGLRLHHKLHTGEKPYECKECGKAFRVRQQLTLHQRIHTGEKPYDCKECGKTFSRGYHLTLHQRIHTGEKPYECKECQKFFRRYSELISHQGIHIGEKPYECKECGKAFRLFSQLTQHQSIHFGEKPFKCKECEKTFRLLSQLTQHQSIHTGEKPYDCKECGKAFRLHSSLIQHQRIHSGEKPYKCKECKKAFRQHSHLTYHQRIHNVT

SEQ ID NO: 6626 - protein, 702 aa, Homo sapiens
MSNLSKGTGSRKDTKMRIRAFPVREDVLNSLNNNFLQTLNQAWNDHQTAMVMIRDILMYMDRVYVQQNNVENVYNLGLIIFRDQVVRYGCIRDHLRQTLLDMIARERKGEVVDRGAIRNACQMLMILGLEGRSVYEEDFEAPFLEMSAEFFQMESQKFLAENSASVYIKKVEARINEEIERVMHCLDKSTEEPIVKVVERELISKHMKTIVEMENSGLVHMLKNGKTEDLGCMYKLFSRVPNGLKTMCECMSSYLREQGKALVSEEGEGKNPVDYIQGLLDLKSRFDRFLLESFNNDRLFKQTIAGDFEYFLNLNSRSPEYLSLFIDDKLKKGVKGLTEQEVETILDKAMVLFRFMQEKDVFERYYKQHLARRLLTNKSVSDDSEKNMISKLKTECGCQFTSKLEGMFRDMSISNTTMDEFRQHLQATGVSLGGVDLTVRVLTTGYWPTQSATPKCNIPPAPRHAFEIFRRFYLAKHSGRQLTLQHHMGSADLNATFYGPVKKEDGSEVGVGGAQVTGSNTRKHILQVSTFQMTILMLFNNREKYTFEEIQQETDIPERELVRALQSLACGKPTQRVLTKEPKSKEIENGHIFTVNDQFTSKLHRVKIQTVAAKQGESDPERKETRQKVDDDRKHEIEAAIVRIMKSRKKMQHNVLVAEVTQQLKARFLPSPVVIKKRIEGLIEREYLARTPEDRKVYTYVA

SEQ ID NO: 6627 - protein, 2817 aa, Homo sapiens
MSEKSGQSTKAKDGKKYATLSLFNTYKGKSLETQKTTARHGLQSLGKVGISRRMPPPANLPSLKAENKGNDPNVNIVPKDGTGWASKQEQHEEEKTPEVPPAQPKPGVAAPPEVAPAPKSWASNKQGGQGDGIQVNSQFQQEFPSLQAAGDQEKKEKETNDDNYGPGPSLRPPNVACWRDGGKAAGSPSSSDQDEKLPGQDESTAGTSEQNDILKVVEKRIACGPPQAKLNGQQAALASQYRAMMPPYMFQQYPRMTYPPLHGPMRFPPSLSETNKGLRGRGPPPSWASEPERPSILSASELKELDKFDNLDAEADEGWAGAQMEVDYTEQLNFSDDDEQGSNSPKENNSEDQGSKASENNENKKETDEVSNTKSSSQIPAQPSVAKVPYGKGPSFNQERGTSSHLPPPPKLLAQQHPPPDRQAVPGRPGPFPSKQQVADEDEIWKQRRRQQSEISAAVERARKRREEEERRMEEQRKAACAEKLKRLDEKLGILEKQPSPEEIREREREKEREREKELEKEQEQEREKEREKDRERQQEKEKELEKEQEKQREMEKERKQEKEKELERQKEKEKELQKMKEQEKECELEKEREKLEEKIEPREPNLEPMVEKQESENSCNKEEEPVFTRQDSNRSEKEATPVVHETEPESGSQPRPAVLSGYFKQFQKSLPPRFQRQQEQMKQQQWQQQQQQGVLPQTVPSQPSSSTVPPPPHRPLYQPMQPHPQHLASMGFDPRWLMMQSYMDPRMMSGRPAMDIPPIHPGMIPPKPLMRRDQMEGSPNSSESFEHIARSARDHAISLSEPRMLWGSDPYPHAEPQQATTPKATEEPEDVRSEAALDQEQITAAYSVEHNQLEAHPKADFIRESSEAQVQKFLSRSVEDVRPHHTDANNQSACFEAPDQKTLSAPQEERISAVESQPSRKRSVSHGSNHTQKPDEQRSEPSAGIPKVTSRCIDSKEPIERPEEKPKKEGFIRSSEGPKPEKVYKSKSETRWGPRPSSNRREEVNDRPVRRSGPIKKPVLRDMKEEREQRKEKEGEKAEKVTEKVVVKPEKTEKKDLPPPPPPPQPPAPIQPQSVPPPIQPEAEKFPSTETATLAQKPSQDTEKPLEPVSTVQVEPAVKTVNQQTMAAPVVKEEKQPEKVISKDLVIERPRPDSRPAVKKESTLPPRTYWKEARERDWFPDQGYRGRGRGEYYSRGRSYRGSYGGRGRGGRGHTRDYPQYRDNKPRAEHIPSGPLRQREESETRSESSDFEVVPKRRRQRGSETDTDSEIHESASDKDSLSKGKLPKREERPENKKPVKPHSSFKPDNHVRIDNRLLEKPYVRDDDKAKPGFLPKGEPTRRGRGGTFRRGGRDPGGRPSRPSTLRRPAYRDNQWNPRQSEVPKPEDGEPPRRHEQFIPIAADKRPPKFERKFDPARERPRRQRPTRPPRQDKPPRFRRLREREAASKSNEVVAVPTNGTVNNVAQEPVNTLGDISGNKTPDLSNQNSSDQANEEWETASESSDFNERRERDEKKNADLNAQTVVKVGENVLPPKREIAKRSFSSQRPVDRQNRRGNNGPPKSGRNFSGPRNERRSGPPSKSGKRGPFDDQPAGTTGVDLINGSSAHHQEGVPNGTGQKNSKDSTGKKREDPKPGPKKPKEKVDALSQFDLNNYASVVIIDDHPEVTVIEDPQSNLNDDGFTEVVSKKQQKRLQDEERRKKEEQVIQVWNKKNANEKGRSQTSKLPPRFAKKQATGIQQAQSSASVPPLASAPLPPSTSASVPASTSAPLPATLTPVPASTSAPVPASTLAPVLASTSAPVPASPLAPVSASASVSASVPASTSAAAITSSSAPASAPAPTPILASVSTPASVTILASASIPILASALASTSAPTPAPAASSPAAPVITAPTIPASAPTASVPLAPASASAPAPAPTPVSAPNPAPPAPAQTQAQTHKPVQNPLQTTSQSSKQPPPSIRLPSAQTPNGTDYVASGKSIQTPQSHGTLTAELWDNKVAPPAVLNDISKKLGPISPPQPPSVSAWNKPLTSFGSAPSSEGAKNGQESGLEIGTDTIQFGAPASNGNENEVVPVLSEKSADKIPEPKEQRQKQPRAGPIKAQKLPDLSPVENKEHKPGPIGKERSLKNRKVKDAQQVEPEGQEKPSPATVRSTDPVTTKETKAVSEMSTEIGTMISVSSAEYGTNAKESVTDYTTPSSSLPNTVATNNTKMEDTLVNNVPLPNTLPLPKRETIQQSSSLTSVPPTTFSLTFKMESARKAWENSPNVREKGSPVTSTAPPIATGVSSSASGPSTANYNSFSSASMPQIPVASVTPTASLSGAGTYTTSSLSTKSTTTSDPPNICKVKPQQLQTSSLPSASHFSQLSCMPSLIAQQQQNPQVYVSQSAAAQIPAFYMDTSHLFNTQHARLAPPSLAQQQGFQPGLSQPTSVQQIPIPIYAPLQGQHQAQLSLGAGPAVSQAQELFSSSLQPYRSQPAFMQSSLSQPSVVLSGTAIHNFPTVQHQELAKAQSGLAFQQTSNTQPIPILYEHQLGQASGLGGSQLIDTHLLQARANLTQASNLYSGQVQQPGQTNFYNTAQSPSALQQVTVPLPASQLSLPNFGSTGQPLIALPQTLQPPLQHTTPQAQAQSLSRPAQVSQPFRGLIPAGTQHSMIATTGKMSEMELKAFGSGIDIKPGTPPIAGRSTTPTSSPFRATSTSPNSQSSKMNSIVYQKQFQSAPATVRMTQPFPTQFAPQAKQRAEVLQSTQRFFSEQQQSKQIGGGKAQKVDSDSSKPPETLTDPPGVCQEKVEEKPPPAPSIATKPVRTGPIKPQAIKTEETKS

SEQ ID NO: 6628 - protein, 1201 aa, Homo sapiens
MALGTTLRASLLLLGLLTEGLAQLAIPASVPRGFWALPENLTVVEGASVELRCGVSTPGSAVQWAKDGLLLGPDPRIPGFPRYRLEGDPARGEFHLHIEACDLSDDAEYECQVGRSEMGPELVSPRVILSILVPPKLLLLTPEAGTMVTWVAGQEYVVNCVSGDAKPAPDITILLSGQTISDISANVNEGSQQKLFTVEATARVTPRSSDNRQLLVCEASSPALEAPIKASFTVNVLFPPGPPVIEWPGLDEGHVRAGQSLELPCVARGGNPLATLQWLKNGQPVSTAWGTEHTQAVARSVLVMTVRPEDHGAQLSCEAHNSVSAGTQEHGITLQVTFPPSAIIILGSASQTENKNVTLSCVSKSSRPRVLLRWWLGWRQLLPMEETVMDGLHGGHISMSNLTFLARREDNGLTLTCEAFSEAFTKETFKKSLILNVKYPAQKLWIEGPPEGQKLRAGTRVRLVCLAIGGNPEPSLMWYKDSRTVTESRLPQESRRVHLGSVEKSGSTFSRELVLVTGPSDNQAKFTCKAGQLSASTQLAVQFPPTNVTILANASALRPGDALNLTCVSVSSNPPVNLSWDKEGERLEGVAAPPRRAPFKGSAAARSVLLQVSSRDHGQRVTCRAHSAELRETVSSFYRLNVLYRPEFLGEQVLVVTAVEQGEALLPVSVSANPAPEAFNWTFRGYRLSPAGGPRHRILSSGALHLWNVTRADDGLYQLHCQNSEGTAEARLRLDVHYAPTIRALQDPTEVNVGGSVDIVCTVDANPILPGMFNWERLGEDEEDQSLDDMEKISRGPTGRLRIHHAKLAQAGAYQCIVDNGVAPPARRLLRLVVRFAPQVEHPTPLTKVAAAGDSTSSATLHCRARGVPNIVFTWTKNGVPLDLQDPRYTEHTYHQGGVHSSLLTIANVSAAQDYALFTCTATNALGSDQTNIQLVSISRPDPPSGLKVVSLTPHSVGLEWKPGFDGGLPQRFCIRYEALGTPGFHYVDVVPPQATTFTLTGLQPSTRYRVWLLASNALGDSGLADKGTQLPITTPGLHQPSGEPEDQLPTEPPSGISEKTEAGSEEDRVRNEYEESQWTGERDTQSSTVSTTEAEPYYRSLRDFSPQLPPTQEEVSYSRGFTGEDEDMAFPGHLYDEVERTYPPSGAWGPLYDEVQMGPWDLHWPEDTYQDPRGIYDQVAGDLDTLEPDSLPFELRGHLV

SEQ ID NO: 6629 - protein, 394 aa, Homo sapiens
MIVFIFLAMGLSLENEYTSQTNNCTYLREQCLRDANGCKHAWRVMEDACNDSDPGDPCKMRNSSYCNLSIQYLVESNFQFKECLCTDDFYCTVNKLLGKKCINKSDNVKEDKFKWNLTTRSHHGFKGMWSCLEVAEACVGDVVCNAQLASYLKACSANGNPCDLKQCQAAIRFFYQNIPFNIAQMLAFCDCAQSDIPCQQSKEALHSKTCAVNMVPPPTCLSVIRSCQNDELCRRHYRTFQSKCWQRVTRKCHEDENCISTLSKQDLTCSGSDDCKAAYIDILGTVLQVQCTCRTITQSEESLCKIFQHMLHRKSCFNYPTLSNVKGMALYTRKHANKITLTGFHSPFNGEVIYAAMCMTVTCGILLLVMVKLRTSRISSKARDPSSIQIPGEL

SEQ ID NO: 6630 - protein, 1014 aa, Homo sapiens
MFEDKPHAEGAAVVAAAGEALQALCQELNLDEGSAAEALDDFTAIRGNYSLEGEVTHWLACSLYVACRKSIIPTVGKGIMEGNCVSLTRILRSAKLSLIQFFSKMKKWMDMSNLPQEFRERIERLERNFEVSTVIFKKYEPIFLDIFQNPYEEPPKLPRSRKQRRIPCSVKDLFNFCWTLFVYTKGNFRMIGDDLVNSYHLLLCCLDLIFANAIMCPNRQDLLNPSFKGLPSDFHTADFTASEEPPCIIAVLCELHDGLLVEAKGIKEHYFKPYISKLFDRKILKGECLLDLSSFTDNSKAVNKEYEEYVLTVGDFDERIFLGADAEEEIGTPRKFTRDTPLGKLTAQANVEYNLQQHFEKKRSFAPSTPLTGRRYLREKEAVITPVASATQSVSRLQSIVAGLKNAPSDQLINIFESCVRNPVENIMKILKGIGETFCQHYTQSTDEQPGSHIDFAVNRLKLAEILYYKILETVMVQETRRLHGMDMSVLLEQDIFHRSLMACCLEIVLFAYSSPRTFPWIIEVLNLQPFYFYKVIEVVIRSEEGLSRDMVKHLNSIEEQILESLAWSHDSALWEALQVSANKVPTCEEVIFPNNFETGNGGNVQGHLPLMPMSPLMHPRVKEVRTDSGSLRRDMQPLSPISVHERYSSPTAGSAKRRLFGEDPPKEMLMDKIITEGTKLKIAPSSSITAENVSILPGQTLLTMATAPVTGTTGHKVTIPLHGVANDAGEITLIPLSMNTNQESKVKSPVSLTAHSLIGASPKQTNLTKAQEVHSTGINRPKRTGSLALFYRKVYHLASVRLRDLCLKLDVSNELRRKIWTCFEFTLVHCPDLMKDRHLDQLLLCAFYIMAKVTKEERTFQEIMKSYRNQPQANSHVYRSVLLKSIPREVVAYNKNINDDFEMIDCDLEDATKTPDCSSGPVKEERGDLIKFYNTIYVGRVKSFALKYDLANQDHMMDAPPLSPFPHIKQQPGSPRRISQQHSIYISPHKNGSGLTPRSALLYKFNGSPSKVR

SEQ ID NO: 6631 - protein, 730 aa, Homo sapiens
MAIGVWQLLLDMGIMLSVDQHLYFQDTYVFYQFSSDECSYLYCEFEREEEWQNGVKLLLQLVPLIPARGGICELSHQKIEDSEESSDEILVRLTSAVQRELAAVIALKARKSAIEQDEENNDKHVAVTEAESVPDSQAGVMCKLQERDEIGRIELVQKLAKENYQFLQTDKKEQEKSEHQDDEVTTVQVKEQDQSVLVLKKVQCCGPAPTAGSAESHWRYVVVSGTPEKILEHLLNDLHLEEVQDKETETLLDDFLLTYTVFMTTDDLCQALLRHYSAKKYQGKEENSDVPRRKRKVLHLVSQWIALYKDWLPEDEHSKMFLKTIYRNVLDDVYEYPILEKELKEFQKILGMHRRHTVDEYSPQKKNKALFHQFSLKENWLQHRGTVTETEEIFCHVYITEHSYVSVKAKVSSIAQEILKVVAEKIQYAEEDLALVAITFSGEKHELQPNDLVISKSLEASGRIYVYRKDLADTLNPFAENEESQQRSMRILGMNTWDLALELMNFDWSLFNSIHEQELIYFTFSRQGSGEHTANLSLLLQRCNEVQLWVATEILLCSQLGKRVQLVKKFIKIAAHCKAQRNLNSFFAIVMGLNTASVSRLSQTWEKIPGKFKKLFSELESLTDPSLNHKAYRDAFKKMKPPKIPFMPLLLKDVTFIHEGNKTFLDNLVNFEKLHMIADTVRTLRHCRTNQFGDLSPKEHQELKSYVNHLYVIDSQQALFELSHRIEPRV

SEQ ID NO: 6632 - protein, 1273 aa, Homo sapiens
MANDSPAKSLVDIDLSSLRDPAGIFELVEVVGNGTYGQVYKGRHVKTGQLAAIKVMDVTEDEEEEIKLEINMLKKYSHHRNIATYYGAFIKKSPPGHDDQLWLVMEFCGAGSITDLVKNTKGNTLKEDWIAYISREILRGLAHLHIHHVIHRDIKGQNVLLTENAEVKLVDFGVSAQLDRTVGRRNTFIGTPYWMAPEVIACDENPDATYDYRSDLWSCGITAIEMAEGAPPLCDMHPMRALFLIPRNPPPRLKSKKWSKKFFSFIEGCLVKNYMQRPSTEQLLKHPFIRDQPNERQVRIQLKDHIDRTRKKRGEKDETEYEYSGSEEEEEEVPEQEGEPSSIVNVPGESTLRRDFLRLQQENKERSEALRRQQLLQEQQLREQEEYKRQLLAERQKRIEQQKEQRRRLEEQQRREREARRQQEREQRRREQEEKRRLEELERRRKEEEERRRAEEEKRRVEREQEYIRRQLEEEQRHLEVLQQQLLQEQAMLLHDHRRPHPQHSQQPPPPQQERSKPSFHAPEPKAHYEPADRAREVEDRFRKTNHSSPEAQSKQTGRVLEPPVPSRSESFSNGNSESVHPALQRPAEPQVPVRTTSRSPVLSRRDSPLQGSGQQNSQAGQRNSTSSIEPRLLWERVEKLVPRPGSGSSSGSSNSGSQPGSHPGSQSGSGERFRVRSSSKSEGSPSQRLENAVKKPEDKKEVFRPLKPADLTALAKELRAVEDVRPPHKVTDYSSSSEESGTTDEEDDDVEQEGADESTSGPEDTRAASSLNLSNGETESVKTMIVHDDVESEPAMTPSKEGTLIVRQSTVDQKRASHHESNGFAGRIHLLPDLLQQSHSSSTSSTSSSPSSSQPTPTMSPQTPQDKLTANETQSASSTLQKHKSSSSFTPFIDPRLLQISPSSGTTVTSVVGFSCDGMRPEAIRQDPTRKGSVVNVNPTNTRPQSDTPEIRKYKKRFNSEILCAALWGVNLLVGTESGLMLLDRSGQGKVYPLINRRRFQQMDVLEGLNVLVTISGKKDKLRVYYLSWLRNKILHNDPEVEKKQGWTTVGDLEGCVHYKVVKYERIKFLVIALKSSVEVYAWAPKPYHKFMAFKSFGELVHKPLLVDLTVEEGQRLKVIYGSCAGFHAVDVDSGSVYDIYLPTHIQCSIKPHAIIILPNTDGMELLVCYEDEGVYVNTYGRITKDVVLQWGEMPTSVAYIRSNQTMGWGEKAIEIRSVETGHLDGVFMHKRAQRLKFLCERNDKVFFASVRSGGSSQVYFMTLGRTSLLSW

SEQ ID NO: 6633 - protein, 1020 aa, Homo sapiens
MREPEELMPDSGAVFTFGKSKFAENNPGKFWFKNDVPVHLSCGDEHSAVVTGNNKLYMFGSNNWGQLGLGSKSAISKPTCVKALKPEKVKLAACGRNHTLVSTEGGNVYATGGNNEGQLGLGDTEERNTFHVISFFTSEHKIKQLSAGSNTSAALTEDGRLFMWGDNSEGQIGLKNVSNVCVPQQVTIGKPVSWISCGYYHSAFVTTDGELYVFGEPENGKLGLPNQLLGNHRTPQLVSEIPEKVIQVACGGEHTVVLTENAVYTFGLGQFGQLGLGTFLFETSEPKVIENIRDQTISYISCGENHTALITDIGLMYTFGDGRHGKLGLGLENFTNHFIPTLCSNFLRFIVKLVACGGCHMVVFAAPHRGVAKEIEFDEINDTCLSVATFLPYSSLTSGNVLQRTLSARMRRRERERSPDSFSMRRTLPPIEGTLGLSACFLPNSVFPRCSERNLQESVLSEQDLMQPEEPDYLLDEMTKEAEIDNSSTVESLGETTDILNMTHIMSLNSNEKSLKLSPVQKQKKQQTIGELTQDTALTENDDSDEYEEMSEMKEGKACKQHVSQGIFMTQPATTIEAFSDEEVGNDTGQVGPQADTDGEGLQKEVYRHENNNGVDQLDAKEIEKESDGGHSQKESEAEEIDSEKETKLAEIAGMKDLREREKSTKKMSPFFGNLPDRGMNTESEENKDFVKKRESCKQDVIFDSERESVEKPDSYMEGASESQQGIADGFQQPEAIEFSSGEKEDDEVETDQNIRYGRKLIEQGNEKETKPIISKSMAKYDFKCDRLSEIPEEKEGAEDSKGNGIEEQEVEANEENVKVHGGRKEKTEILSDDLTDKAEDHEFSKTEELKLEDVDEEINAENVESKKKTVGDDESVPTGYHSKTEGAERTNDDSSAETIEKKEKANLEERAICEYNENPKGYMLDDADSSSLEILENSETTPSKDMKKTKKIFLFKRVPSINQKIVKNNNEPLPEIKSIGDQIILKSDNKDADQNHMSQNHQNIPPTNTERRSKSCTIL

SEQ ID NO: 6634 - protein, 815 aa, Homo sapiens
MSQSPAFGPRRGSSPRGAAGAAARRNESQDYLLMDSELGEDGCPQAPLPCYGYYPCFRGSDNRLAHRRQTVLREKGRRLANRGPAYMFSDRSTSLSIEEERFLDAAEYGNIPVVRKMLEECHSLNVNCVDYMGQNALQLAVANEHLEITELLLKKENLSRVGDALLLAISKGYVRIVEAILSHPAFAEGKRLATSPSQSELQQDDFYAYDEDGTRFSHDVTPIILAAHCQEYEIVHTLLRKGARIERPHDYFCKCNDCNQKQKHDSFSHSRSRINAYKGLASPAYLSLSSEDPVMTALELSNELAVLANIEKEFKMGKIMRGPFMKFVAHAASFTIFLGLLVMNAADRFEGTKLLPNETSTDNAKQLFRMKTSCFSWMEMLIISWVIGMIWAECKEIWTQGPKEYLFELWNMLDFGMLAIFAASFIARFMAFWHASKAQSIIDANDTLKDLTKVTLGDNVKYYNLARIKWDPSDPQIISEGLYAIAVVLSFSRIAYILPANESFGPLQISLGRTVKDIFKFMVIFIMVFVAFMIGMFNLYSYYIGAKQNEAFTTVEESFKTLFWAIFGLSEVKSVVINYNHKFIENIGYVLYGVYNVTMVIVLLNMLIAMINSSFQEIEDDADVEWKFARAKLWFSYFEEGRTLPVPFNLVPSPKSLFYLLLKLKKWISELFQGHKKGFQEDAEMNKINEEKKLGILGSHEDLSKLSLDKKQVGHNKQPSIRSSEDFHLNSFNNPPRQYQKIMKRLIKRYVLQAQIDKESDEVNEGELKEIKQDISSLRYELLEEKSQNTEDLAELIRELGEKLSMEPNQEETNR

SEQ ID NO: 6635 - protein, 431 aa, Homo sapiens
MEGVGGLWPWVLGLLSLPGVILGAPLASSCAGACGTSFPDGLTPEGTQASGDKDIPAINQGLILEETPESSFLIEGDIIRPSPFRLLSATSNKWPMGGSGVVEVPFLLSSKYDEPSRQVILEALAEFERSTCIRFVTYQDQRDFISIIPMYGCFSSVGRSGGMQVVSLAPTCLQKGRGIVLHELMHVLGFWHEHTRADRDRYIRVNWNEILPGFEINFIKSQSSNMLTPYDYSSVMHYGRLAFSRRGLPTITPLWAPSVHIGQRWNLSASDITRVLKLYGCSPSGPRPRGRGSHAHSTGRSPAPASLSLQRLLEALSAESRSPDPSGSSAGGQPVPAGPGESPHGWESPALKKLSAEASARQPQTLASSPRSRPGAGAPGVAQEQSWLAGVSTKPTVPSSEAGIQPVPVQGSPALPGGCVPRNHFKGMSED

SEQ ID NO: 6636 - protein, 333 aa, Homo sapiens
MGDWGFLEKLLDQVQEHSTVVGKIWLTVLFIFRILILGLAGESVWGDEQSDFECNTAQPGCTNVCYDQAFPISHIRYWVLQFLFVSTPTLVYLGHVIYLSRREERLRQKEGELRALPAKDPQVERALAAVERQMAKISVAEDGRLRIRGALMGTYVASVLCKSVLEAGFLYGQWRLYGWTMEPVFVCQRAPCPYLVDCFVSRPTEKTIFIIFMLVVGLISLVLNLLELVHLLCRCLSRGMRARQGQDAPPTQGTSSDPYTDQVFFYLPVGQGPSSPPCPTYNGLSSSEQNWANLTTEERLASSRPPLFLDPPPQNGQKPPSRPSSSASKKQYV

SEQ ID NO: 6637 - protein, 378 aa, Homo sapiens
MARCGEGSAAPMVLLGSAGVCSKGLQRKGPCERRRLKATVSEQLSQDLLRLLREEFHTDVTFSVGCTLFKAHKAVLLARVPDFYFHTIGQTSNSLTNQEPIAVENVEALEFRTFLQIIYSSNRNIKNYEEEILRKKIMEIGISQKQLDISFPKCENSSDCSLQKHEIPEDISDRDDDFISNDNYDLEPASELGEDLLKLYVKPCCPDIDIFVDGKRFKAHRAILSARSSYFAAMLSGCWAESSQEYVTLQGISHVELNVMMHFIYGGTLDIPDKTNVGQILNMADMYGLEGLKEVAIYILRRDYCNFFQKPVPRTLTSILECLIIAHSVGVESLFADCMKWIVKHFARFWSERSFANIPPEIQKSCLNMLIQSLVSIT

SEQ ID NO: 6638 - protein, 387 aa, Homo sapiens
MGHPPVSPSAPAPAGTTAIPGLIPDLVAGTPWPRWALIAGALAAGVLLVSCLLCAACCCCRRHRKKPRDKESVGLGSARGTTTTHLVQPDVDGLESSPGDAQQWGCLQLSLEFDFGSQEIRVGLRQAADLRPGGTVDPYARVSVSTQAGHRHETKVHRGTLCPVFDETCCFHIPQAELPGATLQVQLFNFKRFSGHEPLGELRLPLGTVDLQHVLEHWYLLGPPAATQPEQVGELCFSLRYVPSSGRLTVVVLEARGLRPGLAEPYVKVQLMLNQRKWKKRKTATKKGTAAPYFNEAFTFLVPFSQVQNVDLVLAVWDRSLPLRTEPVGKVHLGARASGQPLQHWADMLAHARRPIAQRHPLRPAREVDRMLALQPRLRLRLPLPHS

SEQ ID NO: 6639 - protein, 443 aa, Homo sapiens
MYDCMETFAPGPRRLYGAAGPGAGLLRRATGGSCFAGLESFAWPQPASLQSVETQSTSSEEMVPSSPSPPPPPRVYKPCFVCNDKSSGYHYGVSSCEGCKGFFRRSIQKNMVYTCHRDKNCIINKVTRNRCQYCRLQKCFEVGMSKEAVRNDRNKKKKEVKEEGSPDSYELSPQLEELITKVSKAHQETFPSLCQLGKYTTNSSADHRVQLDLGLWDKFSELATKCIIKIVEFAKRLPGFTGLSIADQITLLKAACLDILMLRICTRYTPEQDTMTFSDGLTLNRTQMHNAGFGPLTDLVFAFAGQLLPLEMDDTETGLLSAICLICGDRMDLEEPEKVDKLQEPLLEALRLYARRRRPSQPYMFPRMLMKITDLRGISTKGAERAITLKMEIPGPMPPLIREMLENPEMFEDDSSQPGPHPNASSEDEVPGGQGKGGLKSPA

SEQ ID NO: 6640 - protein, 279 aa, Homo sapiens
MRALTVQRVKFAMDLPLLKRAGQDLAEKTKNFVSRSLVIGEVLSMADMATGVKCGIIYWLFGGAIRNLGSPEHVTKWFQPLQEQKYTGMFAMTERGHGSNARGIQTEATFDLSAQEFVIDTPCENAEKMYIGNAMYGNYAAVFAQLIIDGRSQGPHCFIVPVRDENGSLYPGVTAIDMMYKEGLHGVDNGILIFDKVRIPRENLLDKFGSVAPDGQYHSPIRNKSARFNAMLAALTPSRLAVAFQAMGAMKLGLTIAIRYSHRSRIISQNCCSAPAGLY

SEQ ID NO: 6641 - protein, 571 aa, Homo sapiens
MEEPPLLPGENIKDMAKDVTYICPFTGAVRGTLTVTNYRLYFKSMERDPPFVLDASLGVINRVEKIGGASSRGENSYGLETVCKDIRNLRFAHKPEGRTRRSIFENLMKYAFPVSNNLPLFAFEYKEVFPENGWKLYDPLLEYRRQGIPNESWRITKINERYELCDTYPALLVVPANIPDEELKRVASFRSRGRIPVLSWIHPESQATITRCSQPMVGVSGKRSKEDEKYLQAIMDSNAQSHKIFIFDARPSVNAVANKAKGGGYESEDAYQNAELVFLDIHNIHVMRESLRKLKEIVYPNIEETHWLSNLESTHWLEHIKLILAGALRIADKVESGKTSVVVHCSDGWDRTAQLTSLAMLMLDGYYRTIRGFEVLVEKEWLSFGHRFQLRVGHGDKNHADADRSPVFLQFIDCVWQMTRQFPTAFEFNEYFLITILDHLYSCLFGTFLCNSEQQRGKENLPKRTVSLWSYINSQLEDFTNPLYGSYSNHVLYPVASMRHLELWVGYYIRWNPRMKPQEPIHNRYKELLAKRAELQKKVEELQREISNRSTSSSERASSPAQCVTPVQTVV

SEQ ID NO: 6642 - protein, 2644 aa, Homo sapiens
MGEHGLELASMIPALRELGSATPEEYNTVVQKPRQILCQFIDRILTDVNVVAVELVKKTDSQPTSVMLLDFIQHIMKSSPLMFVNVSGSHEAKGSCIEFSNWIITRLLRIAATPSCHLLHKKICEVICSLLFLFKSKSPAIFGVLTKELLQLFEDLVYLHRRNVMGHAVEWPVVMSRFLSQLDEHMGYLQSAPLQLMSMQNLEFIEVTLLMVLTRIIAIVFFRRQELLLWQIGCVLLEYGSPKIKSLAISFLTELFQLGGLPAQPASTFFSSFLELLKHLVEMDTDQLKLYEEPLSKLIKTLFPFEAEAYRNIEPVYLNMLLEKLCVMFEDGVLMRLKSDLLKAALCHLLQYFLKFVPAGYESALQVRKVYVRNICKALLDVLGIEVDAEYLLGPLYAALKMESMEIIEEIQCQTQQENLSSNSDGISPKRRRLSSSLNPSKRAPKQTEEIKHVDMNQKSILWSALKQKAESLQISLEYSGLKNPVIEMLEGIAVVLQLTALCTVHCSHQNMNCRTFKDCQHKSKKKPSVVITWMSLDFYTKVLKSCRSLLESVQKLDLEATIDKVVKIYDALIYMQVNSSFEDHILEDLCGMLSLPWIYSHSDDGCLKLTTFAANLLTLSCRISDSYSPQAQSRCVFLLTLFPRRIFLEWRTAVYNWALQSSHEVIRASCVSGFFILLQQQNSCNRVPKILIDKVKDDSDIVKKEFASILGQLVCTLHGMFYLTSSLTEPFSEHGHVDLFCRNLKATSQHECSSSQLKASVCKPFLFLLKKKIPSPVKLAFIDNLHHLCKHLDFREDETDVKAVLGTLLNLMEDPDKDVRVAFSGNIKHILESLDSEDGFIKELFVLRMKEAYTHAQISRNNELKDTLILTTGDIGRAAKGDLVPFALLHLLHCLLSKSASVSGAAYTEIRALVAAKSVKLQSFFSQYKKPICQFLVESLHSSQMTALPNTPCQNADVRKQDVAHQREMALNTLSEIANVFDFPDLNRFLTRTLQVLLPDLAAKASPAASALIRTLGKQLNVNRREILINNFKYIFSHLVCSCSKDELERALHYLKNETEIELGSLLRQDFQGLHNELLLRIGEHYQQVFNGLSILASFASSDDPYQGPRDIISPELMADYLQPKLLGILAFFNMQLLSSSVGIEDKKMALNSLMSLMKLMGPKHVSSVRVKMMTTLRTGLRFKDDFPELCCRAWDCFVRCLDHACLGSLLSHVIVALLPLIHIQPKETAAIFHYLIIENRDAVQDFLHEIYFLPDHPELKKIKAVLQEYRKETSESTDLQTTLQLSMKAIQHENVDVRIHALTSLKETLYKNQEKLIKYATDSETVEPIISQLVTVLLKGCQDANSQARLLCGECLGELGAIDPGRLDFSTTETQGKDFTFVTGVEDSSFAYGLLMELTRAYLAYADNSRAQDSAAYAIQELLSIYDCREMETNGPGHQLWRRFPEHVREILEPHLNTRYKSSQKSTDWSGVKKPIYLSKLGSNFAEWSASWAGYLITKVRHDLASKIFTCCSIMMKHDFKVTIYLLPHILVYVLLGCNQEDQQEVYAEIMAVLKHDDQHTINTQDIASDLCQLSTQTVFSMLDHLTQWARHKFQALKAEKCPHSKSNRNKVDSMVSTVDYEDYQSVTRFLDLIPQDTLAVASFRSKAYTRAVMHFESFITEKKQNIQEHLGFLQKLYAAMHEPDGVAGVSAIRKAEPSLKEQILEHESLGLLRDATACYDRAIQLEPDQIIHYHGVVKSMLGLGQLSTVITQVNGVHANRSEWTDELNTYRVEAAWKLSQWDLVENYLAADGKSTTWSVRLGQLLLSAKKRDITAFYDSLKLVRAEQIVPLSAASFERGSYQRGYEYIVRLHMLCELEHSIKPLFQHSPGDSSQEDSLNWVARLEMTQNSYRAKEPILALRRALLSLNKRPDYNEMVGECWLQSARVARKAGHHQTAYNALLNAGESRLAELYVERAKWLWSKGDVHQALIVLQKGVELCFPENETPPEGKNMLIHGRAMLLVGRFMEETANFESNAIMKKYKDVTACLPEWEDGHFYLAKYYDKLMPMVTDNKMEKQGDLIRYIVLHFGRSLQYGNQFIYQSMPRMLTLWLDYGTKAYEWEKAGRSDRVQMRNDLGKINKVITEHTNYLAPYQFLTAFSQLISRICHSHDEVFVVLMEIIAKVFLAYPQQAMWMMTAVSKSSYPMRVNRCKEILNKAIHMKKSLEKFVGDATRLTDKLLELCNKPVDGSSSTLSMSTHFKMLKKLVEEATFSEILIPLQSVMIPTLPSILGTHANHASHEPFPGHWAYIAGFDDMVEILASLQKPKKISLKGSDGKFYIMMCKPKDDLRKDCRLMEFNSLINKCLRKDAESRRRELHIRTYAVIPLNDECGIIEWVNNTAGLRPILTKLYKEKGVYMTGKELRQCMLPKSAALSEKLKVFREFLLPRHPPIFHEWFLRTFPDPTSWYSSRSAYCRSTAVMSMVGYILGLGDRHGENILFDSLTGECVHVDFNCLFNKGETFEVPEIVPFRLTHNMVNGMGPMGTEGLFRRACEVTMRLMRDQREPLMSVLKTFLHDPLVEWSKPVKGHSKAPLNETGEVVNEKAKTHVLDIEQRLQGVIKTRNRVTGLPLSIEGHVHYLIQEATDENLLCQMYLGWTPYM

SEQ ID NO: 6643 - protein, 1922 aa, Homo sapiens
MKSPALQPLSMAGLQLMTPASSPMGPFFGLPWQQEAIHDNIYTPRKYQVELLEAALDHNTIVCLNTGSGKTFIAVLLTKELSYQIRGDFSRNGKRTVFLVNSANQVAQQVSAVRTHSDLKVGEYSNLEVNASWTKERWNQEFTKHQVLIMTCYVALNVLKNGYLSLSDINLLVFDECHLAILDHPYREIMKLCENCPSCPRILGLTASILNGKCDPEELEEKIQKLEKILKSNAETATDLVVLDRYTSQPCEIVVDCGPFTDRSGLYERLLMELEEALNFINDCNISVHSKERDSTLISKQILSDCRAVLVVLGPWCADKVAGMMVRELQKYIKHEQEELHRKFLLFTDTFLRKIHALCEEHFSPASLDLKFVTPKVIKLLEILRKYKPYERQQFESVEWYNNRNQDNYVSWSDSEDDDEDEEIEEKEKPETNFPSPFTNILCGIIFVERRYTAVVLNRLIKEAGKQDPELAYISSNFITGHGIGKNQPRNKQMEAEFRKQEEVLRKFRAHETNLLIATSIVEEGVDIPKCNLVVRFDLPTEYRSYVQSKGRARAPISNYIMLADTDKIKSFEEDLKTYKAIEKILRNKCSKSVDTGETDIDPVMDDDDVFPPYVLRPDDGGPRVTINTAIGHINRYCARLPSDPFTHLAPKCRTRELPDGTFYSTLYLPINSPLRASIVGPPMSCVRLAERVVALICCEKLHKIGELDDHLMPVGKETVKYEEELDLHDEEETSVPGRPGSTKRRQCYPKAIPECLRDSYPRPDQPCYLYVIGMVLTTPLPDELNFRRRKLYPPEDTTRCFGILTAKPIPQIPHFPVYTRSGEVTISIELKKSGFMLSLQMLELITRLHQYIFSHILRLEKPALEFKPTDADSAYCVLPLNVVNDSSTLDIDFKFMEDIEKSEARIGIPSTKYTKETPFVFKLEDYQDAVIIPRYRNFDQPHRFYVADVYTDLTPLSKFPSPEYETFAEYYKTKYNLDLTNLNQPLLDVDHTSSRLNLLTPRHLNQKGKALPLSSAEKRKAKWESLQNKQILVPELCAIHPIPASLWRKAVCLPSILYRLHCLLTAEELRAQTASDAGVGVRSLPADFRYPNLDFGWKKSIDSKSFISISNSSSAENDNYCKHSTIVPENAAHQGANRTSSLENHDQMSVNCRTLLSESPGKLHVEVSADLTAINGLSYNQNLANGSYDLANRDFCQGNQLNYYKQEIPVQPTTSYSIQNLYSYENQPQPSDECTLLSNKYLDGNANKSTSDGSPVMAVMPGTTDTIQVLKGRMDSEQSPSIGYSSRTLGPNPGLILQALTLSNASDGFNLERLEMLGDSFLKHAITTYLFCTYPDAHEGRLSYMRSKKVSNCNLYRLGKKKGLPSRMVVSIFDPPVNWLPPGYVVNQDKSNTDKWEKDEMTKDCMLANGKLDEDYEEEDEEEESLMWRAPKEEADYEDDFLEYDQEHIRFIDNMLMGSGAFVKKISLSPFSTTDSAYEWKMPKKSSLGSMPFSSDFEDFDYSSWDAMCYLDPSKAVEEDDFVVGFWNPSEENCGVDTGKQSISYDLHTEQCIADKSIADCVEALLGCYLTSCGERAAQLFLCSLGLKVLPVIKRTDREKALCPTRENFNSQQKNLSVSCAAASVASSRSSVLKDSEYGCLKIPPRCMFDHPDADKTLNHLISGFENFEKKINYRFKNKAYLLQAFTHASYHYNTITDCYQRLEFLGDAILDYLITKHLYEDPRQHSPGVLTDLRSALVNNTIFASLAVKYDYHKYFKAVSPELFHVIDDFVQFQLEKNEMQGMDSELRRSEEDEEKEEDIEVPKAMGDIFESLAGAIYMDSGMSLETVWQVYYPMMRPLIEKFSANVPRSPVRELLEMEPETAKFSPAERTYDGKVRVTVEVVGKGKFKGVGRSYRIAKSAAARRALRSLKANQPQVPNS

SEQ ID NO: 6644 - protein, 525 aa, Homo sapiens
MSWHPQYRSSKFRHVFGKPASKENCYDSVPITRSVHDNHFCAVNPHFIAVVTECAGGGAFLVIPLHQTGKLDPHYPKVCGHRGNVLDVKWNPFDDFEIASCSEDATIKIWSIPKQLLTRNLTAYRKELVGHARRVGLVEWHPTAANILFSAGYDYKVMIWNLDTKESVITSPMSTISCHQDVILSMSFNTNGSLLATTCKDRKIRVIDPRAGTVLQEASYKGHRASKVLFLGNLKKLMSTGTSRWNNRQVALWDQDNLSVPLMEEDLDGSSGVLFPFYDADTSMLYVVGKGDGNIRYYEVSADKPHLSYLTEYRSYNPQKGIGVMPKRGLDVSSCEIFRFYKLITTKSLIEPISMIVPRRSESYQEDIYPPTAGAQPSLTAQEWLSGMNRDPILVSLRPGSELLRPHPLPAERPIFNSMAPASPRLLNQTEKLAAEDGWRSSSLLEEKMPRWAAEHRLEEKKTWLTNGFDVFECPPPKTENELLQMFYRQQEEIRRLRELLTQREVQAKQLELEIKNLRMGSEQL

SEQ ID NO: 6645 - protein, 194 aa, Homo sapiens
MWLPQLDLMRVISAKSQGYSIVTQITGPTTVNGLERGSLTVQCVYRSGWETYLKWWCRGAIWRDCKILVKTSGSEQEVKRDRVSIKDNQKNRTFTVTMEDLMKTDADTYWCGIEKTGNDLGVTVQVTIDPAPVTQEETSSSPTLTGHHLDNSSRDVPRAGTAAPGGRPLLCRPDPAAGRNLPAKGYHEAFLCPG

SEQ ID NO: 6646 - protein, 32759 aa, Homo sapiens
MTTQAPTFTQPLQSVVVLEGSTATFEAHISGFPVPEVSWFRDGQVISTSTLPGVQISFSDGRAKLTIPAVTKANSGRYSLKATNGSGQATSTAELLVKAETAPPNFVQRLQSMTVRQGSQVRLQVRVTGIPTPVVKFYRDGAEIQSSLDFQISQEGDLYSLLIAEAYPEDSGTYSVNATNSVGRATSTAELLVQGEEEVPAKKTKTIVSTAQISESRQTRIEKKIEAHFDARSIATVEMVIDGAAGQQLPHKTPPRIPPKPKSRSPTPPSIAAKAQLARQQSPSPIRHSPSPVRHVRAPTPSPVRSVSPAARISTSPIRSVRSPLLMRKTQASTVATGPEVPPPWKQEGYVASSSEAEMRETTLTTSTQIRTEERWEGRYGVQEQVTISGAAGAAASVSASASYAAEAVATGAKEVKQDADKSAAVATVVAAVDMARVREPVISAVEQTAQRTTTTAVHIQPAQEQVRKEAEKTAVTKVVVAADKAKEQELKSRTKEVITTKQEQMHVTHEQIRKETEKTFVPKVVISAAKAKEQETRISEEITKKQKQVTQEAIRQETEITAASMVVVATAKSTKLETVPGAQEETTTQQDQMHLSYEKIMKETRKTVVPKVIVATPKVKEQDLVSRGREGITTKREQVQITQEKMRKEAEKTALSTIAVATAKAKEQETILRTRETMATRQEQIQVTHGKVDVGKKAEAVATVVAAVDQARVREPREPGHLEESYAQQTTLEYGYKERISAAKVAEPPQRPASEPHVVPKAVKPRVIQAPSETHIKTTDQKGMHISSQIKKTTDLTTERLVHVDKRPRTASPHFTVSKISVPKTEHGYEASIAGSAIATLQKELSATSSAQKITKSVKAPTVKPSETRVRAEPTPLPQFPFADTPDTYKSEAGVEVKKEVGVSITGTTVREERFEVLHGREAKVTETARVPAPVEIPVTPPTLVSGLKNVTVIEGESVTLECHISGYPSPTVTWYREDYQIESSIDFQITFQSGIARLMIREAFAEDSGRFTCSAVNEAGTVSTSCYLAVQVSEEFEKETTAVTEKFTTEEKRFVESRDVVMTDTSLTEEQAGPGEPAAPYFITKPVVQKLVEGGSVVFGCQVGGNPKPHVYWKKSGVPLTTGYRYKVSYNKQTGECKLVISMTFADDAGEYTIVVRNKHGETSASASLLEEADYELLMKSQQEMLYQTQVTAFVQEPKVGETAPGFVYSEYEKEYEKEQALIRKKMAKDTVVVRTYVEDQEFHISSFEERLIKEIEYRIIKTTLEELLEEDGEEKMAVDISESEAVESGFDSRIKNYRILEGMGVTFHCKMSGYPLPKIAWYKDGKRIKHGERYQMDFLQDGRASLRIPVVLPEDEGIYTAFASNIKGNAICSGKLYVEPAAPLGAPTYIPTLEPVSRIRSLSPRSVSRSPIRMSPARMSPARMSPARMSPARMSPGRRLEETDESQLERLYKPVFVLKPVSFKCLEGQTARFDLKVVGRPMPETFWFHDGQQIVNDYTHKVVIKEDGTQSLIIVPATPSDSGEWTVVAQNRAGRSSISVILTVEAVEHQVKPMFVEKLKNVNIKEGSRLEMKVRATGNPNPDIVWLKNSDIIVPHKYPKIRIEGTKGEAALKIDSTVSQDSAWYTATAINKAGRDTTRCKVNVEVEFAEPEPERKLIIPRGTYRAKEIAAPELEPLHLRYGQEQWEEGDLYDKEKQQKPFFKKKLTSLRLKRFGPAHFECRLTPIGDPTMVVEWLHDGKPLEAANRLRMINEFGYCSLDYGVAYSRDSGIITCRATNKYGTDHTSATLIVKDEKSLVEESQLPEGRKGLQRIEELERMAHEGALTGVTTDQKEKQKPDIVLYPEPVRVLEGETARFRCRVTGYPQPKVNWYLNGQLIRKSKRFRVRYDGIHYLDIVDCKSYDTGEVKVTAENPEGVIEHKVKLEIQQREDFRSVLRRAPEPRPEFHVHEPGKLQFEVQKVDRPVDTTETKEVVKLKRAERITHEKVPEESEELRSKFKRRTEEGYYEAITAVELKSRKKDESYEELLRKTKDELLHWTKELTEEEKKALAEEGKITIPTFKPDKIELSPSMEAPKIFERIQSQTVGQGSDAHFRVRVVGKPDPECEWYKNGVKIERSDRIYWYWPEDNVCELVIRDVTAEDSASIMVKAINIAGETSSHAFLLVQAKQLITFTQELQDVVAKEKDTMATFECETSEPFVKVKWYKDGMEVHEGDKYRMHSDRKVHFLSILTIDTSDAEDYSCVLVEDENVKTTAKLIVEGAVVEFVKELQDIEVPESYSGELECIVSPENIEGKWYHNDVELKSNGKYTITSRRGRQNLTVKDVTKEDQGEYSFVIDGKKTTCKLKMKPRPIAILQGLSDQKVCEGDIVQLEVKVSLESVEGVWMKDGQEVQPSDRVHIVIDKQSHMLLIEDMTKEDAGNYSFTIPALGLSTSGRVSVYSVDVITPLKDVNVIEGTKAVLECKVSVPDVTSVKWYLNDEQIKPDDRVQAIVKGTKQRLVINRTHASDEGPYKLIVGRVETNCNLSVEKIKIIRGLRDLTCTETQNVVFEVELSHSGIDVLWNFKDKEIKPSSKYKIEAHGKIYKLTVLNMMKDDEGKYTFYAGENMTSGKLTVAGGAISKPLTDQTVAESQEAVFECEVANPDSKGEWLRDGKHLPLTNNIRSESDGHKRRLIIAATKLDDIGEYTYKVATSKTSAKLKVEAVKIKKTLKNLTVTETQDAVFTVELTHPNVKGVQWIKNGVVLESNEKYAISVKGTIYSLRIKNCAIVDESVYGFRLGRLGASARLHVETVKIIKKPKDVTALENATVAFEVSVSHDTVPVKWFHKSVEIKPSDKHRLVSERKVHKLMLQNISPSDAGEYTAVVGQLECKAKLFVETLHITKTMKNIEVPETKTASFECEVSHFNVPSMWLKNGVEIEMSEKFKIVVQGKLHQLIIMNTSTEDSAEYTFVCGNDQVSATLTVTPIMITSMLKDINAEEKDTITFEVTVNYEGISYKWLKNGVEIKSTDKCQMRTKKLTHSLNIRNVHFGDAADYTFVAGKATSTATLYVEARHIEFRKHIKDIKVLEKKRAMFECEVSEPDITVQWMKDDQELQITDRIKIQKEKYVHRLLIPSTRMSDAGKYTVVAGGNVSTAKLFVEGRDVRIRSIKKEVQVIEKQRAVVEFEVNEDDVDAHWYKDGIEINFQVQERHKYVVERRIHRMFISETRQSDAGEYTFVAGRNRSSVTLYVNAPEPPQVLQELQPVTVQSGKPARFCAVISGRPQPKISWYKEEQLLSTGFKCKFLHDGQEYTLLLIEAFPEDAAVYTCEAKNDYGVATTSASLSVEVPEVVSPDQEMPVYPPAIITPLQDTVTSEGQPARFQCRVSGTDLKVSWYSKDKKIKPSRFFRMTQFEDTYQLEIAEAYPEDEGTYTFVASNAVGQVSSTANLSLEAPESILHERIEQEIEMEMKAAPVIKRKIEPLEVALGHLAKFTCEIQSAPNVRFQWFKAGREIYESDKCSIRSSKYISSLEILRTQVVDCGEYTCKASNEYGSVSCTATLTVTEAYPPTFLSRPKSLTTFVGKAAKFICTVTGTPVIETIWQKDGAALSPSPNWRISDAENKHILELSNLTIQDRGVYSCKASNKFGADICQAELIIIDKPHFIKELEPVQSAINKKVHLECQVDEDRKVTVTWSKDGQKLPPGKDYKICFEDKIATLEIPLAKLKDSGTYVCTASNEAGSSSCSATVTVREPPSFVKKVDPSYLMLPGESARLHCKLKGSPVIQVTWFKNNKELSESNTVRMYFVNSEAILDITDVKVEDSGSYSCEAVNDVGSDSCSTEIVIKEPPSFIKTLEPADIVRGTNALLQCEVSGTGPFEISWFKDKKQIRSSKKYRLFSQKSLVCLEIFSFNSADVGEYECVVANEVGKCGCMATHLLKEPPTFVKKVDDLIALGGQTVTLQAAVRGSEPISVTWMKGQEVIREDGKIKMSFSNGVAVLIIPDVQISFGGKYTCLAENEAGSQTSVGELIVKEPAKIIERAELIQVTAGDPATLEYTVAGTPELKPKWYKDGRPLVASKKYRISFKNNVAQLKFYSAELHDSGQYTFEISNEVGSSSCETTFTVLDRDIAPFFTKPLRNVDSVVNGTCRLDCKIAGSLPMRVSWFKDGKEIAASDRYRIAFVEGTASLEIIRVDMNDAGNFTCRATNSVGSKDSSGALIVQEPPSFVTKPGSKDVLPGSAVCLKSTFQGSTPLTIRWFKGNKELVSGGSCYITKEALESSLELYLVKTSDSGTYTCKVSNVAGGVECSANLFVKEPATFVEKLEPSQLLKKGDATQLACKVTGTPPIKITWFANDREIKESSKHRMSFVESTAVLRLTDVGIEDSGEYMCEAQNEAGSDHCSSIVIVKESPYFTKEFKPIEVLKEYDVMLLAEVAGTPPFEITWFKDNTILRSGRKYKTFIQDHLVSLQILKFVAADAGEYQCRVTNEVGSSICSARVTLREPPSFIKKIESTSSLRGGTAAFQATLKGSLPITVTWLKDSDEITEDDNIRMTFENNVASLYLSGIEVKHDGKYVCQAKNDAGIQRCSALLSVKEPATITEEAVSIDVTQGDPATLQVKFSGTKEITAKWFKDGQELTLGSKYKISVTDTVSILKIISTEKKDSGEYTFEVQNDVGRSSCKARINVLDLIIPPSFTKKLKKMDSIKGSFIDLECIVAGSHPISIQWFKDDQEISASEKYKFSFHDNTAFLEISQLEGTDSGTYTCSATNKAGHNQCSGHLTVKEPPYFVEKPQSQDVNPNTRVQLKALVGGTAPMTIKWFKDNKELHSGAARSVWKDDTSTSLELFAAKATDSGTYICQLSNDVGTATSKATLFVKEPPQFIKKPSPVLVLRNGQSTTFECQITGTPKIRVSWYLDGNEITAIQKHGISFIDGLATFQISGARVENSGTYVCEARNDAGTASCSIELKVKEPPTFIRELKPVEVVKYSDVELECEVTGTPPFEVTWLKNNREIRSSKKYTLTDRVSVFNLHITKCDPSDTGEYQCIVSNEGGSCSCSTRVALKEPPSFIKKIENTTTVLKSSATFQSTVAGSPPISITWLKDDQILDEDDNVYISFVDSVATLQIRSVDNGHSGRYTCQAKNESGVERCYAFLLVQEPAQIVEKAKSVDVTEKDPMTLECVVAGTPELKVKWLKDGKQIVPSRYFSMSFENNVASFRIQSVMKQDSGQYTFKVENDFGSSSCDAYLRVLDQNIPPSFTKKLTKMDKVLGSSIHMECKVSGSLPISAQWFKDGKEISTSAKYRLVCHERSVSLEVNNLELEDTANYTCKVSNVAGDDACSGILTVKEPPSFLVKPGRQQAIPDSTVEFKAILKGTPPFKIKWFKDDVELVSGPKCFIGLEGSTSFLNLYSVDASKTGQYTCHVTNDVGSDSCTTMLLVTEPPKFVKKLEASKIVKAGDSSRLECKIAGSPEIRVVWFRNEHELPASDKYRMTFIDSVAVIQMNNLSTEDSGDFICEAQNPAGSTSCSTKVIVKEPPVFSSFPPIVETLKNAEVSLECELSGTPPFEVVWYKDKRQLRSSKKYKIASKNFHTSIHILNVDTSDIGEYHCKAQNEVGSDTCVCTVKLKEPPRFVSKLNSLTVVAGEPAELQASIEGAQPIFVQWLKEKEEVIRESENIRITFVENVATLQFAKAEPANAGKYICQIKNDGGMRENMATLMVLEPAVIVEKAGPMTVTVGETCTLECKVAGTPELSVEWYKDGKLLTSSQKHKFSFYNKISSLRILSVERQDAGTYTFQVQNNVGKSSCTAVVDVSDRAVPPSFTRRLKNTGGVLGASCILECKVAGSSPISVAWFHEKTKIVSGAKYQTTFSDNVCTLQLNSLDSSDMGNYTCVAANVAGSDECRAVLTVQEPPSFVKEPEPLEVLPGKNVTFTSVIRGTPPFKVNWFRGARELVKGDRCNIYFEDTVAELELFNIDISQSGEYTCVVSNNAGQASCTTRLFVKEPAAFLKRLSDHSVEPGKSIILESTYTGTLPISVTWKKDGFNITTSEKCNIVTTEKTCILEILNSTKRDAGQYSCEIENEAGRDVCGALVSTLEPPYFVTELEPLEAAVGDSVSLQCQVAGTPEITVSWYKGDTKLRPTPEYRTYFTNNVATLVFNKVNINDSGEYTCKAENSIGTASSKTVFRIQERQLPPSFARQLKDIEQTVGLPVTLTCRLNGSAPIQVCWYRDGVLLRDDENLQTSFVDNVATLKILQTDLSHSGQYSCSASNPLGTASSSARLTAREPKKSPFFDIKPVSIDVIAGESADFECHVTGAQPMRITWSKDNKEIRPGGNYTITCVGNTPHLRILKVGKGDSGQYTCQATNDVGKDMCSAQLSVKEPPKFVKKLEASKVAKQGESIQLECKISGSPEIKVSWFRNDSELHESWKYNMSFINSVALLTINEASAEDSGDYICEAHNGVGDASCSTALTVKAPPVFTQKPSPVGALKGSDVILQCEISGTPPFEVVWVKDRKQVRNSKKFKITSKHFDTSLHILNLEASDVGEYHCKATNEVGSDTCSCSVKFKEPPRFVKKLSDTSTLIGDAVELRAIVEGFQPISVVWLKDRGEVIRESENTRISFIDNIATLQLGSPEASNSGKYICQIKNDAGMRECSAVLTVLEPARIIEKPEPMTVTTGNPFALECVVTGTPELSAKWFKDGRELSADSKHHITFINKVASLKIPCAEMSDKGLYSFEVKNSVGKSNCTVSVHVSDRIVPPSFIRKLKDVNAILGASVVLECRVSGSAPISVGWFQDGNEIVSGPKCQSSFSENVCTLNLSLLEPSDTGIYTCVAANVAGSDECSAVLTVQEPPSFEQTPDSVEVLPGMSLTFTSVIRGTPPFKVKWFKGSRELVPGESCNISLEDFVTELELFEVQPLESGDYSCLVTNDAGSASCTTHLFVKEPATFVKRLADFSVETGSPIVLEATYTGTPPISVSWIKDEYLISQSERCSITMTEKSTILEILESTIEDYAQYSCLIENEAGQDICEALVSVLEPPYFIEPLEHVEAVIGEPATLQCKVDGTPEIRISWYKEHTKLRSAPAYKMQFKNNVASLVINKVDHSDVGEYSCKADNSVGAVASSAVLVIKARKLPPFFARKLKDVHETLGFPVAFECRINGSEPLQVSWYKDGVLLKDDANLQTSFVHNVATLQILQTDQSHIGQYNCSASNPLGTASSSAKLILSEHEVPPFFDLKPVSVDLALGESGTFKCHVTGTAPIKITWAKDNREIRPGGNYKMTLVENTATLTVLKVGKGDAGQYTCYASNIAGKDSCSAQLGVQEPPRFIKKLEPSRIVKQDEFTRYECKIGGSPEIKVLWYKDETEIQESSKFRMSFVDSVAVLEMHNLSVEDSGDYTCEAHNAAGSASSSTSLKVKEPPIFRKKPHPIETLKGADVHLECELQGTPPFHVSWYKDKRELRSGKKYKIMSENFLTSIHILNVDAADIGEYQCKATNDVGSDTCVGSIALKAPPRFVKKLSDISTVVGKEVQLQTTIEGAEPISVVWFKDKGEIVRESDNIWISYSENIATLQFSRVEPANAGKYTCQIKNDAGMQECFATLSVLEPATIVEKPESIKVTTGDTCTLECTVAGTPELSTKWFKDGKELTSDNKYKISFFNKVSGLKIINVAPSDSGVYSFEVQNPVGKDSCTASLQVSDRTVPPSFTRKLKETNGLSGSSVVMECKVYGSPPISVSWFHEGNEISSGRKYQTTLTDNTCALTVNMLEESDSGDYTCIATNMAGSDECSAPLTVREPPSFVQKPDPMDVLTGTNVTFTSIVKGTPPFSVSWFKGSSELVPGDRCNVSLEDSVAELELFDVDTSQSGEYTCIVSNEAGKASCTTHLYIKAPAKFVKRLNDYSIEKGKPLILEGTFTGTPPISVTWKKNGINVTPSQRCNITTTEKSAILEIPSSTVEDAGQYNCYIENASGKDSCSAQILILEPPYFVKQLEPVKVSVGDSASLQCQLAGTPEIGVSWYKGDTKLRPTTTYKMHFRNNVATLVFNQVDINDSGEYICKAENSVGEVSASTFLTVQEQKLPPSFSRQLRDVQETVGLPVVFDCAISGSEPISVSWYKDGKPLKDSPNVQTSFLDNTATLNIFKTDRSLAGQYSCTATNPIGSASSSARLILTEGKNPPFFDIRLAPVDAVVGESADFECHVTGTQPIKVSWAKDSREIRSGGKYQISYLENSAHLTVLKVDKGDSGQYTCYAVNEVGKDSCTAQLNIKERLIPPSFTKRLSETVEETEGNSFKLEGRVAGSQPITVAWYKNNIEIQPTSNCEITFKNNTLVLQVRKAGMNDAGLYTCKVSNDAGSALCTSSIVIKEPKKPPVFDQHLTPVTVSEGEYVQLSCHVQGSEPIRIQWLKAGREIKPSDRCSFSFASGTAVLELRDVAKADSGDYVCKASNVAGSDTTKSKVTIKDKPAVAPATKKAAVDGRLFFVSEPQSIRVVEKTTATFIAKVGGDPIPNVKWTKGKWRQLNQGGRVFIHQKGDEAKLEIRDTTKTDSGLYRCVAFNEHGEIESNVNLQVDERKKQEKIEGDLRAMLKKTPILKKGAGEEEEIDIMELLKNVDPKEYEKYARMYGITDFRGLLQAFELLKQSQEEETHRLEIEEIERSERDEKEFEELVSFIQQRLSQTEPVTLIKDIENQTVLKDNDAVFEIDIKINYPEIKLSWYKGTEKLEPSDKFEISIDGDRHTLRVKNCQLKDQGNYRLVCGPHIASAKLTVIEPAWERHLQDVTLKEGQTCTMTCQFSVPNVKSEWFRNGRILKPQGRHKTEVEHKVHKLTIADVRAEDQGQYTCKYEDLETSAELRIEAEPIQFTKRIQNIVVSEHQSATFECEVSFDDAIVTWYKGPTELTESQKYNFRNDGRCHYMTIHNVTPDDEGVYSVIARLEPRGEARSTAELYLTTKEIKLELKPPDIPDSRVPIPTMPIRAVPPEEIPPVVAPPIPLLLPTPEEKKPPPKRIEVTKKAVKKDAKKVVAKPKEMTPREEIVKKPPPPTTLIPAKAPEIIDVSSKAEEVKIMTITRKKEVQKEKEAVYEKKQAVHKEKRVFIESFEEPYDELEVEPYTEPFEQPYYEEPDEDYEEIKVEAKKEVHEEWEEDFEEGQEYYEREEGYDEGEEEWEEAYQEREVIQVQKEVYEESHERKVPAKVPEKKAPPPPKVIKKPVIEKIEKTSRRMEEEKVQVTKVPEVSKKIVPQKPSRTPVQEEVIEVKVPAVHTKKMVISEEKMFFASHTEEEVSVTVPEVQKEIVTEEKIHVAISKRVEPPPKVPELPEKPAPEEVAPVPIPKKVEPPAPKVPEVPKKPVPEEKKPVPVPKKEPAAPPKVPEVPKKPVPEEKIPVPVAKKKEAPPAKVPEVQKGVVTEEKITIVTQREESPPPAVPEIPKKKVPEERKPVPRKEEEVPPPPKVPALPKKPVPEEKVAVPVPVAKKAPPPRAEVSKKTVVEEKRFVAEEKLSFAVPQRVEVTRHEVSAEEEWSYSEEEEGVSISVYREEEREEEEEAEVTEYEVMEEPEEYVVEEKLHIISKRVEAEPAEVTERQEKKIVLKPKIPAKIEEPPPAKVPEAPKKIVPEKKVPAPVPKKEKVPPPKVPEEPKKPVPEKKVPPKVIKMEEPLPAKVTERHMQITQEEKVLVAVTKKEAPPKARVPEEPKRAVPEEKVLKLKPKREEEPPAKVTEFRKRVVKEEKVSIEAPKREPQPIKEVTIMEEKERAYTLEEEAVSVQREEEYEEYEEYDYKEFEEYEPTEEYDQYEEYEEREYERYEEHEEYITEPEKPIPVKPVPEEPVPTKPKAPPAKVLKKAVPEEKVPVPIPKKLKPPPPKVPEEPKKVFEEKIRISITKREKEQVTEPAAKVPMKPKRVVAEEKVPVPRKEVAPPVRVPEVPKELEPEEVAFEEEVVTHVEEYLVEEEEEYIHEEEEFITEEEVVPVIPVKVPEVPRKPVPEEKKPVPVPKKKEAPPAKVPEVPKKPEEKVPVLIPKKEKPPPAKVPEVPKKPVPEEKVPVPVPKKVEAPPAKVPEVPKKPVPEKKVPVPAPKKVEAPPAKVPEVPKKLIPEEKKPTPVPKKVEAPPPKVPKKREPVPVPVALPQEEEVLFEEEIVPEEEVLPEEEEVLPEEEEVLPEEEEVLPEEEEIPPEEEEVPPEEEYVPEEEEFVPEEEVLPEVKPKVPVPAPVPEIKKKVTEKKVVIPKKEEAPPAKVPEVPKKVEEKRIILPKEEEVLPVEVTEEPEEEPISEEEIPEEPPSIEEVEEVAPPRVPEVIKKAVPEAPTPVPKKVEAPPAKVSKKIPEEKVPVPVQKKEAPPAKVPEVPKKVPEKKVLVPKKEAVPPAKGRTVLEEKVSVAFRQEVVVKERLELEVVEAEVEEIPEEEEFHEVEEYFEEGEFHEVEEFIKLEQHRVEEEHRVEKVHRVIEVFEAEEVEVFEKPKAPPKGPEISEKIIPPKKPPTKVVPRKEPPAKVPEVPKKIVVEEKVRVPEEPRVPPTKVPEVLPPKEVVPEKKVPVPPAKKPEAPPPKVPEAPKEVVPEKKVPVPPPKKPEVPPTKVPEVPKAAVPEKKVPEAIPPKPESPPPEVPEAPKEVVPEKKVPAAPPKKPEVTPVKVPEAPKEVVPEKKVPVPPPKKPEVPPTKVPEVPKVAVPEKKVPEAIPPKPESPPPEVFEEPEEVALEEPPAEVVEEPEPAAPPQVTVPPKKPVPEKKAPAVVAKKPELPPVKVPEVPKEVVPEKKVPLVVPKKPEAPPAKVPEVPKEVVPEKKVAVPKKPEVPPAKVPEVPKKPVLEEKPAVPVPERAESPPPEVYEEPEEIAPEEEIAPEEEKPVPVAEEEEPEVPPPAVPEEPKKIIPEKKVPVIKKPEAPPPKEPEPEKVIEKPKLKPRPPPPPPAPPKEDVKEKIFQLKAIPKKKVPEKPQVPEKVELTPLKVPGGEKKVRKLLPERKPEPKEEVVLKSVLRKRPEEEEPKVEPKKLEKVKKPAVPEPPPPKPVEEVEVPTVTKRERKIPEPTKVPEIKPAIPLPAPEPKPKPEAEVKTIKPPPVEPEPTPIAAPVTVPVVGKKAEAKAPKEEAAKPKGPIKGVPKKTPSPIEAERRKLRPGSGGEKPPDEAPFTYQLKAVPLKFVKEIKDIILTESEFVGSSAIFECLVSPSTAITTWMKDGSNIRESPKHRFIADGKDRKLHIIDVQLSDAGEYTCVLRLGNKEKTSTAKLVVEELPVRFVKTLEEEVTVVKGQPLYLSCELNKERDVVWRKDGKIVVEKPGRIVPGVIGLMRALTINDADDTDAGTYTVTVENANNLECSSCVKVVEVIRDWLVKPIRDQHVKPKGTAIFACDIAKDTPNIKWFKGYDEIPAEPNDKTEILRDGNHLYLKIKNAMPEDIAEYAVEIEGKRYPAKLTLGEREVELLKPIEDVTIYEKESASFDAEISEADIPGQWKLKGELLRPSPTCEIKAEGGKRFLTLHKVKLDQAGEVLYQALNAITTAILTVKEIELDFAVPLKDVTVPERRQARFECVLTREANVIWSKGPDIIKSSDKFDIIADGKKHILVINDSQFDDEGVYTAEVEGKKTSARLFVTGIRLKFMSPLEDQTVKEGETATFVCELSHEKMHVVWFKNDAKLHTSRTVLISSEGKTHKLEMKEVTLDDISQIKAQVKELSSTAQLKVLEADPYFTVKLHDKTAVEKDEITLKCEVSKDVPVKWFKDGEEIVPSPKYSIKADGLRRILKIKKADLKDKGEYVCDCGTDKTKANVTVEARLIKVEKPLYGVEVFVGETAHFEIELSEPDVHGQWKLKGQPLTASPDCEIIEDGKKHILILHNCQLGMTGEVSFQAANAKSAANLKVKELPLIFITPLSDVKVFEKDEAKFECEVSREPKTFRWLKGTQEITGDDRFELIKDGTKHSMVIKSAAFEDEAKYMFEAEDKHTSGKLIIEGIRLKFLTPLKDVTAKEKESAVFTVELSHDNIRVKWFKNDQRLHTTRSVSMQDEGKTHSITFKDLSIDDTSQIRVEAMGMSSEAKLTVLEGDPYFTGKLQDYTGVEKDEVILQCEISKADAPVKWFKDGKEIKPSKNAVIKADGKKRMLILKKALKSDIGQYTCDCGTDKTSGKLDIEDREIKLVRPLHSVEVMETETARFETEISEDDIHANWKLKGEALLQTPDCEIKEEGKIHSLVLHNCRLDQTGGVDFQAANVKSSAHLRVKPRVIGLLRPLKDVTVTAGETATFDCELSYEDIPVEWYLKGKKLEPSDKVVPRSEGKVHTLTLRDVKLEDAGEVQLTAKDFKTHANLFVKEPPVEFTKPLEDQTVEEGATAVLECEVSRENAKVKWFKNGTEILKSKKYEIVADGRVRKLVIHDCTPEDIKTYTCDAKDFKTSCNLNVVPPHVEFLRPLTDLQVREKEMARFECELSRENAKVKWFKDGAEIKKGKKYDIISKGAVRILVINKCLLDDEAEYSCEVRTARTSGMLTVLEEEAVFTKNLANIEVSETDTIKLVCEVSKPGAEVIWYKGDEEIIETGRYEILTEGRKRILVIQNAHLEDAGNYNCRLPSSRTDGKVKVHELAAEFISKPQNLEILEGEKAEFVCSISKESFPVQWKRDDKTLESGDKYDVIADGKKRVLVVKDATLQDMGTYVVMVGAARAAAHLTVIEKLRIVVPLKDTRVKEQQEVVFNCEVNTEGAKAKWFRNEEAIFDSSKYIILQKDLVYTLRIRDAHLDDQANYNVSLTNHRGENVKSAANLIVEEEDLRIVEPLKDIETMEKKSVTFWCKVNRLNVTLKWTKNGEEVPFDNRVSYRVDKYKHMLTIKDCGFPDEGEYIVTAGQDKSVAELLIIEAPTEFVEHLEDQTVTEFDDAVFSCQLSREKANVKWYRNGREIKEGKKYKFEKDGSIHRLIIKDCRLDDECEYACGVEDRKSRARLFVEEIPVEIIRPPQDILEAPGADVVFLAELNKDKVEVQWLRNNMVVVQGDKHQMMSEGKIHRLQICDIKPRDQGEYRFIAKDKEARAKLELAAAPKIKTADQDLVVDVGKPLTMVVPYDAYPKAEAEWFKENEPLSTKTIDTTAEQTSFRILEAKKGDKGRYKIVLQNKHGKAEGFINLKVIDVPGPVRNLEVTETFDGEVSLAWEEPLTDGGSKIIGYVVERRDIKRKTWVLATDRAESCEFTVTGLQKGGVEYLFRVSARNRVGTGEPVETDNPVEARSKYDVPGPPLNVTITDVNRFGVSLTWEPPEYDGGAEITNYVIELRDKTSIRWDTAMTVRAEDLSATVTDVVEGQEYSFRVRAQNRIGVGKPSAATPFVKVADPIERPSPPVNLTSSDQTQSSVQLKWEPPLKDGGSPILGYIIERCEEGKDNWIRCNMKLVPELTYKVTGLEKGNKYLYRVSAENKAGVSDPSEILGPLTADDAFVEPTMDLSAFKDGLEVIVPNPITILVPSTGYPRPTATWCFGDKVLETGDRVKMKTLSAYAELVISPSERSDKGIYTLKLENRVKTISGEIDVNVIARPSAPKELKFGDITKDSVHLTWEPPDDDGGSPLTGYVVEKREVSRKTWTKVMDFVTDLEFTVPDLVQGKEYLFKVCARNKCGPGEPAYVDEPVNMSTPATVPDPPENVKWRDRTANSIFLTWDPPKNDGGSRIKGYIVERCPRGSDKWVACGEPVAETKMEVTGLEEGKWYAYRVKALNRQGASKPSRPTEEIQAVDTQEAPEIFLDVKLLAGLTVKAGTKIELPATVTGKPEPKITWTKADMILKQDKRITIENVPKKSTVTIVDSKRSDTGTYIIEAVNVCGRATAVVEVNVLDKPGPPAAFDITDVTNESCLLTWNPPRDDGGSKITNYVVERRATDSEVWHKLSSTVKDTNFKATKLIPNKEYIFRVAAENMYGVGEPVQASPITAKYQFDPPGPPTRLEPSDITKDAVTLTWCEPDDDGGSPITGYWVERLDPDTDKWVRCNKMPVKDTTYRVKGLTNKKKYRFRVLAENLAGPGKPSKSTEPILIKDPIDPPWPPGKPTVKDVGKTSVRLNWTKPEHDGGAKIESYVIEMLKTGTDEWVRVAEGVPTTQHLLPGLMEGQEYSFRVRAVNKAGESEPSEPSDPVLCREKLYPPSPPRWLEVINITKNTADLKWTVPEKDGGSPITNYIVEKRDVRRKGWQTVDTTVKDTKCTVTPLTEGSLYVFRVAAENAIGQSDYTEIEDSVLAKDTFTTPGPPYALAVVDVTKRHVDLKWEPPKNDGGRPIQRYVIEKKERLGTRWVKAGKTAGPDCNFRVTDVIEGTEVQFQVRAENEAGVGHPSEPTEILSIEDPTSPPSPPLDLHVTDAGRKHIAIAWKPPEKNGGSPIIGYHVEMCPVGTEKWMRVNSRPIKDLKFKVEEGVVPDKEYVLRVRAVNAIGVSEPSEISENVVAKDPDCKPTIDLETHDIIVIEGEKLSIPVPFRAVPVPTVSWHKDGKEVKASDRLTMKNDHISAHLEVPKSVRADAGIYTITLENKLGSATASINVKVIGLPGPCKDIKASDITKSSCKLTWEPPEFDGGTPILHYVLERREAGRRTYIPVMSGENKLSWTVKDLIPNGEYFFRVKAVNKVGGGEYIELKNPVIAQDPKQPPDPPVDVEVHNPTAEAMTITWKPPLYDGGSKIMGYIIEKIAKGEERWKRCNEHLVPILTYTAKGLEEGKEYQFRVRAENAAGISEPSRATPPTKAVDPIDAPKVILRTSLEVKRGDEIALDASISGSPYPTITWIKDENVIVPEEIKKRAAPLVRRRKGEVQEEEPFVLPLTQRLSIDNSKKGESQLRVRDSLRPDHGLYMIKVENDHGIAKAPCTVSVLDTPGPPINFVFEDIRKTSVLCKWEPPLDDGGSEIINYTLEKKDKTKPDSEWIVVTSTLRHCKYSVTKLIEGKEYLFRVRAENRFGPGPPCVSKPLVAKDPFGPPDAPDKPIVEDVTSNSMLVKWNEPKDNGSPILGYWLEKREVNSTHWSRVNKSLLNALKANVDGLLEGLTYVFRVCAENAAGPGKFSPPSDPKTAHDPISPPGPPIPRVTDTSSTTIELEWEPPAFNGGGEIVGYFVDKQLVGTNEWSRCTEKMIKVRQYTVKEIREGADYKLRVSAVNAAGEGPPGETQPVTVAEPQEPPAVELDVSVKGGIQIMAGKTLRIPAVVTGRPVPTKVWTKEEGELDKDRVVIDNVGTKSELIIKDALRKDHGRYVITATNSCGSKFAAARVEVFDVPGPVLDLKPVVTNRKMCLLNWSDPEDDGGSEITGFIIERKDAKMHTWRQPIETERSKCDITGLLEGQEYKFRVIAKNKFGCGPPVEIGPILAVDPLGPPTSPERLTYTERTKSTITLDWKEPRSNGGSPIQGYIIEKRRHDKPDFERVNKRLCPTTSFLVENLDEHQMYEFRVKAVNEIGESEPSLPLNVVIQDDEVPPTIKLRLSVRGDTIKVKAGEPVHIPADVTGLPMPKIEWSKNETVIEKPTDALQITKEEVSRSEAKTELSIPKAVREDKGTYTVTASNRLGSVFRNVHVEVYDRPSPPRNLAVTDIKAESCYLTWDAPLDNGGSEITHYVIDKRDASRKKAEWEEVTNTAVEKRYGIWKLIPNGQYEFRVRAVNKYGISDECKSDKVVIQDPYRLPGPPGKPKVLARTKGSMLVSWTPPLDNGGSPITGYWLEKREEGSPYWSRVSRAPITKVGLKGVEFNVPRLLEGVKYQFRAMAINAAGIGPPSEPSDPEVAGDPIFPPGPPSCPEVKDKTKSSISLGWKPPAKDGGSPIKGYIVEMQEEGTTDWKRVNEPDKLITTCECVVPNLKELRKYRFRVKAVNEAGESEPSDTTGEIPATDIQEEPEVFIDIGAQDCLVCKAGSQIRIPAVIKGRPTPKSSWEFDGKAKKAMKDGVHDIPEDAQLETAENSSVIIIPECKRSHTGKYSITAKNKAGQKTANCRVKVMDVPGPPKDLKVSDITRGSCRLSWKMPDDDGGDRIKGYVIEKRTIDGKAWTKVNPDCGSTTFVVPDLLSEQQYFFRVRAENRFGIGPPVETIQRTTARDPIYPPDPPIKLKIGLITKNTVHLSWKPPKNDGGSPVTHYIVECLAWDPTGTKKEAWRQCNKRDVEELQFTVEDLVEGGEYEFRVKAVNAAGVSKPSATVGPVTVKDQTCPPSIDLKEFMEVEEGTNVNIVAKIKGVPFPTLTWFKAPPKKPDNKEPVLYDTHVNKLVVDDTCTLVIPQSRRSDTGLYTITAVNNLGTASKEMRLNVLGRPGPPVGPIKFESVSADQMTLSWFPPKDDGGSKITNYVIEKREANRKTWVHVSSEPKECTYTIPKLLEGHEYVFRIMAQNKYGIGEPLDSEPETARNLFSVPGAPDKPTVSSVTRNSMTVNWEEPEYDGGSPVTGYWLEMKDTTSKRWKRVNRDPIKAMTLGVSYKVTGLIEGSDYQFRVYAINAAGVGPASLPSDPATARDPIAPPGPPFPKVTDWTKSSADLEWSPPLKDGGSKVTGYIVEYKEEGKEEWEKGKDKEVRGTKLVVTGLKEGAFYKFRVRAVNIAGIGEPGEVTDVIEMKDRLVSPDLQLDASVRDRIVVHAGGVIRIIAYVSGKPPPTVTWNMNERTLPQEATIETTAISSSMVIKNCQRSHQGVYSLLAKNEAGERKKTIIVDVLDVPGPVGTPFLAHNLTNESCKLTWFSPEDDGGSPITNYVIEKRESDRRAWTPVTYTVTRQNATVQGLIQGKAYFFRIAAENSIGMGPFVETSEALVIREPITVPERPEDLEVKEVTKNTVTLTWNPPKYDGGSEIINYVLESRLIGTEKFHKVTNDNLLSRKYTVKGLKEGDTYEYRVSAVNIVGQGKPSFCTKPITCKDELAPPTLHLDFRDKLTIRVGEAFALTGRYSGKPKPKVSWFKDEADVLEDDRTHIKTTPATLALEKIKAKRSDSGKYCVVVENSTGSRKGFCQVNVVDRPGPPVGPVSFDEVTKDYMVISWKPPLDDGGSKITNYIIEKKEVGKDVWMPVTSASAKTTCKVSKLLEGKDYIFRIHAENLYGISDPLVSDSMKAKDRFRVPDAPDQPIVTEVTKDSALVTWNKPHDGGKPITNYILEKRETMSKRWARVTKDPIHPYTKFRVPDLLEGCQYEFRVSAENEIGIGDPSPPSKPVFAKDPIAKPSPPVNPEAIDTTCNSVDLTWQPPRHDGGSKILGYIVEYQKVGDEEWRRANHTPESCPETKYKVTGLRDGQTYKFRVLAVNAAGESDPAHVPEPVLVKDRLEPPELILDANMAREQHIKVGDTLRLSAIIKGVPFPKVTWKKEDRDAPTKARIDVTPVGSKLEIRNAAHEDGGIYSLTVENPAGSKTVSVKVLVLDKPGPPRDLEVSEIRKDSCYLTWKEPLDDGGSVITNYVVERRDVASAQWSPLSATSKKKSHFAKHLNEGNQYLFRVAAENQYGRGPFVETPKPIKALDPLHPPGPPKDLHHVDVDKTEVSLVWNKPDRDGGSPITGYLVEYQEEGTQDWIKFKTVTNLECVVTGLQQGKTYRFRVKAENIVGLGLPDTTIPIECQEKLVPPSVELDVKLIEGLVVKAGTTVRFPAIIRGVPVPTAKWTTDGSEIKTDEHYTVETDNFSSVLTIKNCLRRDTGEYQITVSNAAGSKTVAVHLTVLDVPGPPTGPINILDVTPEHMTISWQPPKDDGGSPVINYIVEKQDTRKDTWGVVSSGSSKTKLKIPHLQKGCEYVFRVRAENKIGVGPPLDSTPTVAKHKFSPPSPPGKPVVTDITENAATVSWTLPKSDGGSPITGYYMERREVTGKWVRVNKTPIADLKFRVTGLYEGNTYEFRVFAENLAGLSKPSPSSDPIKACRPIKPPGPPINPKLKDKSRETADLVWTKPLSDGGSPILGYVVECQKPGTAQWNRINKDELIRQCAFRVPGLIEGNEYRFRIKAANIVGEGEPRELAESVIAKDILHPPEVELDVTCRDVITVRVGQTIRILARVKGRPEPDITWTKEGKVLVREKRVDLIQDLPRVELQIKEAVRADHGKYIISAKNSSGHAQGSAIVNVLDRPGPCQNLKVTNVTKENCTISWENPLDNGGSEITNFIVEYRKPNQKGWSIVASDVTKRLIKANLLANNEYYFRVCAENKVGVGPTIETKTPILAINPIDRPGEPENLHIADKGKTFVYLKWRRPDYDGGSPNLSYHVERRLKGSDDWERVHKGSIKETHYMVDRCVENQIYEFRVQTKNEGGESDWVKTEEVVVKEDLQKPVLDLKLSGVLTVKAGDTIRLEAGVRGKPFPEVAWTKDKDATDLTRSPRVKIDTRADSSKFSLTKAKRSDGGKYVVTATNTAGSFVAYATVNVLDKPGPVRNLKIVDVSSDRCTVCWDPPEDDGGCEIQNYILEKCETKRMVWSTYSATVLTPGTTVTRLIEGNEYIFRVRAENKIGTGPPTESKPVIAKTKYDKPGRPDPPEVTKVSKEEMTVVWNPPEYDGGKSITGYFLEKKEKHSTRWVPVNKSAIPERRMKVQNLLPDHEYQFRVKAENEIGIGEPSLPSRPVVAKDPIEPPGPPTNFRVVDTTKHSITLGWGKPVYDGGAPIIGYVVEMRPKIADASPDEGWKRCNAAAQLVRKEFTVTSLDENQEYEFRVCAQNQVGIGRPAELKEAIKPKEILEPPEIDLDASMRKLVIVRAGCPIRLFAIVRGRPAPKVTWRKVGIDNVVRKGQVDLVDTMAFLVIPNSTRDDSGKYSLTLVNPAGEKAVFVNVRVLDTPGPVSDLKVSDVTKTSCHVSWAPPENDGGSQVTHYIVEKREADRKTWSTVTPEVKKTSFHVTNLVPGNEYYFRVTAVNEYGPGVPTDVPKPVLASDPLSEPDPPRKLEVTEMTKNSATLAWLPPLRDGGAKIDGYITSYREEEQPADRWTEYSVVKDLSLVVTGLKEGKKYKFRVAARNAVGVSLPREAEGVYEAKEQLLPPKILMPEQITIKAGKKLRIEAHVYGKPHPTCKWKKGEDEVVTSSHLAVHKADSSSILIIKDVTRKDSGYYSLTAENSSGTDTQKIKVVVMDAPGPPQPPFDISDIDADACSLSWHIPLEDGGSNITNYIVEKCDVSRGDWVTALASVTKTSCRVGKLIPGQEYIFRVRAENRFGISEPLTSPKMVAQFPFGVPSEPKNARVTKVNKDCIFVAWDRPDSDGGSPIIGYLIERKERNSLLWVKANDTLVRSTEYPCAGLVEGLEYSFRIYALNKAGSSPPSKPTEYVTARMPVDPPGKPEVIDVTKSTVSLIWARPKHDGGSKIIGYFVEACKLPGDKWVRCNTAPHQIPQEEYTATGLEEKAQYQFRAIARTAVNISPPSEPSDPVTILAENVPPRIDLSVAMKSLLTVKAGTNVCLDATVFGKPMPTVSWKKDGTLLKPAEGIKMAMQRNLCTLELFSVNRKDSGDYTITAENSSGSKSATIKLKVLDKPGPPASVKINKMYSDRAMLSWEPPLEDGGSEITNYIVDKRETSRPNWAQVSATVPITSCSVEKLIEGHEYQFRICAENKYGVGDPVFTEPAIAKNPYDPPGRCDPPVISNITKDHMTVSWKPPADDGGSPITGYLLEKRETQAVNWTKVNRKPIIERTLKATGLQEGTEYEFRVTAINKAGPGKPSDASKAAYARDPQYPPGPPAFPKVYDTTRSSVSLSWGKPAYDGGSPIIGYLVEVKRADSDNWVRCNLPQNLQKTRFEVTGLMEDTQYQFRVYAVNKIGYSDPSDVPDKHYPKDILIPPEGELDADLRKTLILRAGVTMRLYVPVKGRPPPKITWSKPNVNLRDRIGLDIKSTDFDTFLRCENVNKYDAGKYILTLENSCGKKEYTIVVKVLDTPGPPVNVTVKEISKDSAYVTWEPPIIDGGSPIINYVVQKRDAERKSWSTVTTECSKTSFRVANLEEGKSYFFRVFAENEYGIGDPGETRDAVKASQTPGPVVDLKVRSVSKSSCSIGWKKPHSDGGSRIIGYVVDFLTEENKWQRVMKSLSLQYSAKDLTEGKEYTFRVSAENENGEGTPSEITVVARDDVVAPDLDLKGLPDLCYLAKENSNFRLKIPIKGKPAPSVSWKKGEDPLATDTRVSVESSAVNTTLIVYDCQKSDAGKYTITLKNVAGTKEGTISIKVVGKPGIPTGPIKFDEVTAEAMTLKWAPPKDDGGSEITNYILEKRDSVNNKWVTCASAVQKTTFRVTRLHEGMEYTFRVSAENKYGVGEGLKSEPIVARHPFDVPDAPPPPNIVDVRHDSVSLTWTDPKKTGGSPITGYHLEFKERNSLLWKRANKTPIRMRDFKVTGLTEGLEYEFRVMAINLAGVGKPSLPSEPVVALDPIDPPGKPEVINITRNSVTLIWTEPKYDGGHKLTGYIVEKRDLPSKSWMKANHVNVPECAFTVTDLVEGGKYEFRIRAKNTAGAISAPSESTETIICKDEYEAPTIVLDPTIKDGLTIKAGDTIVLNAISILGKPLPKSSWSKAGKDIRPSDITQITSTPTSSMLTIKYATRKDAGEYTITATNPFGTKVEHVKVTVLDVPGPPGPVEISNVSAEKATLTWTPPLEDGGSPIKSYILEKRETSRLLWTVVSEDIQSCRHVATKLIQGNEYIFRVSAVNHYGKGEPVQSEPVKMVDRFGPPGPPEKPEVSNVTKNTATVSWKRPVDDGGSEITGYHVERREKKSLRWVRAIKTPVSDLRCKVTGLQEGSTYEFRVSAENRAGIGPPSEASDSVLMKDAAYPPGPPSNPHVTDTTKKSASLAWGKPHYDGGLEITGYVVEHQKVGDEAWIKDTTGTALRITQFVVPDLQTKEKYNFRISAINDAGVGEPAVIPDVEIVEREMAPDFELDAELRRTLVVRAGLSIRIFVPIKGRPAPEVTWTKDNINLKNRANIENTESFTLLIIPECNRYDTGKFVMTIENPAGKKSGFVNVRVLDTPGPVLNLRPTDITKDSVTLHWDLPLIDGGSRITNYIVEKREATRKSYSTATTKCHKCTYKVTGLSEGCEYFFRVMAENEYGIGEPTETTEPVKASEAPSPPDSLNIMDITKSTVSLAWPKPKHDGGSKITGYVIEAQRKGSDQWTHITTVKGLECVVRNLTEGEEYTFQVMAVNSAGRSAPRESRPVIVKEQTMLPELDLRGIYQKLVIAKAGDNIKVEIPVLGRPKPTVTWKKGDQILKQTQRVNFETTATSTILNINECVRSDSGPYPLTARNIVGEVGDVITIQVHDIPGPPTGPIKFDEVSSDFVTFSWDPPENDGGVPISNYVVEMRQTDSTTWVELATTVIRTTYKATRLTTGLEYQFRVKAQNRYGVGPGITSACIVANYPFKVPGPPGTPQVTAVTKDSMTISWHEPLSDGGSPILGYHVERKERNGILWQTVSKALVPGNIFKSSGLTDGIAYEFRVIAENMAGKSKPSKPSEPMLALDPIDPPGKPVPLNITRHTVTLKWAKPEYTGGFKITSYIVEKRDLPNGRWLKANFSNILENEFTVSGLTEDAAYEFRVIAKNAAGAISPPSEPSDAITCRDDVEAPKIKVDVKFKDTVILKAGEAFRLEADVSGRPPPTMEWSKDGKELEGTAKLEIKIADFSTNLVNKDSTRRDSGAYTLTATNPGGFAKHIFNVKVLDRPGPPEGPLAVTEVTSEKCVLSWFPPLDDGGAKIDHYIVQKRETSRLAWTNVASEVQVTKLKVTKLLKGNEYIFRVMAVNKYGVGEPLESEPVLAVNPYGPPDPPKNPEVTTITKDSMVVCWGHPDSDGGSEIINYIVERRDKAGQRWIKCNKKTLTDLRYKVSGLTEGHEYEFRIMAENAAGISAPSPTSPFYKACDTVFKPGPPGNPRVLDTSRSSISIAWNKPIYDGGSEITGYMVEIALPEEDEWQIVTPPAGLKATSYTITGLTENQEYKIRIYAMNSEGLGEPALVPGTPKAEDRMLPPEIELDADLRKVVTIRACCTLRLFVPIKGRPAPEVKWARDHGESLDKASIESTSSYTLLIVGNVNRFDSGKYILTVENSSGSKSAFVNVRVLDTPGPPQDLKVKEVTKTSVTLTWDPPLLDGGSKIKNYIVEKRESTRKAYSTVATNCHKTSWKVDQLQEGCSYYFRVLAENEYGIGLPAETAESVKASERPLPPGKITLMDVTRNSVSLSWEKPEHDGGSRILGYIVEMQTKGSDKWATCATVKVTEATITGLIQGEEYSFRVSAQNEKGISDPRQLSVPVIAKDLVIPPAFKLLFNTFTVLAGEDLKVDVPFIGRPTPAVTWHKDNVPLKQTTRVNAESTENNSLLTIKDACREDVGHYVVKLTNSAGEAIETLNVIVLDKPGPPTGPVKMDEVTADSITLSWGPPKYDGGSSINNYIVEKRDTSTTTWQIVSATVARTTIKACRLKTGCEYQFRIAAENRYGKSTYLNSEPTVAQYPFKVPGPPGTPVVTLSSRDSMEVQWNEPISDGGSRVIGYHLERKERNSILWVKLNKTPIPQTKFKTTGLEEGVEYEFRVSAENIVGIGKPSKVSECYVARDPCDPPGRPEAIIVTRNSVTLQWKKPTYDGGSKITGYIVEKKELPEGRWMKASFTNIIDTHFEVTGLVEDHRYEFRVIARNAAGVFSEPSESTGAITARDEVDPPRISMDPKYKDTIVVHAGESFKVDADIYGKPIPTIQWIKGDQELSNTARLEIKSTDFATSLSVKDAVRVDSGNYILKAKNVAGERSVTVNVKVLDRPGPPEGPVVISGVTAEKCTLAWKPPLQDGGSDIINYIVERRETSRLVWTVVDANVQTLSCKVTKLLEGNEYTFRIMAVNKYGVGEPLESEPVVAKNPFVVPDAPKAPEVTTVTKDSMIVVWERPASDGGSEILGYVLEKRDKEGIRWTRCHKRLIGELRLRVTGLIENHDYEFRVSAENAAGLSEPSPPSAYQKACDPIYKPGPPNNPKVIDITRSSVFLSWSKPIYDGGCEIQGYIVEKCDVSVGEWTMCTPPTGINKTNIEVEKLLEKHEYNFRICAINKAGVGEHADVPGPIIVEEKLEAPDIDLDLELRKIINIRAGGSLRLFVPIKGRPTPEVKWGKVDGEIRDAAIIDVTSSFTSLVLDNVNRYDSGKYTLTLENSSGTKSAFVTVRVLDTPSPPVNLKVTEITKDSVSITWEPPLLDGGSKIKNYIVEKREATRKSYAAVVTNCHKNSWKIDQLQEGCSYYFRVTAENEYGIGLPAQTADPIKVAEVPQPPGKITVDDVTRNSVSLSWTKPEHDGGSKIIQYIVEMQAKHSEKWSECARVKSLQAVITNLTQGEEYLFRVVAVNEKGRSDPRSLAVPIVAKDLVIEPDVKPAFSSYSVQVGQDLKIEVPISGRPKPTITWTKDGLPLKQTTRINVTDSLDLTTLSIKETHKDDGGQYGITVANVVGQKTASIEIVTLDKPDPPKGPVKFDDVSAESITLSWNPPLYTGGCQITNYIVQKRDTTTTVWDVVSATVARTTLKVTKLKTGTEYQFRIFAENRYGQSFALESDPIVAQYPYKEPGPPGTPFATAISKDSMVIQWHEPVNNGGSPVIGYHLERKERNSILWTKVNKTIIHDTQFKAQNLEEGIEYEFRVYAENIVGVGKASKNSECYVARDPCDPPGTPEPIMVKRNEITLQWTKPVYDGGSMITGYIVEKRDLPDGRWMKASFTNVIETQFTVSGLTEDQRYEFRVIAKNAAGAISKPSDSTGPITAKDEVELPRISMDPKFRDTIVVNAGETFRLEADVHGKPLPTIEWLRGDKEIEESARCEIKNTDFKALLIVKDAIRIDGGQYILRASNVAGSKSFPVNVKVLDRPGPPEGPVQVTGVTSEKCSLTWSPPLQDGGSDISHYVVEKRETSRLAWTVVASEVVTNSLKVTKLLEGNEYVFRIMAVNKYGVGEPLESAPVLMKNPFVLPGPPKSLEVTNIAKDSMTVCWNRPDSDGGSEIIGYIVEKRDRSGIRWIKCNKRRITDLRLRVTGLTEDHEYEFRVSAENAAGVGEPSPATVYYKACDPVFKPGPPTNAHIVDTTKNSITLAWGKPIYDGGSEILGYVVEICKADEEEWQIVTPQTGLRVTRFEISKLTEHQEYKIRVCALNKVGLGEATSVPGTVKPEDKLEAPELDLDSELRKGIVVRAGGSARIHIPFKGRPTPEITWSREEGEFTDKVQIEKGVNYTQLSIDNCDRNDAGKYILKLENSSGSKSAFVTVKVLDTPGPPQNLAVKEVRKDSAFLVWEPPIIDGGAKVKNYVIDKRESTRKAYANVSSKCSKTSFKVENLTEGAIYYFRVMAENEFGVGVPVETVDAVKAAEPPSPPGKVTLTDVSQTSASLMWEKPEHDGGSRVLGYVVEMQPKGTEKWSIVAESKVCNAVVTGLSSGQEYQFRVKAYNEKGKSDPRVLGVPVIAKDLTIQPSLKLPFNTYSIQAGEDLKIEIPVIGRPRPNISWVKDGEPLKQTTRVNVEETATSTVLHIKEGNKDDFGKYTVTATNSAGTATENLSVIVLEKPGPPVGPVRFDEVSADFVVISWEPPAYTGGCQISNYIVEKRDTTTTTWHMVSATVARTTIKITKLKTGTEYQFRIFAENRYGKSAPLDSKAVIVQYPFKEPGPPGTPFVTSISKDQMLVQWHEPVNDGGTKIIGYHLEQKEKNSILWVKLNKTPIQDTKFKTTGLDEGLEYEFKVSAENIVGIGKPSKVSECFVARDPCDPPGRPEAIVITRNNVTLKWKKPAYDGGSKITGYIVEKKDLPDGRWMKASFTNVLETEFTVSGLVEDQRYEFRVIARNAAGNFSEPSDSSGAITARDEIDAPNASLDPKYKDVIVVHAGETFVLEADIRGKPIPDVVWSKDGKELEETAARMEIKSTIQKTTLVVKDCIRTDGGQYILKLSNVGGTKSIPITVKVLDRPGPPEGPLKVTGVTAEKCYLAWNPPLQDGGANISHYIIEKRETSRLSWTQVSTEVQALNYKVTKLLPGNEYIFRVMAVNKYGIGEPLESGPVTACNPYKPPGPPSTPEVSAITKDSMVVTWARPVDDGGTEIEGYILEKRDKEGVRWTKCNKKTLTDLRLRVTGLTEGHSYEFRVAAENAAGVGEPSEPSVFYRACDALYPPGPPSNPKVTDTSRSSVSLAWSKPIYDGGAPVKGYVVEVKEAAADEWTTCTPPTGLQGKQFTVTKLKENTEYNFRICAINSEGVGEPATLPGSVVAQERIEPPEIELDADLRKVVVLRASATLRLFVTIKGRPEPEVKWEKAEGILTDRAQIEVTSSFTMLVIDNVTRFDSGRYNLTLENNSGSKTAFVNVRVLDSPSAPVNLTIREVKKDSVTLSWEPPLIDGGAKITNYIVEKRETTRKAYATITNNCTKTTFRIENLQEGCSYYFRVLASNEYGIGLPAETTEPVKVSEPPLPPGRVTLVDVTRNTATIKWEKPESDGGSKITGYVVEMQTKGSEKWSTCTQVKTLEATISGLTAGEEYVFRVAAVNEKGRSDPRQLGVPVIARDIEIKPSVELPFHTFNVKAREQLKIDVPFKGRPQATVNWRKDGQTLKETTRVNVSSSKTVTSLSIKEASKEDVGTYELCVSNSAGSITVPITIIVLDRPGPPGPIRIDEVSCDSITISWNPPEYDGGCQISNYIVEKKETTSTTWHIVSQAVARTSIKIVRLTTGSEYQFRVCAENRYGKSSYSESSAVVAEYPFSPPGPPGTPKVVHATKSTMLVTWQVPVNDGGSRVIGYHLEYKERSSILWSKANKILIADTQMKVSGLDEGLMYEYRVYAENIAGIGKCSKSCEPVPARDPCDPPGQPEVTNITRKSVSLKWSKPHYDGGAKITGYIVERRELPDGRWLKCNYTNIQETYFEVTELTEDQRYEFRVFARNAADSVSEPSESTGPIIVKDDVEPPRVMMDVKFRDVIVVKAGEVLKINADIAGRPLPVISWAKDGIEIEERARTEIISTDNHTLLTVKDCIRRDTGQYVLTLKNVAGTRSVAVNCKVLDKPGPPAGPLEINGLTAEKCSLSWGRPQEDGGADIDYYIVEKRETSHLAWTICEGELQMTSCKVTKLLKGNEYIFRVTGVNKYGVGEPLESVAIKALDPFTVPSPPTSLEITSVTKESMTLCWSRPESDGGSEISGYIIERREKNSLRWVRVNKKPVYDLRVKSTGLREGCEYEYRVYAENAAGLSLPSETSPLIRAEDPVFLPSPPSKPKIVDSGKTTITIAWVKPLFDGGAPITGYTVEYKKSDDTDWKTSIQSLRGTEYTISGLTTGAEYVFRVKSVNKVGASDPSDSSDPQIAKEREEEPLFDIDSEMRKTLIVKAGASFTMTVPFRGRPVPNVLWSKPDTDLRTRAYVDTTDSRTSLTIENANRNDSGKYTLTIQNVLSAASLTLVVKVLDTPGPPTNITVQDVTKESAVLSWDVPENDGGAPVKNYHIEKREASKKAWVSVTNNCNRLSYKVTNLQEGAIYYFRVSGENEFGVGIPAETKEGVKITEKPSPPEKLGVTSISKDSVSLTWLKPEHDGGSRIVHYVVEALEKGQKNWVKCAVAKSTHHVVSGLRENSEYFFRVFAENQAGLSDPRELLLPVLIKEQLEPPEIDMKNFPSHTVYVRAGSNLKVDIPISGKPLPKVTLSRDGVPLKATMRFNTEITAENLTINLKESVTADAGRYEITAANSSGTTKAFINIVVLDRPGPPTGPVVISDITEESVTLKWEPPKYDGGSQVTNYILLKRETSTAVWTEVSATVARTMMKVMKLTTGEEYQFRIKAENRFGISDHIDSACVTVKLPYTTPGPPSTPWVTNVTRESITVGWHEPVSNGGSAVVGYHLEMKDRNSILWQKANKLVIRTTHFKVTTISAGLIYEFRVYAENAAGVGKPSHPSEPVLAIDACEPPRNVRITDISKNSVSLSWQQPAFDGGSKITGYIVERRDLPDGRWTKASFTNVTETQFIISGLTQNSQYEFRVFARNAVGSISNPSEVVGPITCIDSYGGPVIDLPLEYTEVVKYRAGTSVKLRAGISGKPAPTIEWYKDDKELQTNALVCVENTTDLASILIKDADRLNSGCYELKLRNAMGSASATIRVQILDKPGPPGGPIEFKTVTAEKITLLWRPPADDGGAKITHYIVEKRETSRVVWSMVSEHLEECIITTTKIIKGNEYIFRVRAVNKYGIGEPLESDSVVAKNAFVTPGPPGIPEVTKITKNSMTVVWSRPIADGGSDISGYFLEKRDKKSLGWFKVLKETIRDTRQKVTGLTENSDYQYRVCAVNAAGQGPFSEPSEFYKAADPIDPPGPPAKIRIADSTKSSITLGWSKPVYDGGSAVTGYVVEIRQGEEEEWTTVSTKGEVRTTEYVVSNLKPGVNYYFRVSAVNCAGQGEPIEMNEPVQAKDILEAPEIDLDVALRTSVIAKAGEDVQVLIPFKGRPPPTVTWRKDEKNLGSDARYSIENTDSSSLLTIPQVTRNDTGKYILTIENGVGEPKSSTVSVKVLDTPAACQKLQVKHVSRGTVTLLWDPPLIDGGSPIINYVIEKRDATKRTWSVVSHKCSSTSFKLIDLSEKTPFFFRVLAENEIGIGEPCETTEPVKAAEVPAPIRDLSMKDSTKTSVILSWTKPDFDGGSVITEYVVERKGKGEQTWSHAGISKTCEIEVSQLKEQSVLEFRVFAKNEKGLSDPVTIGPITVKELIITPEVDLSDIPGAQVTVRIGHNVHLELPYKGKPKPSISWLKDGLPLKESEFVRFSKTENKITLSIKNAKKEHGGKYTVILDNAVCRIAVPITVITLGPPSKPKGPIRFDEIKADSVILSWDVPEDNGGGEITCYSIEKRETSQTNWKMVCSSVARTTFKVPNLVKDAEYQFRVRAENRYGVSQPLVSSIIVAKHQFRIPGPPGKPVIYNVTSDGMSLTWDAPVYDGGSEVTGFHVEKKERNSILWQKVNTSPISGREYRATGLVEGLDYQFRVYAENSAGLSSPSDPSKFTLAVSPVDPPGTPDYIDVTRETITLKWNPPLRDGGSKIVGYSIEKRQGNERWVRCNFTDVSECQYTVTGLSPGDRYEFRIIARNAVGTISPPSQSSGIIMTRDENVPPIVEFGPEYFDGLIIKSGESLRIKALVQGRPVPRVTWFKDGVEIEKRMNMEITDVLGSTSLFVRDATRDHRGVYTVEAKNASGSAKAEIKVKVQDTPGKVVGPIRFTNITGEKMTLWWDAPLNDGCAPITHYIIEKRETSRLAWALIEDKCEAQSYTAIKLINGNEYQFRVSAVNKFGVGRPLDSDPVVAQIQYTVPDAPGIPEPSNITGNSITLTWARPESDGGSEIQQYILERREKKSTRWVKVISKRPISETRFKVTGLTEGNEYEFHVMAENAAGVGPASGISRLIKCREPVNPPGPPTVVKVTDTSKTTVSLEWSKPVFDGGMEIIGYIIEMCKADLGDWHKVNAEACVKTRYTVTDLQAGEEYKFRVSAINGAGKGDSCEVTGTIKAVDRLTAPELDIDANFKQTHVVRAGASIRLFIAYQGRPTPTAVWSKPDSNLSLRADIHTTDSFSTLTVENCNRNDAGKYTLTVENNSGSKSITFTVKVLDTPGPPGPITFKDVTRGSATLMWDAPLLDGGARIHHYVVEKREASRRSWQVISEKCTRQIFKVNDLAEGVPYYFRVSAVNEYGVGEPYEMPEPIVATEQPAPPRRLDVVDTSKSSAVLAWLKPDHDGGSRITGYLLEMRQKGSDFWVEAGHTKQLTFTVERLVEKTEYEFRVKAKNDAGYSEPREAFSSVIIKEPQIEPTADLTGITNQLITCKAGSPFTIDVPISGRPAPKVTWKLEEMRLKETDRVSITTTKDRTTLTVKDSMRGDSGRYFLTLENTAGVKTFSVTVVVIGRPGPVTGPIEVSSVSAESCVLSWGEPKDGGGTEITNYIVEKRESGTTAWQLVNSSVKRTQIKVTHLTKYMEYSFRVSSENRFGVSKPLESAPIIAEHPFVPPSAPTRPEVYHVSANAMSIRWEEPYHDGGSKIIGYWVEKKERNTILWVKENKVPCLECNYKVTGLVEGLEYQFRTYALNAAGVSKASEASRPIMAQNPVDAPGRPEVTDVTRSTVSLIWSAPAYDGGSKVVGYIIERKPVSEVGDGRWLKCNYTIVSDNFFTVTALSEGDTYEFRVLAKNAAGVISKGSESTGPVTCRDEYAPPKAELDARLHGDLVTIRAGSDLVLDAAVGGKPEPKIIWTKGDKELDLCEKVSLQYTGKRATAVIKFCDRSDSGKYTLTVKNASGTKAVSVMVKVLDSPGPCGKLTVSRVTQEKCTLAWSLPQEDGGAEITHYIVERRETSRLNWVIVEGECPTLSYVVTRLIKNNEYIFRVRAVNKYGPGVPVESEPIVARNSFTIPSPPGIPEEVGTGKEHIIIQWTKPESDGGNEISNYLVDKREKKSLRWTRVNKDYVVYDTRLKVTSLMEGCDYQFRVTAVNAAGNSEPSEASNFISCREPSYTPGPPSAPRVVDTTKHSISLAWTKPMYDGGTDIVGYVLEMQEKDTDQWYRVHTNATIRNTEFTVPDLKMGQKYSFRVAAVNVKGMSEYSESIAEIEPVERIEIPDLELADDLKKTVTIRAGASLRLMVSVSGRPPPVITWSKQGIDLASRAIIDTTESYSLLIVDKVNRYDAGKYTIEAENQSGKKSATVLVKVYDTPGPCPSVKVKEVSRDSVTITWEIPTIDGGAPVNNYIVEKREAAMRAFKTVTTKCSKTLYRISGLVEGTMYYFRVLPENIYGIGEPCETSDAVLVSEVPLVPAKLEVVDVTKSTVTLAWEKPLYDGGSRLTGYVLEACKAGTERWMKVVTLKPTVLEHTVTSLNEGEQYLFRIRAQNEKGVSEPRETVTAVTVQDLRVLPTIDLSTMPQKTIHVPAGRPVELVIPIAGRPPPAASWFFAGSKLRESERVTVETHTKVAKLTIRETTIRDTGEYTLELKNVTGTTSETIKVIILDKPGPPTGPIKIDEIDATSITISWEPPELDGGAPLSGYVVEQRDAHRPGWLPVSESVTRSTFKFTRLTEGNEYVFRVAATNRFGIGSYLQSEVIECRSSIRIPGPPETLQIFDVSRDGMTLTWYPPEDDGGSQVTGYIVERKEVRADRWVRVNKVPVTMTRYRSTGLTEGLEYEHRVTAINARGSGKPSRPSKPIVAMDPIAPPGKPQNPRVTDTTRTSVSLAWSVPEDEGGSKVTGYLIEMQKVDQHEWTKCNTTPTKIREYTLTHLPQGAEYRFRVLACNAGGPGEPAEVPGTVKVTEMLEYPDYELDERYQEGIFVRQGGVIRLTIPIKGKPFPICKWTKEGQDISKRAMIATSETHTELVIKEADRGDSGTYDLVLENKCGKKAVYIKVRVIGSPNSPEGPLEYDDIQVRSVRVSWRPPADDGGADILGYILERREVPKAAWYTIDSRVRGTSLVVKGLKENVEYHFRVSAENQFGISKPLKSEEPVTPKTPLNPPEPPSNPPEVLDVTKSSVSLSWSRPKDDGGSRVTGYYIERKETSTDKWVRHNKTQITTTMYTVTGLVPDAEYQFRIIAQNDVGLSETSPASEPVVCKDPFDKPSQPGELEILSISKDSVTLQWEKPECDGGKEILGYWVEYRQSGDSAWKKSNKERIKDKQFTIGGLLEATEYEFRVFAENETGLSRPRRTAMSIKTKLTSGEAPGIRKEMKDVTTKLGEAAQLSCQIVGRPLPDIKWYRFGKELIQSRKYKMSSDGRTHTLTVMTEEQEDEGVYTCIATNEVGEVETSSKLLLQATPQFHPGYPLKEKYYGAVGSTLRLHVMYIGRPVPAMTWFHGQKLLQNSENITIENTEHYTHLVMKNVQRKTHAGKYKVQLSNVFGTVDAILDVEIQDKPDKPTGPIVIEALLKNSAVISWKPPADDGGSWITNYVVEKCEAKEGAEWQLVSSAISVTTCRIVNLTENAGYYFRVSAQNTFGISDPLEVSSVVIIKSPFEKPGAPGKPTITAVTKDSCVVAWKPPASDGGAKIRNYYLEKREKKQNKWISVTTEEIRETVFSVKNLIEGLEYEFRVKCENLGGESEWSEISEPITPKSDVPIQAPHFKEELRNLNVRYQSNATLVCKVTGHPKPIVKWYRQGKEIIADGLKYRIQEFKGGYHQLIIASVTDDDATVYQVRATNQGGSVSGTASLEVEVPAKIHLPKTLEGMGAVHALRGEVVSIKIPFSGKPDPVITWQKGQDLIDNNGHYQVIVTRSFTSLVFPNGVERKDAGFYVVCAKNRFGIDQKTVELDVADVPDPPRGVKVSDVSRDSVNLTWTEPASDGGSKITNYIVEKCATTAERWLRVGQARETRYTVINLFGKTSYQFRVIAENKFGLSKPSEPSEPTITKEDKTRAMNYDEEVDETREVSMTKASHSSTKELYEKYMIAEDLGRGEFGIVHRCVETSSKKTYMAKFVKVKGTDQVLVKKEISILNIARHRNILHLHESFESMEELVMIFEFISGLDIFERINTSAFELNEREIVSYVHQVCEALQFLHSHNIGHFDIRPENIIYQTRRSSTIKIIEFGQARQLKPGDNFRLLFTAPEYYAPEVHQHDVVSTATDMWSLGTLVYVLLSGINPFLAETNQQIIENIMNAEYTFDEEAFKEISIEAMDFVDRLLVKERKSRMTASEALQHPWLKQKIERVSTKVIRTLKHRRYYHTLIKKDLNMVVSAARISCGGAIRSQKGVSVAKVKVASIEIGPVSGQIMHAVGEEGGHVKYVCKIENYDQSTQVTWYFGVRQLENSEKYEITYEDGVAILYVKDITKLDDGTYRCKVVNDYGEDSSYAELFVKGVREVYDYYCRRTMKKIKRRTDTMRLLERPPEFTLPLYNKTAYVGENVRFGVTITVHPEPHVTWYKSGQKIKPGDNDKKYTFESDKGLYQLTINSVTTDDDAEYTVVARNKYGEDSCKAKLTVTLHPPPTDSTLRPMFKRLLANAECQEGQSVCFEIRVSGIPPPTLKWEKDGQPLSLGPNIEIIHEGLDYYALHIRDTLPEDTGYYRVTATNTAGSTSCQAHLQVERLRYKKQEFKSKEEHERHVQKQIDKTLRMAEILSGTESVPLTQVAKEALREAAVLYKPAVSTKTVKGEFRLEIEEKKEERKLRMPYDVPEPRKYKQTTIEEDQRIKQFVPMSDMKWYKKIRDQYEMPGKLDRVVQKRPKRIRLSRWEQFYVMPLPRITDQYRPKWRIPKLSQDDLEIVRPARRRTPSPDYDFYYRPRRRSLGDISDEELLLPIDDYLAMKRTEEERLRLEEELELGFSASPPSRSPPHFELSSLRYSSPQAHVKVEETRKDFRYSTYHIPTKAEASTSYAELRERHAQAAYRQPKQRQRIMAEREDEELLRPVTTTQHLSEYKSELDFMSKEEKSRKKSRRQREVTEITEIEEEYEISKHAQRESSSSASRLLRRRRSLSPTYIELMRPVSELIRSRPQPAEEYEDDTERRSPTPERTRPRSPSPVSSERSLSRFERSARFDIFSRYESMKAALKTQKTSERKYEVLSQQPFTLDHAPRITLRMRSHRVPCGQNTRFILNVQSKPTAEVKWYHNGVELQESSKIHYTNTSGVLTLEILDCHTDDSGTYRAVCTNYKGEASDYATLDVTGGDYTTYASQRRDEEVPRSVFPELTRTEAYAVSSFKKTSEMEASSSVREVKSQMTETRESLSSYEHSASAEMKSAALEEKSLEEKSTTRKIKTTLAARILTKPRSMTVYEGESARFSCDTDGEPVPTVTWLRKGQVLSTSARHQVTTTKYKSTFEISSVQASDEGNYSVVVENSEGKQEAEFTLTIQKARVTEKAVTSPPRVKSPEPRVKSPEAVKSPKRVKSPEPSHPKAVSPTETKPTPTEKVQHLPVSAPPKITQFLKAEASKEIAKLTCVVESSVLRAKEVTWYKDGKKLK

SEQ ID NO: 6647 - skipped

SEQ ID NO: 6648 - protein, 575 aa, Homo sapiens
MAGALAGLAAGLQVPRVAPSPDSDSDTDSEDPSLRRSAGGLLRSQVIHSGHFMVSSPHSDSLPRRRDQEGSVGPSDFGPRSIDPTLTRLFECLSLAYSGKLVSPKWKNFKGLKLLCRDKIRLNNAIWRAWYIQYVKRRKSPVCGFVTPLQGPEADAHRKPEAVVLEGNYWKRRIEVVMREYHKWRIYYKKRLRKPSREDDLLAPKQAEGRWPPPEQWCKQLFSSVVPVLLGDPEEEPGGRQLLDLNCFLSDISDTLFTMTQSGPSPLQLPPEDAYVGNADMIQPDLTPLQPSLDDFMDISDFFTNSRLPQPPMPSNFPEPPSFSPVVDSLFSSGTLGPEVPPASSAMTHLSGHSRLQARNSCPGPLDSSAFLSSDFLLPEDPKPRLPPPPVPPPLLHYPPPAKVPGLEPCPPPPFPPMAPPTALLQEEPLFSPRFPFPTVPPAPGVSPLPAPAAFPPTPQSVPSPAPTPFPIELLPLGYSEPAFGPCFSMPRGKPPAPSPRGQKASPPTLAPATASPPTTAGSNNPCLTQLLTAAKPEQALEPPLVSSTLLRSPGSPAVNGGCQGTSAPCQALGL

SEQ ID NO: 6649 - protein, 408 aa, Homo sapiens
MAPWPHENSSLAPWPDLPTLAPNTANTSGLPGVPWEAALAGALLALAVLATVGGNLLVIVAIAWTPRLQTMTNVFVTSLAAADLVMGLLVVPPAATLALTGHWPLGATGCELWTSVDVLCVTASIETLCALAVDRYLAVTNPLRYGALVTKRCARTAVVLVWVVSAAVSFAPIMSQWWRVGADAEAQRCHSNPRCCAFASNMPYVLLSSSVSFYLPLLVMLFVYARVFVVATRQLRLLRGELGRFPPEESPPAPSRSLAPAPVGTCAPPEGVPACGRRPARLLPLREHRALCTLGLIMGTFTLCWLPFFLANVLRALGGPSLVPGPAFLALNWLGYANSAFNPLIYCRSPDFRSAFRRLLCRCGRRLPPEPCAAARPALFPSGVPAARSSPAQPRLCQRLDGASWGVS

SEQ ID NO: 6650 - protein, 269 aa, Homo sapiens
MAAALFVLLGFALLGTHGASGAAGTVFTTVEDLGSKILLTCSLNDSATEVTGHRWLKGGVVLKEDALPGQKTEFKVDSDDQWGEYSCVFLPEPMGTANIQLHGPPRVKAVKSSEHINEGETAMLVCKSESVPPVTDWAWYKITDSEDKALMNGSESRFFVSSSQGRSELHIENLNMEADPGQYRCNGTSSKGSDQAIITLRVRSHLAALWPFLGIVAEVLVLVTIIFIYEKRRKPEDVLDDDDAGSAPLKSSGQHQNDKGKNVRQRNSS

SEQ ID NO: 6651 - protein, 1893 aa, Homo sapiens
MMDLVLEEDVTVPGTLSGCSGLVPSVPDDLDGINPNAGLGNGLLPNVSEETVSPTRARNMKDFENQITELKKENFNLKLRIYFLEERMQQEFHGPTEHIYKTNIELKVEVESLKRELQEREQLLIKASKAVESLAEAGGSEIQRVKEDARKKVQQVEDLLTKRILLLEKDVTAAQAELEKAFAGTETEKALRLRLESKLSEMKKMHEGDLAMALVLDEKDRLIEELKLSLKSKEALIQCLKEEKSQMACPDENVSSGELRGLCAAPREEKERETEAAQMEHQKERNSFEERIQALEEDLREKEREIATEKKNSLKRDKAIQGLTMALKSKEKKVEELNSEIEKLSAAFAKAREALQKAQTQEFQGSEDYETALSGKEALSAALRSQNLTKSTENHRLRRSIKKITQELSDLQQERERLEKDLEEAHREKSKGDCTIRDLRNEVEKLRNEVNEREKAMENRYKSLLSESNKKLHNQEQVIKHLTESTNQKDVLLQKFNEKDLEVIQQNCYLMAAEDLELRSEGLITEKCSSQQPPGSKTIFSKEKKQSSDYEELIQVLKKEQDIYTHLVKSLQESDSINNLQAELNKIFALRKQLEQDVLSYQNLRKTLEEQISEIRRREEESFSLYSDQTSYLSICLEENNRFQVEHFSQEELKKKVSDLIQLVKELYTDNQHLKKTIFDLSCMGFQGNGFPDRLASTEQTELLASKEDEDTIKIGEDDEINFLSDQHLQQSNEIMKDLSKGGCKNGYLRHTESKISDCDGAHAPGCLEEGAFINLLAPLFNEKATLLLESRPDLLKVVRELLLGQLFLTEQEVSGEHLDGKTEKTPKQKGELVHFVQTNSFSKPHDELKLSCEAQLVKAGEVPKVGLKDASVQTVATEGDLLRFKHEATREAWEEKPINTALSAEHRPENLHGVPGWQAALLSLPGITNREAKKSRLPILIKPSRSLGNMYRLPATQEVVTQLQSQILELQGELKEFKTCNKQLHQKLILAEAVMEGRPTPDKTLLNAQPPVGAAYQDSPGEQKGIKTTSSVWRDKEMDSDQQRSYEIDSEICPPDDLASLPSCKENPEDVLSPTSVATYLSSKSQPSAKVSVMGTDQSESINTSNETEYLKQKIHDLETELEGYQNFIFQLQKHSQCSEAIITVLCGTEGAQDGLSKPKNGSDGEEMTFSSLHQVRYVKHVKILGPLAPEMIDSRVLENLKQQLEEQEYKLQKEQNLNMQLFSEIHNLQNKFRDLSPPRYDSLVQSQARELSLQRQQIKDGHGICVISRQHMNTMIKAFEELLQASDVDYCVAEGFQEQLNQCAELLEKLEKLFLNGKSVGVEMNTQNELMERIEEDNLTYQHLLPESPEPSASHALSDYETSEKSFFSRDQKQDNETEKTSVMVNSFSQDLLMEHIQEIRTLRKRLEESIKTNEKLRKQLERQGSEFVQGSTSIFASGSELHSSLTSEIHFLRKQNQALNAMLIKGSRDKQKENDKLRESLSRKTVSLEHLQREYASVKEENERLQKEGSEKERHNQQLIQEVRCSGQELSRVQEEVKLRQQLLSQNDKLLQSLRVELKAYEKLDEEHRRLREASGEGWKGQDPFRDLHSLLMEIQALRLQLERSIETSSTLQSRLKEQLARGAEKAQEGALTLAVQAVSIPEVPLQPDKHDGDKYPMESDNSFDLFDSSQAVTPKSVSETPPLSGNDTDSLSCDSGSSATSTPCVSRLVTGHHLWASKNGRHVLGLIEDYEALLKQISQGQRLLAEMDIQTQEAPSSTSQELGTKGPHPAPLSKFVSSVSTAKLTLEEAYRRLKLLWRVSLPEDGQCPLHCEQIGEMKAEVTKLHKKLFEQEKKLQNTMKLLQLSKRQEKVIFDQLVVTHKILRKARGNLELRPGGAHPGTCSPSRPGS

SEQ ID NO: 6652 - protein, 289 aa, Homo sapiens
MMSYLKQPPYAVNGLSLTTSGMDLLHPSVGYPATPRKQRRERTTFTRAQLDVLEALFAKTRYPDIFMREEVALKINLPESRVQVWFKNRRAKCRQQQQQQQNGGQNKVRPAKKKTSPAREVSSESGTSGQFTPPSSTSVPTIASSSAPVSIWSPASISPLSDPLSTSSSCMQRSYPMTYTQASGYSQGYAGSTSYFGGMDCGSYLTPMHHQLPGPGATLSPMGTNAVTSHLNQSPASLSTQGYGASSLGFNSTTDCLDYKDQTASWKLNFNADCLDYKDQTSSWKFQVL

SEQ ID NO: 6653 - protein, 2822 aa, Homo sapiens [sequence omitted]

SEQ ID NO: 6654 - protein, 530 aa, Homo sapiens
MARAGWTSPVPLCVCLLLTCGFAEAGKLLVVPMDGSHWFTMQSVVEKLILRGHEVVVVMPEVSWQLERSLNCTVKTYSTSYTLEDQNREFMVFAHAQWKAQAQSIFSLLMSSSSGFLDLFFSHCRSLFNDRKLVEYLKESSFDAVFLDPFDTCGLIVAKYFSLPSVVFTRGIFCHHLEEGAQCPAPLSYVPNDLLGFSDAMTFKERVWNHIVHLEDHLFCQYLFRNALEIASEILQTPVTAYDLYSHTSIWLLRTDFVLDYPKPVMPNMIFIGGINCHQGKPLPMEFEAYINASGEHGIVVFSLGSMVSEIPEKKAMAIADALGKIPQTVLWRYTGTRPSNLANNTILVKWLPQNDLLGHPMTRAFITHAGSHGVYESICNGVPMVMMPLFGDQMDNAKRMETKGAGVTLNVLEMTSEDLENALKAVINDKSYKENIMRLSSLHKDRPVEPLDLAVFWVEFVMRHKGAPHLRPAAHDLTWYQYHSLDVIGFLLAVVLTVAFITFKCCAYGYRKCLGKKGRVKKAHKSKTH

SEQ ID NO: 6655 - protein, 230 aa, Homo sapiens
MNLGDGLKLETELLDGKTKLILSPYEHKSKISVKMGNKAKIAKCPLRTKTGHILKSTQDTCIGSEKLLQKKPVGSETSQAKGEKNGMTFSSTKDLCKQCIDKDCLHIQKEISPATPNMQKTRNTVNTSLVGKQKPHKKHITAENMKSSLVCLTQDQLQQILMTVNQGNRSLSLTENGKEAKSQYSLYLNSISNQPKDENIMGLFKKTEMVSSVPAENKSVLNEHQETSKQ

SEQ ID NO: 6656 - protein, 367 aa, Homo sapiens
MKTGHFEIVTMLLATMILVDIFQVKAEVLDMADNAFDDEYLKCTDRMEIKYVPQLLKEEKASHQQLDTVWENAKAKWAARKTQIFLPMNFKDNHGIALMAYISEAQEQTPFYHLFSEAVKMAGQSREDYIYGFQFKAFHFYLTRALQLLRKPCEASSKTVVYRTSQGTSFTFGGLNQARFGHFTLAYSAKPQAANDQLTVLSIYTCLGVDIENFLDKESERITLIPLNEVFQVSQEGAGNNLILQSINKTCSHYECAFLGGLKTENCIENLEYFQPIYVYNPGEKNQKLEDHSEKNWKLEDHGEKNQKLEDHGVKILEPTQIPAPGPVPVPGPKSHPSASSGKLLLPQFGMVIILISVSAINLFVAL

SEQ ID NO: 6657 - protein, 712 aa, Homo sapiens
MPDQDKKVKTTEKSTDKQQEITIRDYSDLKRLRCLLNVQSSKQQLPAINFDSAQNSMTKSEPAIRAGGHRARGQWHESTEAVELENFSINYKNERNFSKHPQRKLFQEIFTALVKNRLISREWVNRAPSIHFLRVLICLRLLMRDPCYQEILHSLGGIENLAQYMEIVANEYLGYGEEQHTVDKLVNMTYIFQKLAAVKDQREWVTTSGAHKTLVNLLGARDTNVLLGSLLALASLAESQECREKISELNIVENLLMILHEYDLLSKRLTAELLRLLCAEPQVKEQVKLYEGIPVLLSLLHSDHLKLLWSIVWILVQVCEDPETSVEIRIWGGIKQLLHILQGDRNFVSDHSSIGSLSSANAAGRIQQLHLSEDLSPREIQENTFSLQAACCAALTELVLNDTNAHQVVQENGVYTIAKLILPNKQKNAAKSNLLQCYAFRALRFLFSMERNRPLFKRLFPTDLFEIFIDIGHYVRDISAYEELVSKLNLLVEDELKQIAENIESINQNKAPLKYIGNYAILDHLGSGAFGCVYKVRKHSGQNLLAMKEVNLHNPAFGKDKKDRDSSVRNIVSELTIIKEQLYHPNIVRYYKTFLENDRLYIVMELIEGAPLGEHFSSLKEKHHHFTEERLWKIFIQLCLALRYLHKEKRIVHRDLTPNNIMLGDKDKVTVTDFGLAKQKQENSKLTSVVGTILYSCVQHLYLRSPAPALAT

SEQ ID NO: 6658 - protein, 712 aa, Homo sapiens
MALLAMHSWRWAAAAAAFEKRRHSAILIRPLVSVSGSGPQWRPHQLGALGTARAYQIPESLKSITWQRLGKGNSGQFLDAAKALQVWPLIEKRTCWHGHAGGGLHTDPKEGAMNIVVPFMFKYAVDSLNQMSGNMLNLSDAPNTVATMATAVLIGYGVSRAGAAFFNEVRNAVFGKVAQNSIRRIAKNVFLHLHNLDLGFHLSRQTGALSKAIDRGTRGISFVLSALVFNLLPIMFEVMLVSGVLYYKCGAQFALVTLGTLGTYTAFTVAVTRWRTRFRIEMNKADNDAGNAAIDSLLNYETVKYFNNERYEAQRYDGFLKTYETASLKSTSTLAMLNFGQSAIFSVGLTAIMVLASQGIVAGTLTVGDLVMVNGLLFQLSLPLNFLGTVYRETRQALIDMNTLFTLLKVDTQIKDKVMASPLQITPQTATVAFDNVHFEYIEGQKVLSGISFEVPAGKKVAIVGGSGSGKSTIVRLLFRFYEPQKGSIYLAGQNIQDVSLESLRRAVGVVPQDAVLFHNTIYYNLLYGNISASPEEVYAVAKLAGLHDAILRMPHGYDTQVGERGLKLSGGEKQRVAIARAILKDPPVILYDEATSSLDSITEETILGAMKDVVKHRTSIFIAHRLSTVVDADEIIVLDQGKVAERGTHHGLLANPHSIYSEMWHTQSSRVQNHDNPKWEAKKENISKEEERKKLQEEIVNSVKGCGNCSC

SEQ ID NO: 6659 - protein, 716 aa, Homo sapiens
MWRVLFLLSGLGGLRMDSNFDSLPVQITVPEKIRSIIKEGIESQASYKIVIEGKPYTVNLMQKNFLPHNFRVYSYSGTGIMKPLDQDFQNFCHYQGYIEGYPKSVVMVSTCTGLRGVLQFENVSYGIEPLESSVGFEHVIYQVKHKKADVSLYNEKDIESRDLSFKLQSVEYNHMGSDTTVVAQKVFQLIGLTNAIFVSFNITIILSSLELWIDENKIATTGEANELLHTFLRWKTSYLVLRPHDVAFLLVYREKSNYVGATFQGKMCDANYAGGVVLHPRTISLESLAVILAQLLSLSMGITYDDINKCQCSGAVCIMNPEAIHFSGVKIFSNCSFEDFAHFISKQKSQCLHNQPRLDPFFKQQAVCGNAKLEAGEECDCGTEQDCALIGETCCDIATCRFKAGSNCAEGPCCENCLFMSKERMCRPSFEECDLPEYCNGSSASCPENHYVQTGHPCGLNQWICIDGVCMSGDKQCTDTFGKEVEFGPSECYSHLNSKTDVSGNCGISDSGYTQCEADNLQCGKLICKYVGKFLLQIPRATIIYANISGHLCIAVEFASDHADSQKMWIKDGTSCGSNKVCRNQRCVSSSYLGYDCTTDKCNDRGVCNNKKHCHCSASYLPPDCSVQSDLWPGGSIDSGNFPPVAIPARLPERRYIENIYHSKPMRWPFFLFIPFFIIFCVLIAIMVKVNFQRKKWRTEDYSSDEQPESESEPKG

SEQ ID NO: 6660 - protein, 387 aa, Homo sapiens
MPHLMERMVGSGLLWLALVSCILTQASAVQRDPSTVEDKCEKACRPEEECLALNSTWGCFCRQDLNSSDVHSLQPQLDCGPREIKVKVDKCLLGGLGLGEEVIAYLRDPNCSSILQTEERNWVSVTSPVQASACRNILERNQTHAIYKNTLSLVNDFIIRDTILNINFQCAYPLDMKVSLQAALQPIVSSLNVSVDGNGEFIVRMALFQDQNYTNPYEGDAVELSVESVLYVGAILEQGDTSRFNLVLRNCYATPTEDKADLVKYFIIRNSCSNQRDSTIHVEENGQSSESRFSVQMFMFAGHYDLVFLHCEIHLCDSLNEQCQPSCSRSQVRSEVPAIDLARVLDLGPITRRGAQSPGVMNGTPSTAGFLVAWPMVLLTVLLAWLF

SEQ ID NO: 6661 - protein, 676 aa, Homo sapiens
MEPRGGGSSQFSSCPGPASSGDQMQRLLQGPAPRPPGEPPGSPKSPGHSTGSQRPPDSPGAPPRSPSRKKRRAVGAKGGGHTGASASAQTGSPLLPAASPETAKLMAKAGQEELGPGPAGAPEPGPRSPVQEDRPGPGLGLSTPVPVTEQGTDQIRTPRRAKLHTVSTTVWEALPDVSRAKSDMAVSTPASEPQPDRDMAVSTPASEPQSDRDMAVSTPASEPQPDTDMAVSTPASEPQPDRDMAVSIPASKPQSDTAVSTPASEPQSSVALSTPISKPQLDTDVAVSTPASKHGLDVALPTAGPVAKLEVASSPPVSEAVPRMTESSGLVSTPVPRADAAGLAWPPTRRAGPDVVEMEAVVSEPSAGAPGCCSGAPALGLTQVPRKKKVRFSVAGPSPNKPGSGQASARPSAPQTATGAHGGPGAWEAVAVGPRPHQPRILKHLPRPPPSAVTRVGPGSSFAVTLPEAYEFFFCDTIEENEEAEAAAAGQDPAGVQWPDMCEFFFPDVGAQRSRRRGSPEPLPRADPVPAPIPGDPVPISIPEVYEHFFFGEDRLEGVLGPAVPLPLQALEPPRSASEGAGPGTPLKPAVVERLHLALRRAGELRGPVPSFAFSQNDMCLVFVAFATWAVRTSDPHTPDAWKTALLANVGTISAIRYFRRQVGQGRRSHSPSPSS

SEQ ID NO: 6662 - protein, 760 aa, Homo sapiens
MIPNQHNAGAGSHQPAVFRMAVLDTDLDHILPSSVLPPFWAKLVVGSVAIVCFARSYDGDFVFDDSEAIVNNKDLQAETPLGDLWHHDFWGSRLSSNTSHKSYRPLTVLTFRINYYLSGGFHPVGFHVVNILLHSGISVLMVDVFSVLFGGLQYTSKGRRLHLAPRASLLAALLFAVHPVHTECVAGVVGRADLLCALFFLLSFLGYCKAFRESNKEGAHSSTFWVLLSIFLGAVAMLCKEQGITVLGLNAVFDILVIGKFNVLEIVQKVLHKDKSLENLGMLRNGGLLFRMTLLTSGGAGMLYVRWRIMGTGPPAFTEVDNPASFADSMLVRAVNYNYYYSLNAWLLLCPWWLCFDWSMGCIPLIKSISDWRVIALAALWFCLIGLICQALCSEDGHKRRILTLGLGFLVIPFLPASNLFFRVGFVVAERVLYLPSVGYCVLLTFGFGALSKHTKKKKLIAAVVLGILFINTLRCVLRSGEWRSEEQLFRSALSVCPLNAKVHYNIGKNLADKGNQTAAIRYYREAVRLNPKYVHAMNNLGNILKERNELQEAEELLSLAVQIQPDFAAAWMNLGIVQNSLKRFEAAEQSYRTAIKHRRKYPDCYYNLGRLYADLNRHVDALNAWRNATVLKPEHSLAWNNMIILLDNTGNLAQAEAVGREALELIPNDHSLMFSLANVLGKSQKYKESEALFLKAIKANPNAASYHGNLAVLYHRWGHLDLAKKHYEISLQLDPTASGTKENYGLLRRKLELMQKKAV

SEQ ID NO: 6663 - protein, 334 aa, Homo sapiens
MSALLRLLRTGAPAAACLRLGTSAGTGSRRAMALYHTEERGQPCSQNYRLFFKNVTGHYISPFHDIPLKVNSKEENGIPMKKARNDEYENLFNMIVEIPRWTNAKMEIATKEPMNPIKQYVKDGKLRYVANIFPYKGYIWNYGTLPQTWEDPHEKDKSTNCFGDNDPIDVCEIGSKILSCGEVIHVKILGILALIDEGETDWKLIAINANDPEASKFHDIDDVKKFKPGYLEATLNWFRLYKVPDGKPENQFAFNGEFKNKAFALEVIKSTHQCWKALLMKKCNGGAINCTNVQISDSPFRCTQEEARSLVESVSSSPNKESNEEEQVWHFLGK

SEQ ID NO: 6664 - protein, 1043 aa, Homo sapiens
MNFSVITCPNGGTNQGLLPYLMALDQYQLEEFKLCLEPQQLMDFWSAPQGHFPRIPWANLRAADPLNLSFLLDEHFPKGQAWKVVLGIFQTMNLTSLCEKVRAEMKENVQTQELQDPTQEDLEMLEAAAGNMQTQGCQDPNQEELDELEEETGNVQAQGCQDPNQEEPEMLEEADHRRKYRENMKAELLETWDNISWPKDHVYIRNTSKDEHEELQRLLDPNRTRAQAQTIVLVGRAGVGKTTLAMQAMLHWANGVLFQQRFSYVFYLSCHKIRYMKETTFAELISLDWPDFDAPIEEFMSQPEKLLFIIDGFEEIIISESRSESLDDGSPCTDWYQELPVTKILHSLLKKELVPLATLLITIKTWFVRDLKASLVNPCFVQITGFTGDDLRVYFMRHFDDSSEVEKILQQLRKNETLFHSCSAPMVCWTVCSCLKQPKVRYYDLQSITQTTTSLYAYFFSNLFSTAEVDLADDSWPGQWRALCSLAIEGLWSMNFTFNKEDTEIEGLEVPFIDSLYEFNILQKINDCGGCTTFTHLSFQEFFAAMSFVLEEPREFPPHSTKPQEMKMLLQHVLLDKEAYWTPVVLFFFGLLNKNIARELEDTLHCKISPRVMEELLKWGEELGKAESASLQFHILRLFHCLHESQEEDFTKKMLGRIFEVDLNILEDEELQASSFCLKHCKRLNKLRLSVSSHILERDLEILETSKFDSRMHAWNSICSTLVTNENLHELDLSNSKLHASSVKGLCLALKNPRCKVQKLTCKSVTPEWVLQDLIIALQGNSKLTHLNFSSNKLGMTVPLILKALRHSACNLKYLCLEKCNLSAASCQDLALFLTSIQHVTRLCLGFNRLQDDGIKLLCAALTHPKCALERLELWFCQLAAPACKHLSDALLQNRSLTHLNLSKNSLRDEGVKFLCEALGRPDGNLQSLNLSGCSFTREGCGELANALSHNHNVKILDLGENDLQDDGVKLLCEALKPHRALHTLGLAKCNLTTACCQHLFSVLSSSKSLVNLNLLGNELDTDGVKMLCKALKKSTCRLQKLG

SEQ ID NO: 6665 - protein, 1647 aa, Homo sapiens
MSTPDPPLGGTPRPGPSPGPGPSPGAMLGPSPGPSPGSAHSMMGPSPGPPSAGHPIPTQGPGGYPQDNMHQMHKPMESMHEKGMSDDPRYNQMKGMGMRSGGHAGMGPPPSPMDQHSQGYPSPLGGSEHASSPVPASGPSSGPQMSSGPGGAPLDGADPQALGQQNRGPTPFNQNQLHQLRAQIMAYKMLARGQPLPDHLQMAVQGKRPMPGMQQQMPTLPPPSVSATGPGPGPGPGPGPGPGPAPPNYSRPHGMGGPNMPPPGPSGVPPGMPGQPPGGPPKPWPEGPMANAAAPTSTPQKLIPPQPTGRPSPAPPAVPPAASPVMPPQTQSPGQPAQPAPMVPLHQKQSRITPIQKPRGLDPVEILQEREYRLQARIAHRIQELENLPGSLAGDLRTKATIELKALRLLNFQRQLRQEVVVCMRRDTALETALNAKAYKRSKRQSLREARITEKLEKQQKIEQERKRRQKHQEYLNSILQHAKDFKEYHRSVTGKIQKLTKAVATYHANTEREQKKENERIEKERMRRLMAEDEEGYRKLIDQKKDKRLAYLLQQTDEYVANLTELVRQHKAAQVAKEKKKKKKKKKAENAEGQTPAIGPDGEPLDETSQMSDLPVKVIHVESGKILTGTDAPKAGQLEAWLEMNPGYEVAPRSDSEESGSEEEEEEEEEEQPQAAQPPTLPVEEKKKIPDPDSDDVSEVDARHIIENAKQDVDDEYGVSQALARGLQSYYAVAHAVTERVDKQSALMVNGVLKQYQIKGLEWLVSLYNNNLNGILADEMGLGKTIQTIALITYLMEHKRINGPFLIIVPLSTLSNWAYEFDKWAPSVVKVSYKGSPAARRAFVPQLRSGKFNVLLTTYEYIIKDKHILAKIRWKYMIVDEGHRMKNHHCKLTQVLNTHYVAPRRLLLTGTPLQNKLPELWALLNFLLPTIFKSCSTFEQWFNAPFAMTGEKVDLNEEETILIIRRLHKVLRPFLLRRLKKEVEAQLPEKVEYVIKCDMSALQRVLYRHMQAKGVLLTDGSEKDKKGKGGTKTLMNTIMQLRKICNHPYMFQHIEESFSEHLGFTGGIVQGLDLYRASGKFELLDRILPKLRATNHKVLLFCQMTSLMTIMEDYFAYRGFKYLRLDGTTKAEDRGMLLKTFNEPGSEYFIFLLSTRAGGLGLNLQSADTVIIFDSDWNPHQDLQAQDRAHRIGQQNEVRVLRLCTVNSVEEKILAAAKYKLNVDQKVIQAGMFDQKSSSHERRAFLQAILEHEEQDESRHCSTGSGSASFAHTAPPPAGVNPDLEEPPLKEEDEVPDDETVNQMIARHEEEFDLFMRMDLDRRREEARNPKRKPRLMEEDELPSWIIKDDAEVERLTCEEEEEKMFGRGSRHRKEVDYSDSLTEKQWLKAIEEGTLEEIEEEVRQKKSSRKRKRDSDAGSSTPTTSTRSRDKDDESKKQKKRGRPPAEKLSPNPPNLTKKMKKIVDAVIKYKDSSSGRQLSEVFIQLPSRKELPEYYELIRKPVDFKKIKERIRNHKYRSLNDLEKDVMLLCQNAQTFNLEGSLIYEDSIVLQSVFTSVRQKIEKEDDSEGEESEEEEEGEEEGSESESRSVKVKIKLGRKEKAQDRLKGGRRRPSRGSRAKPVVSDDDSEEEQEEDRSGSGSEED

SEQ ID NO: 6666 - protein, 792 aa, Homo sapiens
MELKSPEEEVVAALPEGMRPDSNLYGFPWELVICAAVVGFFAVLFFLWRSFRSVRSRLYVGREKKLALMLSGLIEEKSKLLEKFSLVQKEYEGYEVESSLKDASFEKEATEAQSLEATCEKLNRSNSELEDEILCLEKELKEEKSKHSEQDELMADISKRIQSLEDESKSLKSQVAEAKMTFKIFQMNEERLKIAIKDALNENSQLQESQKQLLQEAEVWKEQVSELNKQKVTFEDSKVHAEQVLNDKESHIKTLTERLLKMKDWAAMLGEDITDDDNLELEMNSESENGAYLDNPPKGALKKLIHAAKLNASLKTLEGERNQIYIQLSEVDKTKEELTEHIKNLQTEQASLQSENTHFENENQKLQQKLKVMTELYQENEMKLHRKLTVEENYRLEKEEKLSKVDEKISHATEELETYRKRAKDLEEELERTIHSYQGQIISHEKKAHDNWLAARNAERNLNDLRKENAHNRQKLTETELKFELLEKDPYALDVPNTAFGREHSPYGPSPLGWPSSETRAFLSPPTLLEGPLRLSPLLPGGGGRGSRGPGNPLDHQITNERGESSCDRLTDPHRAPSDTGSLSPPWDQDRRMMFPPPGQSYPDSALPPQRQDRFCSNSGRLSGPAELRSFNMPSLDKMDGSMPSEMESSRNDTKDDLGNLNVPDSSLPAENEATGPGFVPPPLAPIRGPLFPVDARGPFLRRGPPFPPPPPGAMFGASRDYFPPGDFPGPPPAPFAMRNVYPPRGFPPYLPPRPGFFPPPPHSEGRSEFPSGLIPPSNEPATEHPEPQQET

SEQ ID NO: 6667 - protein, 1588 aa, Homo sapiens
MVQKKKFCPRLLDYLVIVGARHPSSDSVAQTPELLRRYPLEDHTEFPLPPDVVFFCQPEGCLSVRQRRMSLRDDTSFVFTLTDKDTGVTRYGICVNFYRSFQKRISKEKGEGGAGSRGKEGTHATCASEEGGTESSESGSSLQPLSADSTPDVNQSPRGKRRAKAGSRSRNSTLTSLCVLSHYPFFSTFRECLYTLKRLVDCCSERLLGKKLGIPRGVQRDTMWRIFTGSLLVEEKSSALLHDLREIEAWIYRLLRSPVPVSGQKRVDIEVLPQELQPALTFALPDPSRFTLVDFPLHLPLELLGVDACLQVLTCILLEHKVVLQSRDYNALSMSVMAFVAMIYPLEYMFPVIPLLPTCMASAEQLLLAPTPYIIGVPASFFLYKLDFKMPDDVWLVDLDSNRVIAPTNAEVLPILPEPESLELKKHLKQALASMSLNTQPILNLEKFHEGQEIPLLLGRPSNDLQSTPSTEFNPLIYGNDVDSVDVATRVAMVRFFNSANVLQGFQMHTRTLRLFPRPVVAFQAGSFLASRPRQTPFAEKLARTQAVEYFGEWILNPTNYAFQRIHNNMFDPALIGDKPKWYAHQLQPIHYRVYDSNSQLAEALSVPPERDSDSEPTDDSGSDSMDYDDSSSSYSSLGDFVSEMMKCDINGDTPNVDPLTHAALGDASEVEIDELQNQKEAEEPGPDSENSQENPPLRSSSSTTASSSPSTVIHGANSEPADSTEMDDKAAVGVSKPLPSVPPSIGKSNVDRRQAEIGEGSVRRRIYDNPYFEPQYGFPPEEDEDEQGESYTPRFSQHVSGNRAQKLLRPNSLRLASDSDAESDSRASSPNSTVSNTSTEGFGGIMSFASSLYRNHSTSFSLSNLTLPTKGAREKATPFPSLKGNRRALVDQKSSVIKHSPTVKREPPSPQGRSSNSSENQQFLKEVVHSVLDGQGVGWLNMKKVRRLLESEQLRVFVLSKLNRMVQSEDDARQDIIPDVEISRKVYKGMLDLLKCTVLSLEQSYAHAGLGGMASIFGLLEIAQTHYYSKEPDKRKRSPTESVNTPVGKDPGLAGRGDPKAMAQLRVPQLGPRAPSATGKGPKELDTRSLKEENFIASIGPEVIKPVFDLGETEEKKSQISADSGVSLTSSSQRTDQDSVIGVSPAVMIRSSSQDSEVSTVVSNSSGETLGADSDLSSNAGDGPGGEGSVHLASSRGTLSDSEIETNSATSTIFGKAHSLKPSIKEKLAGSPIRTSEDVSQRVYLYEGLLGKERSTLWDQMQFWEDAFLDAVMLEREGMGMDQGPQEMIDRYLSLGEHDRKRLEDDEDRLLATLLHNLISYMLLMKVNKNDIRKKVRRLMGKSHIGLVYSQQINEVLDQLANLNGRDLSIWSSGSRHMKKQTFVVHAGTDTNGDIFFMEVCDDCVVLRSNIGTVYERWWYEKLINMTYCPKTKVLCLWRRNGSETQLNKFYTKKCRELYYCVKDSMERAAARQQSIKPGPELGGEFPVQDLKTGEGGLLQVTLEGINLKFMHNQVFIELNHIKKCNTVRGVFVLEEFVPEIKEVVSHKYKTPMAHEICYSVLCLFSYVAAVHSSEEDLRTPPRPVSS

SEQ ID NO: 6668 - protein, 166 aa, Homo sapiens
MYSLNQEIKAFSRNNLRKQCTRVTTLTGKKIIETWKDARIHVVEEVEPSSGGGCGYVQDLSSDLQVGVIKPWLLLGSQDAAHDLDTLKKNKDGVVLVHCNAGVSRAAAIVIGFLMNSEQTSFTSAFSLVKNARPSICPNSGFMEQLRTYQEGKESNKCDRIQENSS

SEQ ID NO: 6669 - protein, 706 aa, Homo sapiens
METKGYHSLPEGLDMERRWGQVSQAVERSSLGPTERTDENNYMEIVNVSCVSGAIPNNSTQGSSKEKQELLPCLQQDNNRPGILTSDIKTELESKELSATVAESMGLYMDSVRDADYSYEQQNQQGSMSPAKIYQNVEQLVKFYKGNGHRPSTLSCVNTPLRSFMSDSGSSVNGGVMRAVVKSPIMCHEKSPSVCSPLNMTSSVCSPAGINSVSSTTASFGSFPVHSPITQGTPLTCSPNVENRGSRSHSPAHASNVGSPLSSPLSSMKSSISSPPSHCSVKSPVSSPNNVTLRSSVSSPANINNSRCSVSSPSNTNNRSTLSSPAASTVGSICSPVNNAFSYTASGTSAGSSTLRDVVPSPDTQEKGAQEVPFPKTEEVESAISNGVTGQLNIVQYIKPEPDGAFSSSCLGGNSKINSDSSFSVPIKQESTKHSCSGTSFKGNPTVNPFPFMDGSYFSFMDDKDYYSLSGILGPPVPGFDGNCEGSGFPVGIKQEPDDGSYYPEASIPSSAIVGVNSGGQSFHYRIGAQGTISLSRSARDQSFQHLSSFPPVNTLVESWKSHGDLSSRRSDGYPVLEYIPENVSSSTLRSVSTGSSRPSKICLVCGDEASGCHYGVVTCGSCKVFFKRAVEGQHNYLCAGRNDCIIDKIRRKNCPACRLQKCLQAGMNLGERRCISLPCMNYARGCTKSAFSSFDCSSPLKNTPS

SEQ ID NO: 6670 - protein, 761 aa, Homo sapiens
MEEPGVTPQPYLGLLLEELRRVVAALPEGMRPDSNLYGFPWELVICAAVVGFFAVLFFLWRSFRSVRSRLYVGREKKLALMLSGLIEEKSKLLEKFSLVQKEYEGYEVESSLKDASFEKEATEAQSLEATCEKLNRSNSELEDEILCLEKELKEEKSKHSEQDELMADISKRIQSLEDESKSLKSQVAEAKMTFKIFQMNEERLKIAIKDALNENSQLQESQKQLLQEAEVWKEQVSELNKQKVTFEDSKVHAEQVLNDKESHIKTLTERLLKMKDWAAMLGEDITDDDNLELEMNSESENGAYLDNPPKGALKKLIHAAKLNASLKTLEGERNQIYIQLSEVDKTKEELTEHIKNLQTEQASLQSENTHFENENQKLQQKLKVMTELYQENEMKLHRKLTVEENYRLEKEEKLSKVDEKISHATEELETYRKRAKDLEEELERTIHSYQGQIISHEKKAHDNWLAARNAERNLNDLRKENAHNRQKLTETELKFELLEKDPYALDVPNTAFGRGSRGPGNPLDHQITNERGESSCDRLTDPHRAPSDTGSLSPPWDQDRRMMFPPPGQSYPDSALPPQRQDRFCSNSGRLSGPAELRSFNMPSLDKMDGSMPSEMESSRNDTKDDLGNLNVPDSSLPAENEATGPGFVPPPLAPIRGPLFPVDARGPFLRRGPPFPPPPPGAMFGASRDYFPPGDFPGPPPAPFAMRNVYPPRGFPPYLPPRPGFFPPPPHSEGRSEFPSGLIPPSNEPATEHPEPQQET

SEQ ID NO: 6671 - protein, 575 aa, Homo sapiens
VKGRFAEMEKQRQEEQRKRTEEERKRRIEQDMLEKRKIQRELAKRAEQIEDINNTGTESASEEGDDSLLITVVPVKSYKTSGKMKKNFEDLEKEREEKERIKYEEDKRIRYEEQRPSLKEAKCLSLVMDDEIESEAKKESLSPGKLKLTFEELERQRQENRKKQAEEEARKRLEEEKRAFEEARRQMVNEDEENQDTAKIFKGYRPGKLKLSFEEMERQRREDEKRKAEEEARRRIEEEKKAFAEARRNMVVDDDSPEMYKTISQEFLTPGKLEINFEELLKQKMEEEKRRTEEERKHKLEMEKQEFEQLRQEMGEEEEENETFGLSREYEELIKLKRSGSIQAKNLKSKFEKIGQLSEKEIQKKIEEERARRRAIDLEIKEREAENFHEEDDVDVRPARKSEAPFTHKVNMKARFEQMAKAREEEEQRRIEEQKLLRMQFEQREIDAALQKKREEEEEEEGSIMNGSTAEDEEQTRSGAPWFKKPLKNTSVVDSEPVRFTVKVTGEPKPEITWWFEGEILQDGEDYQYIERGETYCLYLPETFPEDGGEYMCKAVNNKGSAASTCILTIETDDY

SEQ ID NO: 6672 - protein, 642 aa, Homo sapiens
MQPRSERPAGRTQSPEHGSPGPGPEAPPPPPPQPPAPEAERTRPRQARPAAPMEGAVQLLSREGHSVAHNSKRHYHDAFVAMSRMRQRGLLCDIVLHVAAKEIRAHKVVLASCSPYFHAMFTNEMSESRQTHVTLHDIDPQALDQLVQFAYTAEIVVGEGNVQTLLPAASLLQLNGVRDACCKFLLSQLDPSNCLGIRGFADAHSCSDLLKAAHRYVLQHFVDVAKTEEFMLLPLKQVLELVSSDSLNVPSEEEVYRAVLSWVKHDVDARRQHVPRLMKCVRLPLLSRDFLLGHVDAESLVRHHPDCKDLLIEALKFHLLPEQRGVLGTSRTRPRRCEGAGPVLFAVGGGSLFAIHGDCEAYDTRTDRWHVVASMSTRRARVGVAAVGNRLYAVGGYDGTSDLATVESYDPVTNTWQPEVSMGTRRSCLGVAALHGLLYSAGGYDGASCLNSAERYDPLTGTWTSVAAMSTRRRYVRVATLDGNLYAVGGYDSSSHLATVEKYEPQVNVWSPVASMLSRRSSAGVAVLEGALYVAGGNDGTSCLNSVERYSPKAGAWESVAPMNIRRSTHDLVAMDGWLYAVGGNDGSSSLNSIEKYNPRTNKWVAASCMFTRRSSVGVAVLELLNFPPPSSPTLSVSSTSL

SEQ ID NO: 6673 - protein, 1158 aa, Homo sapiens
MESGHLLWALLFMQSLWPQLTDGATRVYYLGIRDVQWNYAPKGRNVITNQPLDSDIVASSFLKSDKNRIGGTYKKTIYKEYKDDSYTDEVAQPAWLGFLGPVLQAEVGDVILIHLKNFATRPYTIHPHGVFYEKDSEGSLYPDGSSGPLKADDSVPPGGSHIYNWTIPEGHAPTDADPACLTWIYHSHVDAPRDIATGLIGPLITCKRGALDGNSPPQRQDVDHDFFLLFSVVDENLSWHLNENIATYCSDPASVDKEDETFQESNRMHAINGFVFGNLPELNMCAQKRVAWHLFGMGNEIDVHTAFFHGQMLTTRGHHTDVANIFPATFVTAEMVPWEPGTWLISCQVNSHFRDGMQALYKVKSCSMAPPVDLLTGKVRQYFIEAHEIQWDYGPMGHDGSTGKNLREPGSISDKFFQKSSSRIGGTYWKVRYEAFQDETFQEKMHLEEDRHLGILGPVIRAEVGDTIQVVFYNRASQPFSMQPHGVFYEKDYEGTVYNDGSSYPGLVAKPFEKVTYRWTVPPHAGPTAQDPACLTWMYFSAADPIRDTNSGLVGPLLVCRAGALGADGKQKGVDKEFFLLFTVLDENKSWYSNANQAAAMLDFRLLSEDIEGFQDSNRMHAINGFLFSNLPRLDMCKGDTVAWHLLGLGTETDVHGVMFQGNTVQLQGMRKGAAMLFPHTFVMAIMQPDNLGTFEIYCQAGSHREAGMRAIYNVSQCPGHQATPRQRYQAARIYYIMAEEVEWDYCPDRSWEREWHNQSEKDSYGYIFLSNKDGLLGSRYKKAVFREYTDGTFRIPRPRTGPEEHLGILGPLIKGEVGDILTVVFKNNASRPYSVHAHGVLESTTVWPLAAEPGEVVTYQWNIPERSGPGPNDSACVSWIYYSAVDPIKDMYSGLVGPLAICQKGILEPHGGRSDMDREFALLFLIFDENKSWYLEENVATHGSQDPGSINLQDETFLESNKMHAINGKLYANLRGLTMYQGERVAWYMLAMGQDVDLHTIHFHAESFLYRNGENYRADVVDLFPGTFEVVEMVASNPGTWLMHCHVTDHVHAGMETLFTVFSRTEHLSPLTVITKETEKAVPPRDIEEGNVKMLGMQIPIKNVEMLASVLVAISVTLLLVVLALGGVVWYQHRQRKLRRNRRSILDDSFKLLSFKQ

SEQ ID NO: 6674 - protein, 523 aa, Homo sapiens
MMLRGNLKQVRIEKNPARLRALESAVGESEPAAAAAMALALAGEPAPPAPAPPEDHPDEEMGFTIDIKSFLKPGEKTYTQRCRLFVGNLPTDITEEDFKRLFERYGEPSEVFINRDRGFGFIRLESRTLAEIAKAELDGTILKSRPLRIRFATHGAALTVKNLSPVVSNELLEQAFSQFGPVEKAVVVVDDRGRATGKGFVEFAAKPPARKALERCGDGAFLLTTTPRPVIVEPMEQFDDEDGLPEKLMQKTQQYHKEREQPPRFAQPGTFEFEYASRWKALDEMEKQQREQVDRNIREAKEKLEAEMEAARHEHQLMLMRQDLMRRQEELRRLEELRNQELQKRKQIQLRHEEEHRRREEEMIRHREQEELRRQQEGFKPNYMENREQEMRMGDMGPRGAINMGDAFSPAPAGNQGPPPMMGMNMNNRATIPGPPMGPGPAMGPEGAANMGTPMMPDNGAVHNDRFPQGPPSQMGSPMGSRTGSETPQAPMSGVGPVSGGPGGFGRGSQGGNFEGPNKRRRY

SEQ ID NO: 6675 - protein, 252 aa, Homo sapiens
MDIPLDLSSSAGSGKRRRRGNLPKESVQILRDWLYEHRYNAYPSEQEKALLSQQTHLSTLQVCNWFINARRRLLPDMLRKDGKDPNQFTISRRGAKISETSSVESVMGIKNFMPALEETPFHSCTAGPNPTLGRPLSPKPSSPGSVLARPSVICHTTVTALKDVPFSLCQSVGVGQNTDIQQIAAKNFTDTSLMYPEDTCKSGPSTNTQSGLFNTPPPTPPDLNQDFSGFQLLVDVALKRAAEMELQAKLTA

SEQ ID NO: 6676 - protein, 490 aa, Homo sapiens
MERVGCTLTTTYAHPRPTPTNFLPAISTMASSYRDRFPHSNLTHSLSLPWRPSTYYKVASNSPSVAPYCTRSQRVSENTMLPFVSNRTTFFTRYTPDDWYRSNLTNYQESNTSRHNSEKLRVDTSRLIQDKYQQTRKTQADTTQNLGERVNDIGFWKSEIIHELDEMIGETNALTDVKKRLERALMETEAPLQVARECLFHREKRMGIDLVHDEVEAQLLTEVDTILCCQERMKLHLDKAIAQLAANRASQHELEKDLSDKQTAYRIDDKCHHLRNTSDGVGYFRGVERVDATVSVPESWAKFTDDNILRSQSERAASAKLRDDIENLLVVTANEMWNQFNKVNLSFTNRIAETADAKNKIQTHLAKTLQEIFQTEMTIESIKKAIKDKTAFLKVAQTRLDERTRRPNIELCRDMAQLRLVNEVHEVDDTIQTLQQRLRDAEDTLQSLVHIKATLEYDLAVKANSLYIDQEKCMSMRKSYPNTLRLVGFC

SEQ ID NO: 6677 - protein, 2692 aa, Homo sapiens
MMNNSGYSDAGLGLGDETDEMPSTEKDLAEDAPWKKIQQNTFTRWCNEHLKCVGKRLTDLQRDLSDGLRLIALLEVLSQKRMYRKFHPRPNFRQMKLENVSVALEFLEREHIKLVSIDSKAIVDGNLKLILGLIWTLILHYSISMPMWEDEDDEDARKQTPKQRLLGWIQNKVPQLPITNFNRDWQDGKALGALVDNCAPGLCPDWEAWDPNQPVENAREAMQQADDWLGVPQVIAPEEIVDPNVDEHSVMTYLSQFPKAKLKPGAPVRSKQLNPKKAIAYGPGIEPQGNTVLQPAHFTVQTVDAGVGEVLVYIEDPEGHTEEAKVVPNNDKDRTYAVSYVPKVAGLHKVTVLFAGQNIERSPFEVNVGMALGDANKVSARGPGLEPVGNVANKPTYFDIYTAGAGTGDVAVVIVDPQGRRDTVEVALEDKGDSTFRCTYRPAMEGPHTVHVAFAGAPITRSPFPVHVSEACNPNACRASGRGLQPKGVRVKEVADFKVFTKGAGSGELKVTVKGPKGTEEPVKVREAGDGVFECEYYPVVPGKYVVTITWGGYAIPRSPFEVQVSPEAGVQKVRAWGPGLETGQVGKSADFVVEAIGTEVGTLGFSIEGPSQAKIECDDKGDGSCDVRYWPTEPGEYAVHVICDDEDIRDSPFIAHILPAPPDCFPDKVKAFGPGLEPTGCIVDKPAEFTIDARAAGKGDLKLYAQDADGCPIDIKVIPNGDGTFRCSYVPTKPIKHTIIISWGGVNVPKSPFRVNVGEGSHPERVKVYGPGVEKTGLKANEPTYFTVDCSEAGQGDVSIGIKCAPGVVGPAEADIDFDIIKNDNDTFTVKYTPPGAGRYTIMVLFANQEIPASPFHIKVDPSHDASKVKAEGPGLNRTGVEVGKPTHFTVLTKGAGKAKLDVQFAGTAKGEVVRDFEIIDNHDYSYTVKYTAVQQGNMAVTVTYGGDPVPKSPFVVNVAPPLDLSKIKVQGLNSKVAVGQEQAFSVNTRGAGGQGQLDVRMTSPSRRPIPCKLEPGGGAEAQAVRYMPPEEGPYKVDITYDGHPVPGSPFAVEGVLPPDPSKVCAYGPGLKGGLVGTPAPFSIDTKGAGTGGLGLTVEGPCEAKIECQDNGDGSCAVSYLPTEPGEYTINILFAEAHIPGSPFKATIRPVFDPSKVRASGPGLERGKVGEAATFTVDCSEAGEAELTIEILSDAGVKAEVLIHNNADGTYHITYSPAFPGTYTITIKYGGHPVPKFPTRVHVQPAVDTSGVKVSGPGVEPHGVLREVTTEFTVDARSLTATGGNHVTARVLNPSGAKTDTYVTDNGDGTYRVQYTAYEEGVHLVEVLYDEVAVPKSPFRVGVTEGCDPTRVRAFGPGLEGGLVNKANRFTVETRGAGTGGLGLAIEGPSEAKMSCKDNKDGSCTVEYIPFTPGDYDVNITFGGRPIPGSPFRVPVKDVVDPGKVKCSGPGLGAGVRARVPQTFTVDCSQAGRAPLQVAVLGPTGVAEPVEVRDNGDGTHTVHYTPATDGPYTVAVKYADQEVPRSPFKIKVLPAHDASKVRASGPGLNASGIPASLPVEFTIDARDAGEGLLTVQILDPEGKPKKANIRDNGDGTYTVSYLPDMSGRYTITIKYGGDEIPYSPFRIHALPTGDASKCLVTVSIGGHGLGACLGPRIQIGQETVITVDAKAAGEGKVTCTVSTPDGAELDVDVVENHDGTFDIYYTAPEPGKYVITIRFGGEHIPNSPFHVLATEEPVVPVEPMESMLRPFNLVIPFAVQKGELTGEVRMPSGKTARPNITDNKDGTITVRYAPTEKGLHQMGIKYDGNHIPGSPLQFYVDAINSRHVSAYGPGLSHGMVNKPATFTIVTKDAGEGGLSLAVEGPSKAEITCKDNKDGTCTVSYLPTAPGDYSIIVRFDDKHIPGSPFTAKITGDDSMRTSQLNVGTSTDVSLKITESDLSQLTASIRAPSGNEEPCLLKRLPNRHIGISFTPKEVGEHVVSVRKSGKHVTNSPFKILVGPSEIGDASKVRVWGKGLSEGHTFQVAEFIVDTRNAGYGGLGLSIEGPSKVDINCEDMEDGTCKVTYCPTEPGTYIINIKFADKHVPGSPFTVKVTGEGRMKESITRRRQAPSIATIGSTCDLNLKIPGNWFQMVSAQERLTRTFTRSSHTYTRTERTEISKTRGGETKREVRVEESTQVGGDPFPAVFGDFLGRERLGSFGSITRQQEGEASSQDMTAQVTSPSGKVEAAEIVEGEDSAYSVRFVPQEMGPHTVAVKYRGQHVPGSPFQFTVGPLGEGGAHKVRAGGTGLERGVAGVPAEFSIWTREAGAGGLSIAVEGPSKAEIAFEDRKDGSCGVSYVVQEPGDYEVSIKFNDEHIPDSPFVVPVASLSDDARRLTVTSLQETGLKVNQPASFAVQLNGARGVIDARVHTPSGAVEECYVSELDSDKHTIRFIPHENGVHSIDVKFNGAHIPGSPFKIRVGEQSQAGDPGLVSAYGPGLEGGTTGVSSEFIVNTLNAGSGALSVTIDGPSKVQLDCRECPEGHVVTYTPMAPGNYLIAIKYGGPQHIVGSPFKAKVTGPRLSGGHSLHETSTVLVETVTKSSSSRGSSYSSIPKFSSDASKVVTRGPGLSQAFVGQKNSFTVDCSKAGTNMMMVGVHGPKTPCEEVYVKHMGNRVYNVTYTVKEKGDYILIVKWGDESVPGSPFKVKVP

SEQ ID NO: 6678 - protein, 1320 aa, Homo sapiens
MMNRTTPDQELAPASEPVWERPWSVEEIRRSSQSWSLAADAGLLQFLQEFSQQTISRTHEIKKQVDGLIRETKATDCRLHNVFNDFLMLSNTQFIENRVYDEEVEEPVLKAEAEKTEQEKTREQKEVDLIPKVQEAVNYGLQVLDSAFEQLDIKAGNSDSEEDDANGRVELILEPKDLYIDRPLPYLIGSKLFMEQEDVGLGELSSEEGSVGSDRGSIVDTEEEKEEEESDEDFAHHSDNEQNRHTTQMSDEEEDDDGCDLFADSEKEEEDIEDIEENTRPKRSRPTSFADELAARIKGDAVGRVDEEPTTLPSGEAKPRKTLKEKKERRTPSDDEEDNLFAPPKLTDEDFSPFGSGGGLFSGGKGLFDDEDEESDLFTEAPQDRQAGASVKEESSSSKPGKKIPAGAVSVFLGDTDVFGAASVPSMKEPQKPEQPTPRKSPYGPPPTGLFDDDDGDDDDDFFSAPHSKPSKTGKVQSTADIFGDEEGDLFKEKAVASPEATVSQTDENKARAEKKVTLSSSKNLKPSSETKTQKGLFSDEEDSEDLFSSQSASKLKGASLLPGKLPTLVSLFDDEDEEDNLFGGTAAKKQTLCLQAQREEKAKASELSKKKASALLFSSDEEDQWNIPASQTHLASDSRSKGEPRDSGTLQSQEAKAVKKTSLFEEDEEDDLFAIAKDSQKKTQRVSLLFEDDVDSGGSLFGSPPTSVPPATKKKETVSEAPPLLFSDEEEKEAQLGVKSVDKKVESAKESLKFGRTDVAESEKEGLLTRSAQETVKHSDLFSSSSPWDKGTKPRTKTVLSLFDEEEDKMEDQNIIQAPQKEVGKGRDPDAHPKSTGVFQDEELLFSHKLQKDNDPDVDLFAGTKKTKLLEPSVGSLFGDDEDDDLFSSAKSQPLVQEKKRVVKKDHSVDSFKNQKHPESIQGSKEKGIWKPETPQANLAINPAALLPTAASQISEVKPVLPELAFPSSEHRRSHGLESVPVLPGSGEAGVSFDLPAQADTLHSANKSRVKMRGKRRPQTRAARRLAAQESSETEDMSVPRGPIAQWADGAISPNGHRPQLRAASGEDSTEEALAAAAAPWEGGPVPGVDRSPFAKSLGHSRGEADLFDSGDIFSTGTGSQSVERTKPKAKIAENPANPPVGGKAKSPMFPALGEASSDDDLFQSAKPKPAKKTNPFPLLEDEDDLFTDQKVKKNETKSNSQQDVILTTQDIFEDDIFATEAIKPSQKTREKEKTLESNLFDDNIDIFADLTVKPKEKSKKKVEAKSIFDDDMDDIFSSGIQAKTTKPKSRSAQAAPEPRFEHKVSNIFDDPLNAFGGQ

SEQ ID NO: 6679 - protein, 234 aa, Homo sapiens
MHIPKSLQELANSEAVQFLRRPKTITRVFEGVFSLIVFSSLLTDGYQNKMESPQLHCILNSNSVACSFAVGAGFLAFLSCLAFLVLDTQETRIAGTRFKTAFQLLDFILAVLWAVVWFMGFCFLANQWQHSPPKEFLLGSSSAQAAIAFTFFSILVWIFQAYLAFQDLRNDAPVPYKRFLDEGGMVLTTLPLPSANSPVNMPTTGPNSLSYASSALSPCLTAPKSPRLAMMPDN

SEQ ID NO: 6680 - protein, 1153 aa, Homo sapiens
MALKMVKGSIDRMFDKNLQDLVRGIRNHKEDEAKYISQCIDEIKQELKQDNIAVKANAVCKLTYLQMLGYDISWAAFNIIEVMSASKFTFKRIGYLAASQSFHEGTDVIMLTTNQIRKDLSSPSQYDTGVALTGLSCFVTPDLARDLANDIMTLMSHTKPYIRKKAVLIMYKVFLKYPESLRPAFPRLKEKLEDPDPGVQSAAVNVICELARRNPKNYLSLAPLFFKLMTSSTNNWVLIKIIKLFGALTPLEPRLGKKLIEPLTNLIHSTSAMSLLYECVNTVIAVLISLSSGMPNHSASIQLCVQKLRILIEDSDQNLKYLGLLAMSKILKTHPKSVQSHKDLILQCLDDKDESIRLRALDLLYGMVSKKNLMEIVKKLMTHVDKAEGTTYRDELLTKIIDICSQSNYQYITNFEWYISILVELTRLEGTRHGHLIAAQMLDVAIRVKAIRKFAVSQMSALLDSAHLLASSTQRNGICEVLYAAAWICGEFSEHLQEPHHTLEAMLRPRVTTLPGHIQAVYVQNVVKLYASILQQKEQAGEAEGAQAVTQLMVDRLPQFVQSADLEVQERASCILQLVKHIQKLQAKDVPVAEEVSALFAGELNPVAPKAQKKVPVPEGLDLDAWINEPLSDSESEDERPRAVFHEEEQRRPKHRPSEADEEELARRREARKQEQANNPFYIKSSPSPQKRYQDTPGVEHIPVVQIDLSVPLKVPGLPMSDQYVKLEEERRHRQKLEKDKRRKKRKEKEKKGKRRHSSLPTESDEDIAPAQQVDIVTEEMPENALPSDEDDKDPNDPYRALDIDLDKPLADSEKLPIQKHRNTETSKSPEKDVPMVEKKSKKPKKKEKKHKEKERDKEKKKEKEKKKSPKPKKKKHRKEKEERTKGKKKSKKQPPGSEEAAGEPVQNGAPEEEQLPPESSYSLLAENSYVKMTCDIRGSLQEDSQVTVAIVLENRSSSILKGMELSVLDSLNARMARPQGSSVHDGVPVPFQLPPGVSNEAQYVFTIQSIVMAQKLKGTLSFIAKNDEGATHEKLDFRLHFSCSSYLITTPCYSDAFAKLLESGDLSMSSIKVDGIRMSFQNLLAKICFHHHFSVVERVDSCASMYSRSIQGHHVCLLVKKGENSVSVDGKCSDSTLLSNLLEEMKATLAKC

SEQ ID NO: 6681 - protein, 437 aa, Homo sapiens
MQGAQEASASEMLPLLLPLLWAGALAQERRFQLEGPESLTVQEGLCVLVPCRLPTTLPASYYGYGYWFLEGADVPVATNDPDEEVQEETRGRFHLLWDPRRKNCSLSIRDARRRDNAAYFFRLKSKWMKYGYTSSKLSVRVMALTHRPNISIPGTLESGHPSNLTCSVPWVCEQGTPPIFSWMSAAPTSLGPRTTQSSVLTITPRPQDHSTNLTCQVTFPGAGVTMERTIQLNVSSFKILQNTSSLPVLEGQALRLLCDADGNPPAHLSWFQGFPALNATPISNTGVLELPQVGSAEEGDFTCRAQHPLGSLQISLSLFVHWKPEGRAGGVLGAVWGASITTLVFLCVCFIFRVKTRRKKAAQPVQNTDDVNPVMVSGSRGHQHQFQTGIVSDHPAEAGPISEDEQELHYAVLHFHKVQPQEPKVTDTEYSEIKIHK

SEQ ID NO: 6682 - protein, 366 aa, Homo sapiens
MARERPPGRGCGVLRRCLLGAVLLFGLRLCAELRRAGPGSPTRSAPPGPAWRPPGPHLPPAPGQPRGASRRQVTYVRSGRRAPPGGGGSGTPEPGCCAPRGRPRRKGPRWHIDLQPWAGSAQSLDEEAWRFLRYISTTQIACNHMNTDSLATDSSPTHKPWSVCLDDRFNLAHQIRNKQCRLYSLGLGSDDTHFEVSMANNGCEVHRFDPSVKSAHILESQHLWYHRLSIDWRDPHPAVAAQKPHSNTRKLGSILNEFGHHKIDVLKADLESAEWKVLENLILEDVLEQIGQLIFEIHLHWPGFEVSGSDSSVVRFWYSLLKELEQKDFRLFHSYKDLSKPQLFLKKDIFNASSCYTLSWVNTRWK

SEQ ID NO: 6683 - protein, 1040 aa, Homo sapiens
MVSSAQMGFNLQALLEQLSQDELSKFKYLITTFSLAHELQKIPHKEVDKADGKQLVEILTTHCDSYWVEMASLQVFEKMHRMDLSERAKDEVREAALKSFNKRKPLSLGITRKERPPLDVDEMLERFKTEAQDKDNRCRYILKTKFREMWKSWPGDSKEVQVMAERYKMLIPFSNPRVLPGPFSYTVVLYGPAGLGKTTLAQKLMLDWAEDNLIHKFKYAFYLSCRELSRLGPCSFAELVFRDWPELQDDIPHILAQARKILFVIDGFDELGAAPGALIEDICGDWEKKKPVPVLLGSLLNRVMLPKAALLVTTRPRALRDLRILAEEPIYIRVEGFLEEDRRAYFLRHFGDEDQAMRAFELMRSNAALFQLGSAPAVCWIVCTTLKLQMEKGEDPVPTCLTRTGLFLRFLCSRFPQGAQLRGALRTLSLLAAQGLWAQTSVLHREDLERLGVQESDLRLFLDGDILRQDRVSKGCYSFIHLSFQQFLTALFYTLEKEEEEDRDGHTWDIGDVQKLLSGVERLRNPDLIQAGYYSFGLANEKRAKELEATFGCRMSPDIKQELLRCDISCKGGHSTVTDLQELLGCLYESQEEELVKEVMAQFKEISLHLNAVDVVPSSFCVKHCRNLQKMSLQVIKENLPENVTASESDAEVERSQDDQHMLPFWTDLCSIFGSNKDLMGLAINDSFLSASLVRILCEQIASDTCHLQRVVFKNISPADAHRNLCLALRGHKTVTYLTLQGNDQDDMFPALCEVLRHPECNLRYLGLVSCSATTQQWADLSLALEVNQSLTCVNLSDNELLDEGAKLLYTTLRHPKCFLQRLSLENCHLTEANCKDLAAVLVVSRELTHLCLAKNPIGNTGVKFLCEGLRYPECKLQTLVLWNCDITSDGCCDLTKLLQEKSSLLCLDLGLNHIGVKGMKFLCEALRKPLCNLRCLWLWGCSIPPFSCEDLCSALSCNQSLVTLDLGQNPLGSSGVKMLFETLTCSSGTLRTLRLKIDDFNDELNKLLEEIEEKNPQLIIDTEKHHPWAERPSSHDFMI

SEQ ID NO: 6684 - protein, 1259 aa, Homo sapiens
MDGPTRGHGLRKKRRSRSQRDRERRSRGGLGAGAAGGGGAGRTRALSLASSSGSDKEDNGKPPSSAPSRPRPPRRKRRESTSAEEDIIDGFAMTSFVTFEALEKDVALKPQERVEKRQTPLTKKKREALTNGLSFHSKKSRLSHPHHYSSDRENDRNLCQHLGKRKKMPKALRQLKPGQNSCRDSDSESASGESKGFHRSSSRERLSDSSAPSSLGTGYFCDSDSDQEEKASDASSEKLFNTVIVNKDPELGVGTLPEHDSQDAGPIVPKISGLERSQEKSQDCCKEPIFEPVVLKDPCPQVAQPIPQPQTEPQLRAPSPDPDLVQRTEAPPQPPPLSTQPPQGPPEAQLQPAPQPQVQRPPRPQSPTQLLHQNLPPVQAHPSAQSLSQPLSAYNSSSLSLNSLSSSRSSTPAKTQPAPPHISHHPSASPFPLSLPNHSPLHSFTPTLQPPAHSHHPNMFAPPTALPPPPPLTSGSLQVAGHPAGSTYSEQDILRQELNTRFLASQSADRGASLGPPPYLRTEFHQHQHQHQHTHQHTHQHTFTPFPHAIPPTAIMPTPAPPMFDKYPTKVDPFYRHSLFHSYPPAVSGIPPMIPPTGPFGSLQGAFQPKTSNPIDVAARPGTVPHTLLQKDPRLTDPFRPMLRKPGKWCAMHVHIAWQIYHHQQKVKKQMQSDPHKLDFGLKPEFLSRPPGPSLFGAIHHPHDLARPSTLFSAAGAAHPTGTPFGPPPHHSNFLNPAAHLEPFNRPSTFTGLAAVGGNAFGGLGNPSVTPNSMFGHKDGPSVQNFSNPHEPWNRLHRTPPSFPTPPPWLKPGELERSASAAAHDRDRDVDKRDSSVSKDDKERESVEKRHSSHPSPAPVLPVNALGHTRSSTEQIRAHLNTEAREKDKPKERERDHSESRKDLAADEHKAKEGHLPEKDGHGHEGRAAGEEAKQLARVPSPYVRTPVVESARPNSTSSREAEPRKGEPAYENPKKSSEVKVKEERKEDHDLPPEAPQTHRASEPPPPNSSSSVHPGPLASMPMTVGVTGIHPMNSISSLDRTRMMTPFMGISPLPGGERFPYPSFHWDPIRDPLRDPYRELDIHRRDPLGRDFLLRNDPLHRLSTPRLYEADRSFRDREPHDYSHHHHHHHHPLSVDPRREHERGGHLDERERLHMLREDYEHTRLHSVHPASLDGHLPHPSLITPGLPSMHYPRISPTAGNQNGLLNKTPPTAALSAPPPLISTLGGRPVSPRRTTPLSAEIRERPPSHTLKDIEAR

SEQ ID NO: 6685 - protein, 515 aa, Homo sapiens
MESLGLHTVTLSDGTTAYVQQAVKGEKLLEGQVIQLEDGTTAYIHQVTVQKEALSFEDGQPVQLEDGSMAYIHRTPREGYDPSTLEAVQLEDGSTAYIHHPVAVPSESTILAVQTEVGLEDLAAEDDEGFSADAVVALEQYASKVLHDSQIPRNGKGQQVGDRAFRCGYKGCGRLYTTAHHLKVHERAHTGDRPYRCDFPSCGKAFATGYGLKSHVRTHTGEKPYKCPEELCSKAFKTSGDLQKHVRTHTGERPFQCPFEGCGRSFTTSNIRKVHVRTHTGERPYTCPEPHCGRGFTSATNYKNHVRIHTGEKPYVCTVPGCGKRFTEYSSLYKHHVVHTHCKPYTCSTCGKTYRQTSTLAMHKRSAHGELEATEESEQALYEQQQLEAASAAEESPPPKRPRIAYLSEVKEERDDIPAQVAMVTEEDGAPQVALITQDGAQQVTIITSGAVVAEDSSVASLRHQQVALLATANGTHIAVQLEEQQTLEEAINVATAAMQQGAVTLETTVSESGC

SEQ ID NO: 6686 - protein, 317 aa, Homo sapiens
MDQYNHSSLAEFVFLGFASVGYVRGWLFVLLLLAYLFTICGNMLIFSVIRLDAALHTPMYHFVSVLSFLELWYTATTIPKMLSNILSEKKTISFAGCLLQTYFFHSLGASECYLLTAMAYDRYLAICRPLHYPIIMTTTLCAKMAAACWTCGFLCPISEVILASQLPFCAYNEIQHIFCDFPPLLSLACKDTSANILVDFAINAFIILITFFFIMISYARIIGAVLKIKTASGRKKAFSTCASHLAVVLIFFGSIIFMYVRLKKSYSLTLDRTLAIVYSVLTPMVNPIIYSLRNKEIIKAIKRTIFQKGDKASLAHL

SEQ ID NO: 6687 - protein, 1013 aa, Homo sapiens
MAEPSAATQSHSISSSSFGAEPSAPGGGGSPGACPALGTKSCSSSCAEGLSSLCSDEPSSEIMTSSFLSSSEIHNTGLTILHGEKSHVLGSQPILAKEGKDHLDLLDMKKMEKPQGTSNNVSDSSVSLAAGVHCDRPSIPASFPEHPAFLSKKIGQVEEQIDKETKNPNGVSSREAKTALDADDRFTLLTAQKPPTEYSKVEGIYTYSLSPSKVSGDDVIEKDSPESPFEVIIDKAAFDKEFKDSYKESTDDFGSWSVHTDKESSEDISETNDKLFPLRNKEAGRYPMSALLSRQFSHTNAALEEVSRCVNDMHNFTNEILTWDLVPQVKQQTDKSSDCITKTTGLDMSEYNSEIPVVNLKTSTHQKTPVCSIDGSTPITKSTGDWAEASLQQENAITGKPVPDSLNSTKEFSIKGVQGNMQKQDDTLAELPGSPPEKCDSLGSGVATVKVVLPDDHLKDEMDWQSSALGEITEADSSGESDDTVIEDITADTSFENNKIQAEKPVSIPSAVVKTGEREIKEIPSCEREEKTSKNFEELVSDSELHQDQPDILGRSPASEAACSKVPDTNVSLEDVSEVAPEKPITTENPKLPSTVSPNVFNETEFSLNVTTSAYLESLHGKNVKHIDDSSPEDLIAAFTETRDKGIVDSERNAFKAISEKMTDFKTTPPVEVLHENESGGSEIKDIGSKYSEQSKETNGSEPLGVFPTQGTPVASLDLEQEQLTIKALKELGERQVEKSTSAQRDAELPSEEVLKQTFTFAPESWPQRSYDILERNVKNGSDLGISQKPITIRETTRVDAVSSLSKTELVKKHVLARLLTDFSVHDLIFWRDVKKTGFVFGTTLIMLLSLAAFSVISVVSYLILALLSVTISFRIYKSVIQAVQKSEEGHPFKAYLDVDITLSSEAFHNYMNAAMVHINRALKLIIRLFLVEDLVDSLKLAVFMWLMTYVGAVFNGITLLILAELLIFSVPIVYEKYKTQIDHYVGIARDQTKSIVEKIQAKLPGIAKKKAE

SEQ ID NO: 6688 - protein, 784 aa, Homo sapiens
MQRLMMLLATSGACLGLLAVAAVAAAGANPAQRDTHSLLPTHRRQKRDWIWNQMHIDEEKNTSLPHHVGKIKSSVSRKNAKYLLKGEYVGKVFRVDAETGDVFAIERLDRENISEYHLTAVIVDKDTGENLETPSSFTIKVHDVNDNWPVFTHRLFNASVPESSAVGTSVISVTAVDADDPTVGDHASVMYQILKGKEYFAIDNSGRIITITKSLDREKQARYEIVVEARDAQGLRGDSGTATVLVTLQDINDNFPFFTQTKYTFVVPEDTRVGTSVGSLFVEDPDEPQNRMTKYSILRGDYQDAFTIETNPAHNEGIIKPMKPLDYEYIQQYSFIVEATDPTIDLRYMSPPAGNRAQVIINITDVDEPPIFQQPFYHFQLKENQKKPLIGTVLAMDPDAARHSIGYSIRRTSDKGQFFRVTKKGDIYNEKELDREVYPWYNLTVEAKELDSTGTPTGKESIVQVHIEVLDENDNAPEFAKPYQPKVCENAVHGQLVLQISAIDKDITPRNVKFKFILNTENNFTLTDNHDNTANITVKYGQFDREHTKVHFLPVVISDNGMPSRTGTSTLTVAVCKCNEQGEFTFCEDMAAQVGVSIQAVVAILLCILTITVITLLIFLRRRLRKQARAHGKSVPEIHEQLVTYDEEGGGEMDTTSYDVSVLNSVRRGGAKPPRPALDARPSLYAQVQKPPRHAPGAHGGPGEMAAMIEVKKDEADHDGDGPPYDTLHIYGYEGSESIAESLSSLGTDSSDSDVDYDFLNDWGPRFKMLAELYGSDPREELLY

SEQ ID NO: 6689 - protein, 493 aa, Homo sapiens
FLRTCYGGSFLVHESFLYKREKAVGDKVYWTCRDHALHGCRSRAITQGQRVTVMRGHCHQPDMEGLEARRQQEKAVETLQAGQDGPGSQVDTLLRGVDSLLYRRGPGPLTLTRPRPRKRAKVEDQELPTQPEAPDEHQDMDADPGGPEFLKTPLGGSFLVYESFLYRREKAAGEKVYWTCRDQARMGCRSRAITQGRRVTVMRGHCHPPDLGGLEALRQREKRPNTAQRGSPGAGLSFQWLFRILQLLGHAPVLLCPSGSSCLPSLPAPHGPCPALSIPLEGGPEFLKTPLGGSFLVYESFLYRREKAAGEKVYWTCRDQARMGCRSRAITQGRRVMVMRRHCHPPDLGGLEALRQREHFPNLAQWDSPDPLRPLEFLRTSLGGRFLVHESFLYRKEKAAGEKVYWMCRDQARLGCRSRAITQGHRIMVMRSHCHQPDLAGLEALRQRERLPTTAQQEDPEKIQVQLCFKTCSPESQQIYGDIKDVRLDGESQ

SEQ ID NO: 6690 - protein, 568 aa, Homo sapiens
MAQVDSQDRWGEASPLSSLTEEAHDTQMLSMNLESDDEDGGEAEKEGTADPVACPRGSSPVTHENPDLPWPHPLGKEEEKFSDSSSAGGMGQKPVEMSGKASWSRDVTKINETQGSPGASRALGSLPSGLAHKLLGQMQPLGDRLPAGDDGYSGANQDAVLDVPPSFPSNGKYLCAHKSVDTSAGNSSLLCFPRPGSNWDLPTQETHTPAQASATPASLAAAVLAKARNSRKVQNQAGRREGGEAEARPYRCLRGGRAFQKPSKPLSPAETRGGAAKRYACELCGKAYSHRGTLQQHRRLHTGERPYQCSFCDKAYTWSSDHRKHIRTHTGEKPYPCPDCGKAFVRSSDLRKHQRNMHSNNKPFPCSECGLTFNKPLSLLRHQRTHLGAKPFRCPACDREFAVASRMVEHQRVHSGERPFPCPTCGKCFTKSSNLSEHQTLHTGQRPFKCADCGVAFAQPSRLVRHQRIHTGERPFPCTQCGQAFARSSTLKRHQQIHSGEKGFLCAECGRAFRIASELAQHIRMHNGERPYQCEDCGQAFTRSNHLQRHRAKHGTCKKEPIPSSSDE

SEQ ID NO: 6691 - protein, 735 aa, Homo sapiens
MTAGSSYPLFLAAYACTGCLAERLGWFIKSSNEATNITPKHNMKAFLDELKAENIKKFLYNFTQIPHLAGTEQNFQLAKQIQSQWKEFGLDSVELAHYDVLLSYPNKTHPNYISIINEDGNEIFNTSLFEPPPPGYENVSDIVPPFSAFSPQGMPEGDLVYVNYARTEDFFKLERDMKINCSGKIVIARYGKVFRGNKVKNAQLAGAKGVILYSDPADYFAPGVKSYPDGWNLPGGGVQRGNILNLNGAGDPLTPGYPANEYAYRRGIAEAVGLPSIPVHPIGYYDAQKLLEKMGGSAPPDSSWRGSLKVPYNVGPGFTGNFSTQKVKMHIHSTNEVTRIYNVIGTLRGAVEPDRYVILGGHRDSWVFGGIDPQSGAAVVHEIVRSFGTLKKEGWRPRRTILFASWDAEEFGLLGSTEWAEENSRLLQERGVAYINADSSIEGNYTLRVDCTPLMYSLVHNLTKELKSPDEGFEGKSLYESWTKKSPSPEFSGMPRISKLGSGNDFEVFFQRLGIASGRARYTKNWETNKFSGYPLYHSVYETYELVEKFYDPMFKYHLTVAQVRGGMVFELANSIVLPFDCRDYAVVLRKYADKIYSISMKHPQEMKTYSVSFDSLFSAVKNFTEIASKFSERLQDFDKSNPIVLRMMNDQLMFLERAFIDPLGLPDRPFYRHVIYAPSSHNKYAGESFPGIYDALFDIESKVDPSKAWGEVKRQIYVAAFTVQAAAETLSEVA

SEQ ID NO: 6692 - protein, 425 aa, Homo sapiens
MMGKLPLGVVSPYVKMSSGGYTDPLKFYATSYCTAYGREDFKPRVGSHVGTGYKSNFQPVVSCQASLEALDNPARGEQAQDHFQSVASQSYRPLEVPDGKHPLPWSMRQTSSGYGREKPSAGPPTKEVRKVHFDTQEHGPQAITGLEPREVPLLHQQQGQDPLERENFRHGPRFMTSEYNSKYLRDPLDQPDFLQKKSIGAKEGSGFTKQSHQSPIVFQPPSQALPGDPALLPGQSVTKSDFLPKTHLHGDEFLPVLARGSKRETAFSRGNERILNPRVPPPCPEPSSVSHQQFQPLHRMQQTNVALLGRETVGKKEPTGFSLNNPMYVRSPCDPDRDQRYLTTYNQGYFENIPKGLDQEGWTRGGIQPQMPGGYALSQPVSCMEATPNPMESLRHLHPHVGRTLTSADPFYQNTPHSSRCVAHS

SEQ ID NO: 6693 - protein, 930 aa, Homo sapiens
MPRAPHFMPLLLLLLLLSLPHTQAAFPQDPLPLLISDLQGTSPLSWFRGLEDDAVAAELGLDFQRFLTLNRTLLVAARDHVFSFDLQAEEEGEGLVPNKYLTWRSQDVENCAVRGKLTDECYNYIRVLVPWDSQTLLACGTNSFSPVCRSYGITSLQQEGEELSGQARCPFDATQSNVAIFAEGSLYSATAADFQASDAVVYRSLGPQPPLRSAKYDSKWLREPHFVQALEHGDHVYFFFREVSVEDARLGRVQFSRVARVCKRDMGGSPRALDRHWTSFLKLRLNCSVPGDSTFYFDVLQALTGPVNLHGRSALFGVFTTQTNSIPGSAVCAFYLDEIERGFEGKFKEQRSLDGAWTPVSEDRVPSPRPGSCAGVGGAALFSSSRDLPDDVLTFIKAHPLLDPAVPPVTHQPLLTLTSRALLTQVAVDGMAGPHSNITVMFLGSNDGTVLKVLTPGGRSGGPEPILLEEIDAYSPARCSGKRTAQTARRIIGLELDTEGHRLFVAFSGCIVYLPLSRCARHGACQRSCLASQDPYCGWHSSRGCVDIRGSGGTDVDQAGNQESMEHGDCQDGATGSQSGPGDSAYGVRRDLPPASASRSVPIPLLLASVAAAFALGASVSGLLVSCACRRAHRRRGKDIETPGLPRPLSLRSLARLHGGGPEPPPPSKDGDAVQTPQLYTTFLPPPEGVPPPELACLPTPESTPELPVKHLRAAGDPWEWNQNRNNAKEGPGRSRGGHAAGGPAPRVLVRPPPPGCPGQAVEVTTLEELLRYLHGPQPPRKGAEPPAPLTSRALPPEPAPALLGGPSPRPHECASPLRLDVPPEGRCASAPARPALSAPAPRLGVGGGRRLPFSGHRAPPALLTRVPSGGPSRYSGGPGKHLLYLGRPEGYRGRALKRVDVEKPQLSLKPPLVGPSSRQAVPNGGRFNF

SEQ ID NO: 6694 - protein, 2436 aa, Homo sapiens
MGFLHQLQLLLWKNVTLKRRSPWVLAFEIFIPLVLFFILLGLRQKKPTISVKEVSFYTAAPLTSAGILPVMQSLCPDGQRDEFGFLQYANSTVTQLLERLDRVVEEGNLFDPARPSLGSELEALRQHLEALSAGPGTSGSHLDRSTVSSFSLDSVARNPQELWRFLTQNLSLPNSTAQALLAARVDPPEVYHLLFGPSSALDSQSGLHKGQEPWSRLGGNPLFRMEELLLAPALLEQLTCTPGSGELGRILTVPESQKGALQGYRDAVCSGQAAARARRFSGLSAELRNQLDVAKVSQQLGLDAPNGSDSSPQAPPPRRLQALLGDLLDAQKVLQDVDVLSALALLLPQGACTGRTPGPPASGAGGAANGTGAGAVMGPNATAEEGAPSAAALATPDTLQGQCSAFVQLWAGLQPILCGNNRTIEPEALRRGNMSSLGFTSKEQRNLGLLVHLMTSNPKILYAPAGSEVDRVILKANETFAFVGNVTHYAQVWLNISAEIRSFLEQGRLQQHLRWLQQYVAELRLHPEALNLSLDELPPALRQDNFSLPSGMALLQQLDTIDNAACGWIQFMSKVSVDIFKGFPDEESIVNYTLNQAYQDNVTVFASVIFQTRKDGSLPPHVHYKIRQNSSFTEKTNEIRRAYWRPGPNTGGRFYFLYGFVWIQDMMERAIIDTFVGHDVVEPGSYVQMFPYPCYTRDDFLFVIEHMMPLCMVISWVYSVAMTIQHIVAEKEHRLKEVMKTMGLNNAVHWVAWFITGFVQLSISVTALTAILKYGQVLMHSHVVIIWLFLAVYAVATIMFCFLVSVLYSKAKLASACGGIIYFLSYVPYMYVAIREEVAHDKITAFEKCIASLMSTTAFGLGSKYFALYEVAGVGIQWHTFSQSPVEGDDFNLLLAVTMLMVDAVVYGILTWYIEAVHPGMYGLPRPWYFPLQKSYWLGSGRTEAWEWSWPWARTPRLSVMEEDQACAMESRRFEETRGMEEEPTHLPLVVCVDKLTKVYKDDKKLALNKLSLNLYENQVVSFLGHNGAGKTTTMSILTGLFPPTSGSATIYGHDIRTEMDEIRKNLGMCPQHNVLFDRLTVEEHLWFYSRLKSMAQEEIRREMDKMIEDLELSNKRHSLVQTLSGGMKRKLSVAIAFVGGSRAIILDEPTAGVDPYARRAIWDLILKYKPGRTILLSTHHMDEADLLGDRIAIISHGKLKCCGSPLFLKGTYGDGYRLTLVKRPAEPGGPQEPGLASSPPGRAPLSSCSELQVSQFIRKHVASCLLVSDTSTELSYILPSEAAKKGAFERLFQHLERSLDALHLSSFGLMDTTLEEVFLKVSEEDQSLENSEADVKESRKDVLPGAEGPASGEGHAGNLARCSELTQSQASLQSASSVGSARGDEGAGYTDVYGDYRPLFDNPQDPDNVSLQEVEAEALSRVGQGSRKLDGGWLKVRQFHGLLVKRFHCARRNSKALFSQILLPAFFVCVAMTVALSVPEIGDLPPLVLSPSQYHNYTQPRGNFIPYANEERREYRLRLSPDASPQQLVSTFRLPSGVGATCVLKSPANGSLGPTLNLSSGESRLLAARFFDSMCLESFTQGLPLSNFVPPPPSPAPSDSPASPDEDLQAWNVSLPPTAGPEMWTSAPSLPRLVREPVRCTCSAQGTGFSCPSSVGGHPPQMRVVTGDILTDITGHNVSEYLLFTSDRFRLHRYGAITFGNVLKSIPASFGTRAPPMVRKIAVRRAAQVFYNNKGYHSMPTYLNSLNNAILRANLPKSKGNPAAYGITVTNHPMNKTSASLSLDYLLQGTDVVIAIFIIVAMSFVPASFVVFLVAEKSTKAKHLQFVSGCNPIIYWLANYVWDMLNYLVPATCCVIILFVFDLPAYTSPTNFPAVLSLFLLYGWSITPIMYPASFWFEVPSSAYVFLIVINLFIGITATVATFLLQLFEHDKDLKVVNSYLKSCFLIFPNYNLGHGLMEMAYNEYINEYYAKIGQFDKMKSPFEWDIVTRGLVAMAVEGVVGFLLTIMCQYNFLRRPQRMPVSTKPVEDDVDVASERQRVLRGDADNDMVKIENLTKVYKSRKIGRILAVDRLCLGVRPGECFGLLGVNGAGKTSTFKMLTGDESTTGGEAFVNGHSVLKELLQVQQSLGYCPQCDALFDELTAREHLQLYTRLRGISWKDEARVVKWALEKLELTKYADKPAGTYSGGNKRKLSTAIALIGYPAFIFLDEPTTGMDPKARRFLWNLILDLIKTGRSVVLTSHSMEECEALCTRLAIMVNGRLRCLGSIQHLKNRFGDGYMITVRTKSSQSVKDVVRFFNRNFPEAMLKERHHTKVQYQLKSEHISLAQVFSKMEQVSGVLGIEDYSVSQTTLDNVFVNFAKKQSDNLEQQETEPPSALQSPLGCLLSLLRPRSAPTELRALVADEPEDLDTEDEGLISFEEERAQLSFNTDTLC

SEQ ID NO: 6695 - protein, 540 aa, Homo sapiens
MDSVAFEDVDVNFTQEEWALLDPSQKNLYRDVMWETMRNLASIGKKWKDQNIKDHYKHRGRNLRSHMLERLYQTKDGSQRGGIFSQFANQNLSKKIPGVKLCESIVYGEVSMGQSSLNRHIKDHSGHEPKEYQEYGEKPDTRNQCWKPFSSHHSFRTHEIIHTGEKLYDCKECGKTFFSLKRIRRHIITHSGYTPYKCKVCGKAFDYPSRFRTHERSHTGEKPYECQECGKAFTCITSVRRHMIKHTGDGPYKCKVCGKPFHSLSSFQVHERIHTGEKPFKCKQCGKAFSCSPTLRIHERTHTGEKPYECKQCGKAFSYLPSLRLHERIHTGEKPFVCKQCGKAFRSASTFQIHERTHTGEKPYECKECGEAFSCIPSMRRHMIKHTGEGPYKCKVCGKPFHSLSPFRIHERTHTGEKPYVCKHCGKAFVSSTSIRIHERTHTGEKPYECKQCGKAFSYLNSFRTHEMIHTGEKPFECKRCGKAFRSSSSFRLHERTHTGQKPYHCKECGKAYSCRASFQRHMLTHAEDGPPYKCMWESL

SEQ ID NO: 6696 - protein, 908 aa, Homo sapiens
MVCEGKRSASCPCFFLLTAKFYWILTMMQRTHSQEYAHSIRVDGDIILGGLFPVHAKGERGVPCGELKKEKGIHRLEAMLYAIDQINKDPDLLSNITLGVRILDTCSRDTYALEQSLTFVQALIEKDASDVKCANGDPPIFTKPDKISGVIGAAASSVSIMVANILRLFKIPQISYASTAPELSDNTRYDFFSRVVPPDSYQAQAMVDIVTALGWNYVSTLASEGNYGESGVEAFTQISREIGGVCIAQSQKIPREPRPGEFEKIIKRLLETPNARAVIMFANEDDIRRILEAAKKLNQSGHFLWIGSDSWGSKIAPVYQQEEIAEGAVTILPKRASIDGFDRYFRSRTLANNRRNVWFAEFWEENFGCKLGSHGKRNSHIKKCTGLERIARDSSYEQEGKVQFVIDAVYSMAYALHNMHKDLCPGYIGLCPRMSTIDGKELLGYIRAVNFNGSAGTPVTFNENGDAPGRYDIFQYQITNKSTEYKVIGHWTNQLHLKVEDMQWAHREHTHPASVCSLPCKPGERKKTVKGVPCCWHCERCEGYNYQVDELSCELCPLDQRPNMNRTGCQLIPIIKLEWHSPWAVVPVFVAILGIIATTFVIVTFVRYNDTPIVRASGRELSYVLLTGIFLCYSITFLMIAAPDTIICSFRRVFLGLGMCFSYAALLTKTNRIHRIFEQGKKSVTAPKFISPASQLVITFSLISVQLLGVFVWFVVDPPHIIIDYGEQRTLDPEKARGVLKCDISDLSLICSLGYSILLMVTCTVYAIKTRGVPETFNEAKPIGFTMYTTCIIWLAFIPIFFGTAQSAEKMYIQTTTLTVSMSLSASVSLGMLYMPKVYIIIFHPEQNVQKRKRSFKAVVTAATMQSKLIQKGNDRPNGEVKSELCESLETNTSSTKTTYISYSNHSI

SEQ ID NO: 6697 - protein, 408 aa, Homo sapiens
MELSERYGPVFTVHLGRQKTVVLTGFEAVKEALAGPGQELADRPPIAIFQLIQRGGGIFFSSGARWRAARQFTVRALHSLGVGREPVADKILQELKCLSGQLDGYRGRPFPLALLGWAPSNITFALLFGRRFDYRDPVFVSLLGLIDEVMVLLGSPGLQLFNVYPWLGALLQLHRPVLRKIEEVRAILRTLLEARRPHVCPGDPVCSYVDALIQQGQGDDPEGLFAEANAVACTLDMVMAGTETTSATLQWAALLMGRHPDVQGRVQEELDRVLGPGRTPRLEDQQALPYTSAVLHEVQRFITLLPHVPRCTAADTQLGGFLLPKGTPVIPLLTSVLLDETQWQTPGQFNPGHFLDANGHFVKREAFLPFSAGQQPSGPGWGGTSRAPGVGRPQLRLPPLHPPPDLRF

SEQ ID NO: 6698 - protein, 402 aa, Homo sapiens
MIVPAAPYLPGLIQGNQEAAAAPDTMAQPYASAQFAPPQNGIPAEYTAPHPHPAPEYTGQTTVPEHTLNLYPPAQTHSEQSPADTSAQTVSGTATQTDDAAPTDGQPQTQPSENTENKSQPKRLHVSNIPFRFRDPDLRQMFGQFGKILDVEIIFNERGSKGFGFVTFENSADADRAREKLHGTVVEGRKIEVNNATARVMTNKKTVNPYTNGWKLNPVVGAVYSPEFYAGTVLLCQANQEGSSMYSAPSSLVYTSAMPGFPYPAATAAAAYRGAHLRGRGRTVYNTFRAAAPPPPIPAYGGVVYQDGFYGADIYGGYAAYRYAQPTPATAAAYSDSYGRVYAADPYHHALAPAPTYGVGAMNAFAPLTDAKTRSHADDVGLVLSSLQASIYRGGYNRFAPY

SEQ ID NO: 6699 - protein, 490 aa, Homo sapiens
MYHGMNPSNGDGFLEQQQQQQQPQSPQRLLAVILWFQLALCFGPAQLTGGFDDLQVCADPGIPENGFRTPSGGVFFEGSVARFHCQDGFKLKGATKRLCLKHFNGTLGWIPSDNSICVQEDCRIPQIEDAEIHNKTYRHGEKLIITCHEGFKIRYPDLHNMVSLCRDDGTWNNLPICQGCLRPLASSNGYVNISELQTSFPVGTVISYRCFPGFKLDGSAYLECLQNLIWSSSPPRCLALEVCPLPPMVSHGDFVCHPRPCERYNHGTVVEFYCDPGYSLTSDYKYITCQYGEWFPSYQVYCIKSEQTWPSTHETLLTTWKIVAFTATSVLLVLLLVILARMFQTKFKAHFPPRGPPRSSSSDPDFVVVDGVPVMLPSYDEAVSGGLSALGPGYMASVGQGCPLPVDDQSPPAYPGSGDTDTGPGESETCDSVSGSSELLQSLYSPPRCQESTHPASDNPDIIASTAEEVASTSPGIDIADEIPLMEEDP

SEQ ID NO: 6700 - protein, 1052 aa, Homo sapiens
MKLVNIWLLLLVVLLCGKKHLGDRLEKKSFEKAPCPGCSHLTLKVEFSSTVVEYEYIVAFNGYFTAKARNSFISSALKSSEVDNWRIIPRNNPSSDYPSDFEVIQIKEKQKAGLLTLEDHPNIKRVTPQRKVFRSLKYAESDPTVPCNETRWSQKWQSSRPLRRASLSLGSGFWHATGRHSSRRLLRAIPRQVAQTLQADVLWQMGYTGANVRVAVFDTGLSEKHPHFKNVKERTNWTNERTLDDGLGHGTFVAGVIASMRECQGFAPDAELHIFRVFTNNQVSYTSWFLDAFNYAILKKIDVLNLSIGGPDFMDHPFVDKVWELTANNVIMVSAIGNDGPLYGTLNNPADQMDVIGVGGIDFEDNIARFSSRGMTTWELPGGYGRMKPDIVTYGAGVRGSGVKGGCRALSGTSVASPVVAGAVTLLVSTVQKRELVNPASMKQALIASARRLPGVNMFEQGHGKLDLLRAYQILNSYKPQASLSPSYIDLTECPYMWPYCSQPIYYGGMPTVVNVTILNGMGVTGRIVDKPDWQPYLPQNGDNIEVAFSYSSVLWPWSGYLAISISVTKKAASWEGIAQGHVMITVASPAETESKNGAEQTSTVKLPIKVKIIPTPPRSKRVLWDQYHNLRYPPGYFPRDNLRMKNDPLDWNGDHIHTNFRDMYQHLRSMGYFVEVLGAPFTCFDASQYGTLLMVDSEEEYFPEEIAKLRRDVDNGLSLVIFSDWYNTSVMRKVKFYDENTRQWWMPDTGGANIPALNELLSVWNMGFSDGLYEGEFTLANHDMYYASGCSIAKFPEDGVVITQTFKDQGLEVLKQETAVVENVPILGLYQIPAEGGGRIVLYGDSNCLDDSHRQKDCFWLLDALLQYTSYGVTPPSLSHSGNRQRPPSGAGSVTPERMEGNHLHRYSKVLEAHLGDPKPRPLPACPRLSWAKPQPLNETAPSNLWKHQKLLSIDLDKVVLPNFRSNRPQVRPLSPGESGAWDIPGGIMPGRYNQEVGQTIPVFAFLGAMVVLAFFVVQINKAKSRPKRRKPRVKRPQLMQQVHPPKTPSV

SEQ ID NO: 6701 - protein, 656 aa, Homo sapiens
MEASYESESESESEAGPGTQRPGTGTVSAAVREHLRKLCLREFPCGAGSWNKSRFLPQTWRTWRELVPREEDVVSPGEETVEALLGLVRSRHSPWALLNNSNAEDSFLRELAIRNPLTITDTFFYSYFRSLRVIDKKVTLVDKDLLKFLKLEELVLSANRIKEVDATNLPPTLKVLELYGNEISSMECLCAHPPAGLQHLGLGHNKLLGPLESLYVTANHWPNLVSLDLGFNDLTDLQSMVTSLRTLRHLRLLVLQGNPLALVPYYRGLTIDSLAQLCVLDDITVSPNEKHLFRGLSLNGDLLAQEAQFVVTIGNIRGVLDTSVLDPEPRPEGPFITYNYYVTYDFVKDEEGEMNESAGVLAEIVKPSPSLELLVEESPEEVVEDVIEDIVEEVTEEVEGSLESEVEESGESELSVISGPSTILQMPRASAEELAKLRLRIDPRLCPSPGTVLFSTAHKPWAEVIPCSYEMQHSLRDLVPLKAFLLAGTTVTIVEEKILSWPVVLPAVDSPLSAKKGKGEKDKKGKEKDRTGKGEKEPAKEWKVLKKKKEPPKELRQDPPILQVLGRGLVILEPLLAGEPLVSTVCNFGVVRTLTSDRLTLARDSKKIKKVAKKEKPKAVIPIYEGDYHPEPLTVEVQIQLNQCRSAEEALRMFAV

SEQ ID NO: 6702 - protein, 441 aa, Homo sapiens
MRVVTIVILLCFCKAAELRKASPGSVRSRVNHGRAGGGRRGSNPVKRYAPGLPCDVYTYLHEKYLDCQERKLVYVLPGWPQDLLHMLLARNKIRTLKNNMFSKFKKLKSLDLQQNEISKIESEAFFGLNKLTTLLLQHNQIKVLTEEVFIYTPLLSYLRLYDNPWHCTCEIETLISMLQIPRNRNLGNYAKCESPQEQKNKKLRQIKSEQLCNEEEKEQLDPKPQVSGRPPVIKPEVDSTFCHNYVFPIQTLDCKRKELKKVPNNIPPDIVKLDLSYNKINQLRPKEFEDVHELKKLNLSSNGIEFIDPAAFLGLTHLEELDLSNNSLQNFDYGVLEDLYFLKLLWLRDNPWRCDYNIHYLYYWLKHHYNVHFNGLECKTPEEYKGWSVGKYIRSYYEECPKDKLPAYPESFDQDTEDDEWEKKHRDHTAKKQSVIITIVG

SEQ ID NO: 6703 - protein, 639 aa, Homo sapiens
MLLRKRYRHRPCRLQFLLLLLMLGCVLMMVAMLHPPHHTLHQTVTAQASKHSPEARYRLDFGESQDWVLEAEDEGEEYSPLEGLPPFISLREDQLLVAVALPQARRNQSQGRRGGSYRLIKQPRRQDKEAPKRDWGADEDGEVSEEEELTPFSLDPRGLQEALSARIPLQRALPEVRHPLCLQQHPQDSLPTASVILCFHDEAWSTLLRTVHSILDTVPRAFLKEIILVDDLSQQGQLKSALSEYVARLEGVKLLRSNKRLGAIRARMLGATRATGDVLVFMDAHCECHPGWLEPLLSRIAGDRSRVVSPVIDVIDWKTFQYYPSKDLQRGVLDWKLDFHWEPLPEHVRKALQSPISPIRSPVVPGEVVAMDRHYFQNTGAYDSLMSLRGGENLELSFKAWLCGGSVEILPCSRVGHIYQNQDSHSPLDQEATLRNRVRIAETWLGSFKETFYKHSPEAFSLSKAEKPDCMERLQLQRRLGCRTFHWFLANVYPELYPSEPRPSFSGKLHNTGLGLCADCQAEGDILGCPMVLAPCSDSRQQQYLQHTSRKEIHFGSPQHLCFAVRQEQVILQNCTEEGLAIHQQHWDFQENGMIVHILSGKCMEAVVQENNKDLYLRPCDGKARQQWRFDQINAVDER

SEQ ID NO: 6704 - protein, 1035 aa, Homo sapiens
MSTENVEGKPSNLGERGRARSSTFLRVVQPMFNHSIFTSAVSPAAERIRFILGEEDDSPAPPQLFTELDELLAVDGQEMEWKETARWIKFEEKVEQGGERWSKPHVATLSLHSLFELRTCMEKGSIMLDREASSLPQLVEMIVDHQIETGLLKPELKDKVTYTLLRKHRHQTKKSNLRSLADIGKTVSSASRMFTNPDNGSPAMTHRNLTSSSLNDISDKPEKDQLKNKFMKKLPRDAEASNVLVGEVDFLDTPFIAFVRLQQAVMLGALTEVPVPTRFLFILLGPKGKAKSYHEIGRAIATLMSDEVFHDIAYKAKDRHDLIAGIDEFLDEVIVLPPGEWDPAIRIEPPKSLPSSDKRKNMYSGGENVQMNGDTPHDGGHGGGGHGDCEELQRTGRFCGGLIKDIKRKAPFFASDFYDALNIQALSAILFIYLATVTNAITFGGLLGDATDNMQGVLESFLGTAVSGAIFCLFAGQPLTILSSTGPVLVFERLLFNFSKDNNFDYLEFRLWIGLWSAFLCLILVATDASFLVQYFTRFTEEGFSSLISFIFIYDAFKKMIKLADYYPINSNFKVGYNTLFSCTCVPPDPANISISNDTTLAPEYLPTMSSTDMYHNTTFDWAFLSKKECSKYGGNLVGNNCNFVPDITLMSFILFLGTYTSSMALKKFKTSPYFPTTARKLISDFAIILSILIFCVIDALVGVDTPKLIVPSEFKPTSPNRGWFVPPFGENPWWVCLAAAIPALLVTILIFMDQQITAVIVNRKEHKLKKGAGYHLDLFWVAILMVICSLMALPWYVAATVISIAHIDSLKMETETSAPGEQPKFLGVREQRVTGTLVFILTGLSVFMAPILKFIPMPVLYGVFLYMGVASLNGVQFMDRLKLLLMPLKHQPDFIYLRHVPLRRVHLFTFLQVLCLALLWILKSTVAAIIFPVMILALVAVRKGMDYLFSQHDLSFLDDVIPEKDKKKKEDEKKKKKKKGSLDSDNDDSDCPYSEKVPSIKIPMDIMEQQPFLSDSKPSDRERSPTFLERHTSC

SEQ ID NO: 6705 - protein, 349 aa, Homo sapiens
MHQDGISSMNQLGGLFVNGRPLPLDTRQQIVRLAVSGMRPCDISRILKVSNGCVSKILGRYYRTGVLEPKGIGGSKPRLATPPVVARIAQLKGECPALFAWEIQRQLCAEGLCTQDKTPSVSSINRVLRALQEDQGLPCTRLRSPAVLAPAVLTPHSGSETPRGTHPGTGHRNRTIFSPSQAEALEKEFQRGQYPDSVARGKLATATSLPEDTVRVWFSNRRAKWRRQEKLKWEMQLPGASQGLTVPRVAPGIISAQQSPGSVPTAALPALEPLGPSCYQLCWATAPERCLSDTPPKACLKPCWDCGSFLLPVIAPSCVDVAWPCLDASLAHHLIGGAGKATPTHFSHP

SEQ ID NO: 6706 - protein, 752 aa, Homo sapiens
MEFHRVAQAGVELLSSGDPPASASQSVGIIGVSHCTWHRNFQGNYISYIDGNVWKAYSWTEKLILRENNLTELHKDSFEGLLSLQYLILNHNPLTTVEDPYLFKLPALKYLDMGTTLVPLTTLKNILMMTVELEKLIVPSHMACCLCQFKNSIEAVCKTVKLHCNSACLTNTTHCPEEASVGNPEGAFMKVLQARKNYTSTELIIEPEEPSDSSGINLSGFGSEQLDTNDESDVTSTLSYILPYFSAVNLDVKSLLLPFIKLPTTGNSLAKIQTVGKNRQRLNRVLMGPRSIQKRHFKEVGRQSIRREQGAQASVENTAEEKRLGSPAPRELKQPHTQQGPEKLAGNAVYTKPSFTQEHKAAVSVLKPFSKGAPSTSSPAKALPQVRDRWKDLTHAISILESAKARVTNMKTSKPIVHSRKKYRFHKTRSRMTHRTPKVKKSPKVRKKSYLSRLMLSNRLPFSAAKSLINSPSQGAFSSLRDLSPQENPFLEVSAPSEHFIENNNTKDTTARNAFEENVFMENTNMPEGTISENTNYNHPPEADSAGTAFNLGPTVKQTETKWEYNNVGTDLSPEPKSFNYPLLSSPGDQFEIQLTQQLQSVIPNNNVRRLIAHVIRTLKMDCSGAHVQVTCAKLVSRTGHLMKLLSGQQEVKASKIEWDTDQWKTENYINESTEAQSEQKEKSLEFTKELPGYGYTKKLILALIVTGILTILIILLCLIEICCHRRSLQEDEEGFSRDSEAPTEEESEALP

SEQ ID NO: 6707 - protein, 1801 aa, Homo sapiens
MSDDIRKRFEFPNSLIQSQAVGHLIAAVLKENGFSEKIHQSTNQTPALNLLWEKCCSDNVVVRTACCEGLVALVAQDHAEFSYVLNGILNLIPSTRNTHGLIKAIMHLLQMQALKEGQGGEKNIQSIYTIRNHPHPLITVLEHRPDCWPVFLQQLTAFFQQCPERLEVSCIQIMAPFLWYLYCEPSQLQEYAKLRLALLKVLLQPQVLCDKDQPSILEQQILQLCCDIVPCLQVKDLIQTTEAMMFIEEVCLSLLRHPVFWKIQLTQMSLQLLCVSEVSLKITGECSSSIHLLEHSVELLKEDFPVELVIIGIALLLLQTPASQQKPILNLALKLLSVTEDQKIPKSSLLLVMPILQILSSTALEDCISVDEEGPSRQQLALNLLEMIQQECYRDDHQKLSYKLVCPVTSMYGTIFTAWRILEVMTDSSAASDWLASVESLLPITAVIPAPAFLLLAHLLVEDKGQNLHQILKVTTELAQADSSQVPNLIPVLMFKLGRPLEPILYNDILYTLPKLGVHKVCIGQILRIIQLLGTTPRLRAVTLRLLTSLWEKQDRVYPELQRFMAVSDVPSLSVGKEVQWEKLIAKAASIRDICKQRPYQHGADMLAAISQVLNECTKPDQATPAALVLQGLHALCQAEVVCIRSTWNALSPKLSCDTRPLILKTLSELFSLVPSLTVNTTEYENFKVQVLSFLWTHTQNKDPIVANAAYRSLANFSAGEHTILHLPEKIRPEIPIPEELDDDEDVEDVDLSVPGSCYLKLLSLTPPLVLPALEEFFTSLVKQEMVNMPRGIYHSALKGGARSDQGKTVAGIPNFILKMYETNKQPGLKPGLAGGMLFCYDVSMYQSKDGKPLNRLMASRGRSFKQTSLALVHEVHIQLSEWHRAIFLPQAWLAYMNRAYHAILQGRLGELELQLKHGKEEPEEVQYKKSTAWLWVRDMLTDEITKAAAKESPVVKGNALLALSSLAVVVSRHEASLSSDSDGLLEVQPNFLSMKEWVSMVLDTLLVIVDSHYQPRGQLLSWFYYKSYSGENTASAIARSAAATALSLLVPVFIISCKEKVEEILNMLTARLPGKPSADESQAVQIHMGLALGMFLSRLCEEKLSDISGQEMNLLLMKSLDALENCCFDTSLEYNTGCILGVGLVLSLMSHSSQMQSRVHVAALLRKLSAHVDDSGSQSRTFQEVLAYTLSCVCTSAFSAGIIEATEAEDVMNKLRLLVENSQQTSGFALALGNIVHGLSVCGHGKAEDLGSKLLPAWIRIVLTEGTPTMLCLAALHGMVALVGSEGDVMQLKSEAIQTSHFQGRLNEVIRTLTQVISVSGVIGLQSNAVWLLGHLHLSTLSSSQSRASVPTDYSYLPESSFIGAAIGFFITGGKKGPESVPPSLLKVVMKPIATVGESYQYPPVNWAALLSPLMRLNFGEEIQQLCLEIMVTQAQSSQNAAALLGLWVTPPLIHSLSLNTKRYLLISAPLWIKHISDEQILGFVENLMVAVFKAASPLGSPELCPSALHGLSQAMKLPSPAHHLWSLLSEATGKIFDLLPNKIRRKDLELYISIAKCLLEMTDDDANRIAQVTKSNIEKAAFVKLYLVSQGRFPLVNLTDMLSVAVQHREKEVLAWMILHSLYQARIVSHANTGVLKRMEWLLELMGYIRNVAYQSTSFHNTALDKALDFFLLIFATAVVAWADHTAPLLLGLSASWLPWHQENGPAGPVPSFLGRSPMHRVTLQEVLTLLPNSMALLLQKEPWKEQTQKFIDWLFSIMESPKEALSAQSRDLLKATLLSLRVLPEFKKKAVWTRAYGW

SEQ ID NO: 6708 - protein, 847 aa, Homo sapiens
MAQAIFEALEGMDNQTVLAVQSLLDGQGAVPDPTGQSVNAPPAIQPLDDEDVFLCGKCKKQFNSLPAFMTHKREQCQGNAPALATVSLATNSIYPPSAAPTAVQQAPTPANRQISTYITVPPSPLIQTLVQGNILVSDDVLMSAMSAFTSLDQPMPQGPPPVQSSLNMHSVPSYLTQPPPPPPPPPPLPPPPPPQPPPPPPQSLGPPGRPNPGGNGVVEVYSAAAPLAGSGTVEIQALGMQPYPPLEVPNQCVEPPVYPTPTVYSPGKQGFKPKGPNPAAPMTSATGGTVATFDSPATLKTRRAKAAGKPKAQKLKCSYCDKSFTKNFDLQQHIRSHTGEKPFQCIACGRAFAQKSNVKKHMQTHKVWPPGHSGGTVSRNSVTVQVMALNPSRQEDEESTGLGQPLPGAPQPQALSTAGEEEGDKPESKQVVLIDSSYLCQFCPSKFSTYFQLKSHMTQHKNEQVYKCVVKSCAQTFPKLDTFLEHIKSHQEELSYRCHLCGKDFPSLYDLGVHQYSHSLLPQHSPKKDNAVYKCVKCVNKYSTPEALEHHLQTATHNFPCPHCQKVFPCERYLRRHLPTHGSGGRFKCQVCKKFFRREHYLKLHAHIHSGEKPYKCSVCESAFNRKDKLKRHMLIHEPFKKYKCPFSTHTGCSKEFNRPDKLKAHILSHSGMKLHKCALCSKSFSRRAHLAEHQRAHTGNYKFRCAGCAKGFSRHKYLKDHRCRLGPQKDKDLQTRRPPQRRAAPRSCGSGGRKVLTPLPDPLGLEELKDTGAGLVPEAVPGKPPFAEPDAVLSIVVGGAVGAETELVVPGHAEGLGSNLALAELQAGAEGPCAMLAVPVYIQASE

SEQ ID NO: 6709 - protein, 976 aa, Homo sapiens
MGNLESAEGVPGEPPSVPLLLPPGKMPMPEPCELEERFALVLSSMNLPPDKARLLRQYDNEKKWDLICDQERFQVKNPPHTYIQKLQSFLDPSVTRKKFRRRVQESTKVLRELEISLRTNHIGWVREFLNDENKGLDVLVDYLSFAQCSVMYSTLPGRRALKNSRLVSQKDDVHVCILCLRAIMNYQYGFNLVMSHPHAVNEIALSLNNKNPRTKALVLELLAAVCLVRGGHEIILAAFDNFKEVCKELHRFEKLMEYFRNEDSNIDFMVACMQFINIVVHSVEDMNFRVHLQYEFTKLGLEEFLQKSRHTESEKLQVQIQAYLDNVFDVGGLLEDAETKNVALEKVEELEEHVSHLTEKLLDLENENMMRVAELEKQLLQREKELESIKETYENTSHQVHTLRRLIKEKEEAFQRRCHLEPNVRGLESVDSEALARVGPAELSEGMPPSDLDLLAPAPPPEEVLPLPPPPAPPLPPPPPPLPDKCPPAPPLPGAAPSVVLTVGLSAIRIKKPIKTKFRLPVFNWTALKPNQISGTVFSELDDEKILEDLDLDKFEELFKTKAQGPALDLICSKNKTAQKAASKVTLLEANRAKNLAITLRKAGRSAEEICRAIHTFDLQTLPVDFVECLMRFLPTEAEVKLLRQYERERQPLEELAAEDRFMLLFSKVERLTQRMAGMAFLGNFQDNLQMLTPQLNAIIAASASVKSSQKLKQMLEIILALGNYMNSSKRGAVYGFKLQSLDLLLDTKSTDRKMTLLHFIALTVKEKYPDLANFWHELHFVEKAAAVSLENVLLDVKELGRGMELIRRECSIHDNSVLRNFLSTNEGKLDKLQRDAKTAEEAYNAVVRYFGESPKTTPPSVFFPVFVRFIRSYKEAEQENEARKKQEEVMREKQLAQEAKKLDAKTPSQRNKWQQQELIAELRRRQAKEHRPVYEGKDGTIEDIITGLHCQPMVVRHQARSAAPPSGPPRAPGPH

SEQ ID NO: 6710 - protein, 1012 aa, Homo sapiens
MMAQSNMFTVADVLSQDELRKKLYQTFKDRGILDTLKTQLRNQLIHELMHPVLSGELQPRSISVEGSSLLIGASNSLVADHLQRCGYEYSLSVFFPESGLAKEKVFTMQDLLQLIKINPTSSLYKSLVSGSDKENQKGFLMHFLKELAEYHQAKESCNMETQTSSTFNRDSLAEKLQLIDDQFADAYPQRIKFESLEIKLNEYKREIEEQLRAEMCQKLKFFKDTEIAKIKMEAKKKYEKELTMFQNDFEKACQAKSEALVLREKSTLERIHKHQEIETKEIYAQRQLLLKDMDLLRGREAELKQRVEAFELNQKLQEEKHKSITEALRRQEQNIKSFEETYDRKLKNELLKYQLELKDDYIIRTNRLIEDERKNKEKAVHLQEELIAINSKKEELNQSVNRVKELELELESVKAQSLAITKQNHMLNEKVKEMSDYSLLKEEKLELLAQNKLLKQQLEESRNENLRLLNRLAQPAPELAVFQKELRKAEKAIVVEHEEFESCRQALHKQLQDEIEHSAQLKAQILGYKASVKSLTTQVADLKLQLKQTQTALENEVYCNPKQSVIDRSVNGLINGNVVPCNGEISGDFLNNPFKQENVLARMVASRITNYPTAWVEGSSPDSDLEFVANTKARVKELQQEAERLEKAFRSYHRRVIKNSAKSPLAAKSPPSLHLLEAFKNITSSSPERHIFGEDRVVSEQPQVGTLEERNDVVEALTGSAASRLRGGTSSRRLSSTPLPKAKRSLESEMYLEGLGRSHIASPSPCPDRMPLPSPTESRHSLSIPPVSSPPEQKVGLYRRQTELQDKSEFSDVDKLAFKDNEEFESSFESAGNMPRQLEMGGLSPAGDMSHVDAAAAAVPLSYQHPSVDQKQIEEQKEEEKIREQQVKERRQREERRQSNLQEVLERERRELEKLYQERKMIEESLKIKIKKELEMENELEMSNQEIKDKSAHSENPLEKYMKIIQQEQDQESADKSSKKMVQEGSLVDTLQSSDKVESLTGFSHEELDDSW

SEQ ID NO: 6711 - protein, 650 aa, Homo sapiens
MMGIGKNTTSKSMEAGSSTEGKYEDEAKHPAFFTLPVVINGGATSSGEQDNEDTELMAIYTTENGIAEKSSLAETLDSTGSLDPQRSDMIYTIEDVPPWYLCIFLGLQHYLTCFSGTIAVPFLLADAMCVGYDQWATSQLIGTIFFCVGITTLLQTTFGCRLPLFQASAFAFLAPARAILSLDKWKCNTTDVSVANGTAELLHTEHIWYPRIREIQGAIIMSSLIEVVIGLLGLPGALLKYIGPLTITPTVALIGLSGFQAAGERAGKHWGIAMLTIFLVLLFSQYARNVKFPLPIYKSKKGWTAYKLQLFKMFPIILAILVSWLLCFIFTVTDVFPPDSTKYGFYARTDARQGVLLVAPWFKVPYPFQWGLPTVSAAGVIGMLSAVVASIIESIGDYYACARLSCAPPPPIHAINRGIFVEGLSCVLDGIFGTGNGSTSSSPNIGVLGITKVGSRRVIQCGAALMLALGMIGKFSALFASLPDPVLGALFCTLFGMITAVGLSNLQFIDLNSSRNLFVLGFSIFFGLVLPSYLRQNPLVTGITGIDQVLNVLLTTAMFVGGCVAFILDNTIPGTPEERGIRKWKKGVGKGNKSLDGMESYNLPFGMNIIKKYRCFSYLPISPTFVGYTWKGLRKSDNSRSSDEDSQATG

SEQ ID NO: 6712 - protein, 419 aa, Homo sapiens
MARAAGARGPAGWCRRRGRCGRGTLLAFAAWTAGWVLAAALLLRAHPGVLSERCTDEKSRRILAALCQDYQGGTLAGDLCEDLCVAGELLFQRCLHYNRGKKVLQADWRGRPVVLKSKEEAFSSFPPLSLLEEEAGEGGQDMPEAELLLMVAGEVKSALGLELSNSSLGPWWPGRRGPRWRGQLASLWALLQQEEYVYFSLLQDLSPHVLPVLGSCGHFYAVEFLAAGSPHHRALFPLDRAPGAPGGGQAKAISDIALSFLDMVNHFDSDFSHRLHLCDIKPENFAIRSDFTVVAIDVDMAFFEPKMREILEQNCTGDEDCNFFDCFSRCDLRVNKCGAQRVNNNLQVICDKIFRHWFSAPLKSSAVSFQLQLQLQEAVQECADPGVPSGNTRRAASSVFWKLRQLLQATLRELQEAEK

SEQ ID NO: 6713 - protein, 2269 aa, Homo sapiens
MAEPSSARRPVPLIESELYFLIARYLSAGPCRRAAQVLVQELEQYQLLPKRLDWEGNEHNRSYEELVLSNKHVAPDHLLQICQRIGPMLDKEIPPSISRVTSLLGAGRQSLLRTAKDCRHTVWKGSAFAALHRGRPPEMPVNYGSPPNLVEIHRGKQLTGCSTFSTAFPGTMYQHIKMHRRILGHLSAVYCVAFDRTGHRIFTGSDDCLVKIWSTHNGRLLSTLRGHSAEISDMAVNYENTMIAAGSCDKIIRVWCLRTCAPVAVLQGHTGSITSLQFSPMAKGSQRYMVSTGADGTVCFWQWDLESLKFSPRPLKFTEKPRPGVQMLCSSFSVGGMFLATGSTDHVIRMYFLGFEAPEKIAELESHTDKVDSIQFCNNGDRFLSGSRDGTARIWRFEQLEWRSILLDMATRISGDLSSEEERFMKPKVTMIAWNQNDSIVVTAVNDHVLKVWNSYTGQLLHNLMGHADEVFVLETHPFDSRIMLSAGHDGSIFIWDITKGTKMKHYFNMIEGQGHGAVFDCKFSQDGQHFACTDSHGHLLIFGFGCSKPYEKIPDQMFFHTDYRPLIRDSNNYVLDEQTQQAPHLMPPPFLVDVDGNPHPTKYQRLVPGRENSADEHLIPQLGYVATSDGEVIEQIISLQTNDNDERSPESSILDGMIRQLQQQQDQRMGADQDTIPRGLSNGEETPRRGFRRLSLDIQSPPNIGLRRSGQVEGVRQMHQNAPRSQIATERDLQAWKRRVVVPEVPLGIFRKLEDFRLEKGEEERNLYIIGRKRKTLQLSHKSDSVVLVSQSRQRTCRRKYPNYGRRNRSWRELSSGNESSSSVRHETSCDQSEGSGSSEEDEWRSDRKSESYSESSSDSSSRYSDWTADAGINLQPPLRTSCRRRITRFCSSSEDEISTENLSPPKRRRKRKKENKPKKENLRRMTPAELANMEHLYEFHPPVWITDTTLRKSPFVPQMGDEVIYFRQGHEAYIEAVRRNNIYELNPNKEPWRKMDLRDQELVKIVGIRYEVGPPTLCCLKLAFIDPATGKLMDKSFSIRYHDMPDVIDFLVLRQFYDEARQRNWQSCDRFRSIIDDAWWFGTVLSQEPYQPQYPDSHFQCYIVRWDNTEIEKLSPWDMEPIPDNVDPPEELGASISVTTDELEKLLYKPQAGEWGQKSRDEECDRIISGIDQLLNLDIAAAFAGPVDLCTYPKYCTVVAYPTDLYTIRMRLVNRFYRRLSALVWEVRYIEHNARTFNEPESVIARSAKKITDQLLKFIKNQHCTNISELSNTSENDEQNAEDLDDSDLPKTSSGRRRVHDGKKSIRATNYVESNWKKQCKELVNLIFQCEDSEPFRQPVDLVEYPDYRDIIDTPMDFGTVRETLDAGNYDSPLEFCKDIRLIFSNAKAYTPNKRSKIYSMTLRLSALFEEKMKKISSDFKIGQKFNEKLRRSQRFKQRQNCKGDSQPNKSIRNLKPKRLKSQTKIIPELVGSPTQSTSSRTAYLGTHKTSAGISSGVTSGDSSDSAESSERRKRNRPITNGSTLSESEVEDSLATSLSSSASSSSEESKESSRARESSSRSGLSRSSNLRVTRTRAAQRKTGPVSLANGCGRKATRKRVYLSDSDNNSLETGEILKARAGNNRKVLRKCAAVAANKIKLMSDVEENSSSESVCSGRKLPHRNASAVARKKLLHNSEDEQSLKSEIEEEELKDENQLLPVSSSHTAQSNVDESENRDSESESDLRVARKNWHANGYKSHTPAPSKTKFLKIESSEEDSKSHDSDHACNRTAGPSTSVQKLKAESISEEADSEPGRSGGRKYNTFHKNASFFKKTKILSDSEDSESEEQDREDGKCHKMEMNPISGNLNCDPIAMSQCSSDHGCETDLDSDDDKIEKPNNFMKDSASQDNGLSRKISRKRVCSSDSDSSLQVVKKSSKARTGLLRITRRCAATAANKIKLMSDVEDVSLENVHTRSKNGRKKPLHLACTTAKKKLSDCEGSVHCEVPSEQYACEGKPPDPDSEGSTKVLSQALNGDSDSEDMLNSEHKHRHTNIHKIDAPSKRKSSSVTSSGEDSKSHIPGSETDRTFSSESTLAQKATAENNFEVELNYGLRRWNGRRLRTYGKAPFSKTKVIHDSQETAEKEVKRKRSHPELENVKISETTGNSKFRPDTSSKSSDLGSVTESDIDCTDNTKTKRRKTKGKAKVVRKGKTFTANISKTVRRQRQSKRPRLSVDDNDWEDLDYAKSKRVLRRSKIKTRNQGRRTVRYHDGDDDRSLENVLDFNGCTL

SEQ ID NO: 6714 - protein, 1784 aa, Homo sapiens
MAKPTSKDSGLKEKFKILLGLGTPRPNPRSAEGKQTEFIITAEILRELSMECGLNNRIRMIGQICEVAKTKKFEEHAVEALWKAVADLLQPERPLEARHAVLALLKAIVQGQGERLGVLRALFFKVIKDYPSNEDLHERLEVFKALTDNGRHITYLEEELADFVLQWMDVGLSSEFLLVLVNLVKFNSCYLDEYIARMVQMICLLCVRTASSVDIEVSLQVLDAVVCYNCLPAESLPLFIVTLCRTINVKELCEPCWKLMRNLLGTHLGHSAIYNMCHLMEDRAYMEDAPLLRGAVFFVGMALWGAHRLYSLRNSPTSVLPSFYQAMACPNEVVSYEIVLSITRLIKKYRKELQVVAWDILLNIIERLLQQLQTLDSPELRTIVHDLLTTVEELCDQNEFHGSQERYFELVERCADQRPESSLLNLISYRAQSIHPAKDGWIQNLQALMERFFRSESRGAVRIKVLDVLSFVLLINRQFYEEELINSVVISQLSHIPEDKDHQVRKLATQLLVDLAEGCHTHHFNSLLDIIEKVMARSLSPPPELEERDVAAYSASLEDVKTAVLGLLVILQTKLYTLPASHATRVYEMLVSHIQLHYKHSYTLPIASSIRLQAFDFLLLLRADSLHRLGLPNKDGVVRFSPYCVCDYMEPERGSEKKTSGPLSPPTGPPGPAPAGPAVRLGSVPYSLLFRVLLQCLKQESDWKVLKLVLGRLPESLRYKVLIFTSPCSVDQLCSALCSMLSGPKTLERLRGAPEGFSRTDLHLAVVPVLTALISYHNYLDKTKQREMVYCLEQGLIHRCASQCVVALSICSVEMPDIIIKALPVLVVKLTHISATASMAVPLLEFLSTLARLPHLYRNFAAEQYASVFAISLPYTNPSKFNQYIVCLAHHVIAMWFIRCRLPFRKDFVPFITKGLRSNVLLSFDDTPEKDSFRARSTSLNERPKSLRIARPPKQGLNNSPPVKEFKESSAAEAFRCRSISVSEHVVRSRIQTSLTSASLGSADENSVAQADDSLKNLHLELTETCLDMMARYVFSNFTAVPKRSPVGEFLLAGGRTKTWLVGNKLVTVTTSVGTGTRSLLGLDSGELQSGPESSSSPGVHVRQTKEAPAKLESQAGQQVSRGARDRVRSMSGGHGLRVGALDVPASQFLGSATSPGPRTAPAAKPEKASAGTRVPVQEKTNLAAYVPLLTQGWAEILVRRPTGNTSWLMSLENPLSPFSSDINNMPLQELSNALMAAERFKEHRDTALYKSLSVPAASTAKPPPLPRSNTDSAVVMEEGSPGEVPVLVEPPGLEDVEAALGMDRRTDAYSRSSSVSSQEEKSLHAEELVGRGIPIERVVSSEGGRPSVDLSFQPSQPLSKSSSSPELQTLQDILGDPGDKADVGRLSPEVKARSQSGTLDGESAAWSASGEDSRGQPEGPLPSSSPRSPSGLRPRGYTISDSAPSRRGKRVERDALKSRATASNAEKVPGINPSFVFLQLYHSPFFGDESNKPILLPNESQSFERSVQLLDQIPSYDTHKIAVLYVGEGQSNSELAILSNEHGSYRYTEFLTGLGRLIELKDCQPDKVYLGGLDVCGEDGQFTYCWHDDIMQAVFHIATLMPTKDVDKHRCDKKRHLGNDFVSIVYNDSGEDFKLGTIKGQFNFVHVIVTPLDYECNLVSLQCRKDMEGLVDTSVAKIVSDRNLPFVARQMALHANMASQVHHSRSNPTDIYPSKWIARLRHIKRLRQRICEEAAYSNPSLPLVHPPSHSKAPAQTPAEPTPGYEVGQRKRLISSVEDFTEFV

SEQ ID NO: 6715 - protein, 432 aa, Homo sapiens
MSFRDLRNFTEMMRALGYPRHISMENFRTPNFGLVSEVLLWLVKRYEPQTDIPPDVDTEQDRVFFIKAIAQFMATKAHIKLNTKKLYQADGYAVKELLKITSVLYNAMKTKGMEGSEIVEEDVNKFKFDLGSKIADLKAARQLASEITSKGASLYDLLGMEVELREMRTEAIARPLEINETEKVMRIAIKEILTQVQKTKDLLNNVASDEANLEAKIEKRKLELERNRKRLETLQSVRPCFMDEYEKTEEELQKQYDTYLEKFQNLTYLEQQLEDHHRMEQERFEEAKNTLCLIQNKLKEEEKRLLKSGSNDDSDIDIQEDDESDSELEERRLPKPQTAMEMLMQGRPGKRIVGTMQGGDSDDNMEAAPALLGKCKTSSSKKQEDSEESEIDMEDDDDEDDDLEDESISLSPTKPNRRVRKSEPLDESDNDF

SEQ ID NO: 6716 - protein, 335 aa, Homo sapiens
MGPLSAPPCTQHITWKGLLLTASLLNFWNLPITAQVTIEALPPKVSEGKDVLLLVHNLPQNLAGYIWYKGQLMDLYHYITSYVVDGQINIYGPAYTGRETVYSNASLLIQNVTREDAGSYTLHIIKRGDRTRGVTGYFTFNLYLKLPKPYITINNSKPRENKDVLAFTCEPKSENYTYIWWLNGQSLPVSPRVKRPIENRILILPSVTRNETGPYECEIRDRDGGMRSDPVTLNVLYGPDLPSIYPSFTYYRSGENLYLSCFAESNPPAEYFWTINGKFQQSGQKLSIPQITTKHRGLYTCSVRNSATGKESSKSMTVEVSAPSGIGRLPLLNPI

SEQ ID NO: 6717 - protein, 879 aa, Homo sapiens
MEDFARGAASPGPSRPGLVPVSIIGAEDEDFENELETNSEEQNSQFQSLEQVKRRPAHLMALLQHVALQFEPGPLVLRVPVPPNVAFELDRTRADLISEDVQRRFVQEVVQSQQVAVGRQLEDFRSKRLMGMTPWEQELAQLEAWVGRDRASYEARERHVAERLLMHLEEMQHTISTDEEKSAAVVNAIGLYMRHLGVRTKSGDKKSGRNFFRKKVMGNRRSDEPAKTKKGLSSILDAARWNRGEPQVPDFRHLKAEVDAEKPGATDRKGGVGMPSRDRNIGAPGQDTPGVSLHPLSLDSPDREPGADAPLELGDSSPQGPMSLESLAPPESTDEGAETESPEPGDEGEPGRSGLELEPEEPPGWRELVPPDTLHSLPKSQVKRQEVISELLVTEAAHVRMLRVLHDLFFQPMAECLFFPLEELQNIFPSLDELIEVHSLFLDRLMKRRQESGYLIEEIGDVLLARFDGAEGSWFQKISSRFCSRQSFALEQLKAKQRKDPRFCAFVQEAESRPRCRRLQLKDMIPTEMQRLTKYPLLLQSIGQNTEEPTEREKVELAAECCREILHHVNQAVRDMEDLLRLKDYQRRLDLSHLRQSSDPMLSEFKNLDITKKKLVHEGPLTWRVTKDKAVEVHVLLLDDLLLLLQRQDERLLLKSHSRTLTPTPDGKTMLRPVLRLTSAMTREVATDHKAFYVLFTWDQEAQIYELVAQTVSERKNWCALITETAGSLKVPAPASRPKPRPSPSSTREPLLSSSENGNGGRETSPADARTERILSDLLPFCRPGPEGQLAATALRKVLSLKQLLFPAEEDNGAGPPRDGDGVPGGGPLSPARTQEIQENLLSLEETMKQLEELEEEFCRLRPLLSQLGGNSVPQPGCT

SEQ ID NO: 6718 - protein, 316 aa, Homo sapiens
MGQDYYSVLGITRNSEDAQIKQAYRRLALKHHPLKSNEPSSAEIFRQIAEAYDVLSDPMKRGIYDKFGEEGLKGGIPLEFGSQTPWTTGYVFHGKPEKVFHEFFGGNNPFSEFFDAEGSEVDLNFGGLQGRGVKKQDPQVERDLYLSLEDLFFGCTKKIKISRRVLNEDGYSSTIKDKILTIDVKPGWRQGTRITFEKEGDQGPNIIPADIIFIVKEKLHPRFRRENDNLFFVNPIPLGKALTCCTVEVRTLDDRLLNIPINDIIHPKYFKKVPGEGMPLPEDPTKKGDLFIFFDIQFPTRLTPQKKQMLRQALLT

SEQ ID NO: 6719 - protein, 504 aa, Homo sapiens
MTEAALVEGQVKLRDGKKWKSRWLVLRKPSPVADCLLMLVYKDKSERIKGLRERSSLTLEDICGLEPGLPYEGLVHTLAIVCLSQAIMLGFDSHEAMCAWDARIRYALGEVHRFHVTVAPGTKLESGPATLHLCNDVLVLARDIPPAVTGQWKLSDLRRYGAVPSGFIFEGGTRCGYWAGVFFLSSAEGEQISFLFDCIVRGISPTKGPFGLRPVLPDPSPPGPSTVEERVAQEALETLQLEKRLSLLSHAGRPGSGGDDRSLSSSSSEASHLDVSASSRLTAWPEQSSSSASTSQEGPRPAAAQAAGEAMVGASRPPPKPLRPRQLQEVGRQSSSDSGIATGSHSSYSSSLSSYAGSSLDVWRATDELGSLLSLPAAGAPEPSLCTCLPGTVEYQVPTSLRAHYDTPRSLCLAPRDHSPPSQGSPGNSAARDSGGQTSAGCPSGWLGTRRRGLVMEAPQGSEATLPGPAPGEPWEAGGPHAGPPPAFFSACPVCGGLKVNPPP

SEQ ID NO: 6720 - protein, 1430 aa, Homo sapiens
MTSAAEIKKPPVAPKPKFVVANNKPAPPPIAPKPDIVISSVPQSTKKMKPAIAPKPKVLKTSPVREIGQSPSRKIMLNLEGHKQELAESTDNFNCKYEGNQSNDYISPMCSCSSECIHKLGHRENLCVKQLVLEPLEMNENLENSKIDETLTIKTRSKCDLYGEKAKNQGGVVLKASVLEEELKDALIHQMPPFISAQKHRPTDSPEMNGGCNSNGQFRIEFADLSPSPSSFEKVPDHHSCHLQLPSDECEHFETCQDDSEKSNNCFQSSELEALENGKRSTLISSDGVSKKSEVKDLGPLEIHLVPYTPKFPTPKPRKTRTARLLRQKCVDTPSESTEEPGNSDSSSSCLTENSLKINKISVLHQNVLCKQEQVDKMKLGNKSELNMESNSDAQDLVNSQKAMCNETTSFEKMAPSFDKDSNLSSDSTTVDGSSMSLAVDEGTGFIRCTVSMSLPKQLKLTCNEHLQSGRNLGVSAPQMQKESVIKEENSLRIVPKKPQRHSLPATGVLKKAASEELLEKSSYPSSEEKSSEKSLERNHLQHLCAQNRGVSSSFDMPKRASEKPVWKLPHPILPFSGNPEFLKSVTVSSNSEPSTALTKPRAKSLSAMDVEKCTKPCKDSTKKNSFKKLLSMKLSICFMKSDFQKFWSKSSQLGDTTTGHLSSGEQKGIESDWQGLLVGEEKRSKPIKAYSTENYSLESQKKRKKSRGQTSAANGLRAESLDDQMLSRESSSQAPYKSVTSLCAPEYENIRHYEEIPEYENLPFIMAIRKTQELEWQNSSSMEDADANVYEVEEPYEAPDGQLQLGPRHQHSSSGASQEEQNDLGLGDLPSDEEEIINSSDEDDVSSESSKGEPDPLEDKQDEDNGMKSKVHHIAKEIMSSEKVFVDVLKLLHIDFRDAVAHASRQLGKPVIEDRILNQILYYLPQLYELNRDLLKELEERMLHWTEQQRIADIFVKKGPYLKMYSTYIKEFDKNIALLDEQCKKNPGFAAVVREFEMSPRCANLALKHYLLKPVQRIPQYRLLLTDYLKNLIEDAGDYRDTQDALAVVIEVANHANDTMKQGDNFQKLMQIQYSLNGHHEIVQPGRVFLKEGILMKLSRKVMQPRMFFLFNDALLYTTPVQSGMYKLNNMLSLAGMKVRKPTQEAYQNELKIESVERSFILSASSATERDEWLEAISRAIEEYAKKRITFCPSRSLDEADSENKEEVSPLGSKAPIWIPDTRATMCMICTSEFTLTWRRHHCRACGKIVCQACSSNKYGLDYLKNQPARVCEHCFQELQKLDHQHSPRIGSPGNHKSPSSALSSVLHSIPSGRKQKKIPAALKEVSANTEDSSMSGYLYRSKGNKKPWKHFWFVIKNKVLYTYAASEDVAALESQPLLGFTVIQVKDENSESKVFQLLHKNMLFYVFKAEDAHSAQKWIEAFQEGTIL

SEQ ID NO: 6721 - protein, 781 aa, Homo sapiens
MATQADLMELDMAMEPDRKAAVSHWQQQSYLDSGIHSGATTTAPSLSGKGNPEEEDVDTSQVLYEWEQGFSQSFTQEQVADIDGQYAMTRAQRVRAAMFPETLDEGMQIPSTQFDAAHPTNVQRLAEPSQMLKHAVVNLINYQDDAELATRAIPELTKLLNDEDQVVVNKAAVMVHQLSKKEASRHAIMRSPQMVSAIVRTMQNTNDVETARCTAGTLHNLSHHREGLLAIFKSGGIPALVKMLGSPVDSVLFYAITTLHNLLLHQEGAKMAVRLAGGLQKMVALLNKTNVKFLAITTDCLQILAYGNQESKLIILASGGPQALVNIMRTYTYEKLLWTTSRVLKVLSVCSSNKPAIVEAGGMQALGLHLTDPSQRLVQNCLWTLRNLSDAATKQEGMEGLLGTLVQLLGSDDINVVTCAAGILSNLTCNNYKNKMMVCQVGGIEALVRTVLRAGDREDITEPAICALRHLTSRHQEAEMAQNAVRLHYGLPVVVKLLHPPSHWPLIKATVGLIRNLALCPANHAPLREQGAIPRLVQLLVRAHQDTQRRTSMGGTQQQFVEGVRMEEIVEGCTGALHILARDVHNRIVIRGLNTIPLFVQLLYSPIENIQRVAAGVLCELAQDKEAAEAIEAEGATAPLTELLHSRNEGVATYAAAVLFRMSEDKPQDYKKRLSVELTSSLFRTEPMAWNETADLGLDIGAQGEPLGYRQDDPSYRSFHSGGYGQDALGMDPMMEHEMGGHHPGADYPVDGLPDLGHAQDLMDGLPPGDSNQLAWFDTDL

SEQ ID NO: 6722 - protein, 551 aa, Homo sapiens
MPSETPQAEVGPTGCPHRSGPHSAKGSLEKGSPEDKEAKEPLWIRPDAPSRCTWQLGRPASESPHHHTAPAKSPKILPDILKKIGDTPMVRINKIGKKFGLKCELLAKCEFFNAGGSVKDRISLRMIEDAERDGTLKPGDTIIEPTSGNTGIGLALAAAVRGYRCIIVMPEKMSSEKVDVLRALGAEIVRTPTNARFDSPESHVGVAWRLKNEIPNSHILDQYRNASNPLAHYDTTADEILQQCDGKLDMLVASVGTGGTITGIARKLKEKCPGCRIIGVDPEGSILAEPEELNQTEQTTYEVEGIGYDFIPTVLDRTVVDKWFKSNDEEAFTFARMLIAQEGLLCGGSAGSTVAVAVKAAQELQEGQRCVVILPDSVRNYMTKFLSDRWMLQKGFLKEEDLTEKKPWWWHLRVQELGLSAPLTVLPTITCGHTIEILREKGFDQAPVVDEAGVILGMVTLGNMLSSLLAGKVQPSDQVGKVIYKQFKQIRLTDTLGRLSHILEMDHFALVVHEQIQYHSTGKSSQRQMVFGVVTAIDLLNFVAAQERDQK

SEQ ID NO: 6723 - protein, 335 aa, Homo sapiens
MTENVVCTGAVNAVKEVWEKRIKKLNEDLKREKEFQHKLVRIWEERVSLTKLREKVTREDGRVILKIEKEEWKTLPSSLLKLNQLQEWQLHRTGLLKIPEFIGRFQNLIVLDLSRNTISEIPPGIGLLTRLQELILSYNKIKTVPKELSNCASLEKLELAVNRDICDLPQELSNLLKLTHLDLSMNDFTTIPLAVLNMPALEWLDMGSNKLEQLPDTIERMQNLHTLWLQRNEITCLPQTISNMKNLGTLVLSNNKLQDIPVCMEEMANLRFVNFRDNPLKLKVSLPPSEGTDEEEERELFGLQFMHTYIQESRRRADHQVNGSTTLPISINTDG

SEQ ID NO: 6724 - protein, 470 aa, Homo sapiens
MEDIQTNAELKSTQEQSVPAESAAVLNDYSLTKSHEMENVDSGEGPANEDEDIGDDSMKVKDEYSERDENVLKSEPMGNAEEPEIPYSYSREYNEYENIKLERHVVSFDSSRPTSGKMNCDVCGLSCISFNVLMVHKRSHTGERPFQCNQCGASFTQKGNLLRHIKLHTGEKPFKCHLCNYACQRRDALTGHLRTHSVEKPYKCEFCGRSYKQRSSLEEHKERCRTFLQSTDPGDTGEKRHCFDVNYNSSYMYEKESELIQTRMMDQAINNAISYLGAEALRPLVQTPPAPTSEMVPVISSMYPIALTRAEMSNGAPQELEKKSIHLPEKSVPSERGLSPNNSGHDSTDTDSNHEERQNHIYQQNHMVLSRARNGMPLLKEVPRSYELLKPPPICPRDSVKVINKEGEVMDVYRCDHCRVLFLDYVMFTIHMGCHGFRDPFECNMCGYRSHDRYEFSSHIARGEHRALLK

SEQ ID NO: 6725 - protein, 636 aa, Homo sapiens
MVQRDMSKSPPTAAAAVAQEIQMELLENVAPAGALGAAAQSYGKGARRKNRFKGSDGSTSSDTTSNSFVRQGSADSYTSRPSDSDVSLEEDREAVRREAERQAQAQLEKAKTKPVAFAVRTNVSYSAAHEDDVPVPGMAISFEAKDFLHVKEKFNNDWWIGRLVKEGCEIGFIPSPVKLENMRLQHEQRAKQGKFYSSKSGGNSSSSLGDIVPSSRKSTPPSSGAKSADEQDQWKTAGLFWRFTTEHTPPYDVVPSMRPVVLVGPSLKGYEVTDMMQKALFDFLKHRFEGRISITRVTADISLAKRSVLNNPSKHAIIERSNTRSSLAEVQSEIERIFELARTLQLVVLDADTINHPAQLSKTSLAPIIVYVKISSPKVLQRLIKSRGKSQAKHLNVQMVAADKLAQCPPELFDVILDENQLEDACEHLADYLEAYWKATHPPSSSLPNPLLSRTLATSSLPLSPTLASNSQGSQGDQRTDRSAPIRSASQAEEEPSVEPVKKSQHRSSSSAPHHNHRSGTSRGLSRQETFDSETQESRDSAYVEPKEDYSHDHVDHYASHRDHNHRDETHGSSDHRHRESRHRSRDVDREQDHNECNKQRSRHKSKDRYCEKDGEVISKKRNEAGEWNRDVYIRQ

SEQ ID NO: 6726 - protein, 598 aa, Homo sapiens
MPCVQAQYGSSPQGASPASQSYSYHSSGEYSSDFLTPEFVKFSMDLTNTEITATTSLPSFSTFMDNYSTGYDVKPPCLYQMPLSGQQSSIKVEDIQMHNYQQHSHLPPQSEEMMPHSGSVYYKPSSPPTPTTPGFQVQHSPMWDDPGSLHNFHQNYVATTHMIEQRKTPVSRLSLFSFKQSPPGTPVSSCQMRFDGPLHVPMNPEPAGSHHVVDGQTFAVPNPIRKPASMGFPGLQIGHASQLLDTQVPSPPSRGSPSNEGLCAVCGDNAACQHYGVRTCEGCKGFFKRTVQKNAKYVCLANKNCPVDKRRRNRCQYCRFQKCLAVGMVKEVVRTDSLKGRRGRLPSKPKSPQEPSPPSPPVSLISALVRAHVDSNPAMTSLDYSRFQANPDYQMSGDDTQHIQQFYDLLTGSMEIIRGWAEKIPGFADLPKADQDLLFESAFLELFVLRLAYRSNPVEGKLIFCNGVVLHRLQCVRGFGEWIDSIVEFSSNLQNMNIDISAFSCIAALAMVTERHGLKEPKRVEELQNKIVNCLKDHVTFNNGGLNRPNYLSKLLGKLPELRTLCTQGLQRIFYLKLEDLVPPPAIIDKLFLDTLPF

SEQ ID NO: 6727 - protein, 561 aa, Homo sapiens
MAGAQTLLTFRDVAIEFSLEEWKCLDLAQQNLYRDVMLENYRNLFSVGLTVCKPGLITCLEQRKEPWNVKRQEAADGHPAMSSHFTQDLLPEQGIQDAFPKRILRGYGNCGLDNLYLRKDWESLDECKLQKDYNGLNQCSSTTHSKIFQYNKYVKIFDNFSNLHRRNISNTGEKPFKCQECGKSFQMLSFLTEHQKIHTGKKFQKCGECGKTFIQCSHFTEPENIDTGEKPYKCQECNNVIKTCSVLTKNRIYAGGEHYRCEEFGKVFNQCSHLTEHEHGTEEKPCKYEECSSVFISCSSLSNQQMILAGEKLSKCETWYKGFNHSPNPSKHQRNEIGGKPFKCEECDSIFKWFSDLTKHKRIHTGEKPYKCDECGKAYTQSSHLSEHRRIHTGEKPYQCEECGKVFRTCSSLSNHKRTHSEEKPYTCEECGNIFKQLSDLTKHKKTHTGEKPYKCDECGKNFTQSSNLIVHKRIHTGEKPYKCEECGRVFMWFSDITKHKKTHTGEKPYKCDECGKNFTQSSNLIVHKRIHTGEKPYKCEKCGKAFTQFSHLTVHESIHT

SEQ ID NO: 6728 - protein, 266 aa, Homo sapiens
MSSKYPRSVRRCLPLCALTLEAALILLFYFFTHYDASLEDQKGLVASYQVGQDLTVMAALGLGFLTSNFRRHSWSSVAFNLFMLALGVQWAILLDGFLSQFPPGKVVITLFSIRLATMSAMSVLISAGAVLGKVNLAQLVVMVLVEVTALGTLRMVISNIFNVCCNRVLGIHHISVMHSIFSLLGLLGEITYIVLLVLHTVWNGNGMIGFQVLLSIGELSLAIVIALTSGLLTGLLLNLKIWKAPHVAKYFDDQVFWKFPHLAVGF

SEQ ID NO: 6729 - protein, 661 aa, Homo sapiens
MTGGRFDFDDGGTYCGGWEEGKAHGHGICTGPKGQGEYSGSWSHGFEVVGGYTWPSGNTYQGYWAQGKRHGLGVETKGKWMYRGEWSHGFKGRYGVRQSLCTPARYEGTWSNGLQDGYGVETYGDGGTYQGQWAGGMRHGYGVRQSVPYGMATVIRSPLRTSLASLRSEQSNGSVLHDAAAAADSPAGTRGGFVLNFHADAELAGKKKGGLFRRGSLLGSMKLRKSESKSSISSKRSSVRSDAAMSRISSSDANSTISFGDVDCDFCPVEDHVDATTTETYMGEWKNDKRNGFGVSERSNGMKYEGEWANNKRHGYGCTVFPDGSKEEGKYKNNILVRGIRKQLIPIRHTKTREKVDRAIEGAQRAAAMARTKVEIANSRTAHARAKADAADQAALAARQECDIARAVARELSPDFYQPGPDYVKQRFQEGVDAKENPEEKVPEKPPTPKESPHFYRKGTTPPRSPEASPKHSHSPASSPKPLKKQNPSSGARLNQDKRSVADEQVTAIVNKPLMSKAPTKEAGAVVPQSKYSGRHHIPNPSNGELHSQYHGYYVKLNAPQHPPVDVEDGDGSSQSSSALVHKPSANKWSPSKSVTKPVAKESKAEPKAKKSELAIPKNPASNDSCPALEKEANSGPNSIMIVLVMLLNIGLAILFVHFLT

SEQ ID NO: 6730 - protein, 376 aa, Homo sapiens
MHLLKVGTWRNNTASSWLMKFSVLWLVSQNCCRASVVWMAYMNISFHVGNHVLSELGETGVFGRSSTLKRVAGVIVPPEGKIQNACNPNTIFSRSKYSETWLALIERGGCTFTQKIKVATEKGASGVIIYNVPGTGNQVFPMFHQAFEDVVVVMIGNLKGTEIFHLIKKGVLITAVVEVGRKHIIWMNHYLVSFVIVTTATLAYFIFYHIHRLCLARIQNRRWQRLTTDLQNTFGQLQLRVVKEGDEEINPNGDSCVICFERYKPNDIVRILTCKHFFHKNCIDPWILPHGTCPICKCDILKVLGIQVVVENGTEPLQVLMSNELPETLSPSEEETNNEVSPAGTSDKVIHVEENPTSQNNDIQPHSVVEDVHPSP

SEQ ID NO: 6731 - protein, 413 aa, Homo sapiens
MENSGKANKKDTHDGPPKEIKLPTSEALLDYQCQIKEDAVEQFMFQIKTLRKKNQKYHERNSRLKEEQIWHIRHLLKELSEEKAEGLPVVTREDVEEAMKEKWKFERDQEKNLRDMRMQISNAEKLFLEKLSEKEYWEEYKNVGSERHAKLITSLQNDINTVKENAEKMSEHYKITLEDTRKKIIKETLLQLDQKKEWATQNAVKLIDKGSYLEIWENDWLKKEVAIHRKEVEELKNAIHELEAENLVLIDQLSNCRLVDLKIPRRLYLTQAAGLEVPPEEMSLELPETHIEEKSELQPTEVESRDLMSSSDESTILHLSHENSIEDLQYVKIDKEENSGTEFGDTDMKYLLYEDEKDFKDYVNLGPLGVKLMSVESKKMPIHFQEKEIPVKLYKDVRSPESHITYKMMKSFL

SEQ ID NO: 6732 - protein, 1230 aa, Homo sapiens
MIKTEKSYPERRLRGVLEELSCGCCRFLSLADKDQGHSSRTRLDRERLKSCMRELENMGQQARMLRAQVKRHTVRDKLRLCQNFLQKLRFLADEPQHSIPDIFIWMMSNNKRVAYARVPSKDLLFSIVEEETGKDCAKVKTLFLKLPGKRGFGSAGWTVQAKVELYLWLGLSKQRKEFLCGLPCGFQEVKAAQGLGLHAFPPVSLVYTKKQAFQLRAHMYQARSLFAADSSGLSDPFARVFFINQSQCTEVLNETLCPTWDQMLVFDNLELYGEAHELRDDPPIIVIEIYDQDSMGKADFMGRTFAKPLVKMADEAYCPPRFPPQLEYYQIYRGNATAGDLLAAFELLQIGPAGKADLPPINGPVDVDRGPIMPVPMGIRPVLSKYRVEVLFWGLRDLKRVNLAQVDRPRVDIECAGKGVQSSLIHNYKKNPNFNTLVKWFEVDLPENELLHPPLNIRVVDCRAFGRYTLVGSHAVSSLRRFIYRPPDRSAPSWNTTGEVVVTMEPEVPIKKLETMVKLDATSEAVVKVDVAEEEKEKKKKKKGTAEEPEEEEPDESMLDWWSKYFASIDTMKEQLRQQEPSGIDLEEKEEVDNTEGLKGSMKGKEKARAAKEEKKKKTQSSGSGQGSEAPEKKKPKIDELKVYPKELESEFDNFEDWLHTFNLLRGKTGDDEDGSTEEERIVGRFKGSLCVYKVPLPEDVSREAGYDSTYGMFQGIPSNDPINVLVRVYVVRATDLHPADINGKADPYIAIRLGKTDIRDKENYISKQLNPVFGKSFDIEASFPMESMLTVAVYDWDLVGTDDLIGETKIDLENRFYSKHRATCGIAQTYSTHGYNIWRDPMKPSQILTRLCKDGKVDGPHFGPPGRVKVANRVFTGPSEIEDENGQRKPTDEHVALLALRHWEDIPRAGCRLVPEHVETRPLLNPDKPGIEQGRLELWVDMFPMDMPAPGTPLDISPRKPKKYELRVIIWNTDEVVLEDDDFFTGEKSSDIFVRGWLKGQQEDKQDTDVHYHSLTGEGNFNWRYLFPFDYLAAEEKIVISKKESMFSWDETEYKIPARLTLQIWDADHFSADDFLGAIELDLNRFPRGAKTAKQCTMEMATGEVDVPLVSIFKQKRVKGWWPLLARNENDEFELTGKVEAELHLLTAEEAEKNPVGLARNEPDPLEKPNRPDTAFVWFLNPLKSIKYLICTRYKWLIIKIVLALLGLLMLGLFLYSLPGYMVKKLLGA

SEQ ID NO: 6733 - protein, 1098 aa, Homo sapiens
MLKTESSGERTTLRSASPHRNAYRTEFQALKSTFDKPKSDGEQKTKEGEGSQQSRGRKYGSNVNRIKNLFMQMGMEPNENAAVIAKTRGKGGHSSPQRRMKPKEFLEKTDGSVVKLESSVSERISRFDTMYDGPSYSKFTETRKMFERSVHESGQNNRYSPKKEKAGGSEPQDEWGGSKSNRGSTDSLDSLSSRTEAVSPTVSQLSAVFENTDSPSAIISEKAENNEYSVTGHYPLNLPSVTVTNLDTFGHLKDSNSWPPSNKRGVDTEDAHKSNATPVPEVASKSTSLASIPGEEIQQSKEPEDSTSNQQTPDSIDKDGPEEPCAESKAMPKSEIPSPQSQLLEDAEANLVGREAAKQQRKELAGGDFTSPDASASSCGKEVPEDSNNFDGSHVYMHSDYNVYRVRSRYNSDWGETGTEQDEEEDSDENSYYQPDMEYSEIVGLPEEEEIPANRKIKFSSAPIKVFNTYSNEDYDRRNDEVDPVAASAEYELEKRVEKLELFPVELEKDEDGLGISIIGMGVGADAGLEKLGIFVKTVTEGGAAQRDGRIQVNDQIVEVDGISLVGVTQNFAATVLRNTKGNVRFVIGREKPGQVSEVAQLISQTLEQERRQRELLEQHYAQYDADDDETGEYATDEEEDEVGPVLPGSDMAIEVFELPENEDMFSPSELDTSKLSHKFKELQIKHAVTEAEIQKLKTKLQAAENEKVRWELEKTQLQQNIEENKERMLKLESYWIEAQTLCHTVNEHLKETQSQYQALEKKYNKAKKLIKDFQQKELDFIKRQEAERKKIEDLEKAHLVEVQGLQVRIRDLEAEVFRLLKQNGTQVNNNNNIFERRTSLGEVSKGDTMENLDGKQTSCQDGLSQDLNEAVPETERLDSKALKTRAQLSVKNRRQRPSRTRLYDSVSSTDGEDSLERKNFTFNDDFSPSSTSSADLSGLGAEPKTPGLSQSLALSSDESLDMIDDEILDDGQSPKHSQCQNRAVQEWSVQQVSHWLMSLNLEQYVSEFSAQNITGEQLLQLDGNKLKALGMTASQDRAVVKKKLKEMKMSLEKARKAQEKMEKQREKLRRKEQEQMQRKSKKTEKMTSTTAEGAGEQ

SEQ ID NO: 6734 - protein, 677 aa, Homo sapiens
MAEEKKLKLSNTVLPSESMKVVAESMGIAQIQEETCQLLTDEVSYRIKEIAQDALKFMHMGKRQKLTTSDIDYALKLKNVEPLYGFHAQEFIPFRFASGGGRELYFYEEKEVDLSDIINTPLPRVPLDVCLKAHWLSIEGCQPAIPENPPPAPKEQQKAEATEPLKSAKPGQEEDGPLKGKGQGATTADGKGKEKKAPPLLEGAPLRLKPRSIHELSVEQQLYYKEITEACVGSCEAKRAEALQSIATDPGLYQMLPRFSTFISEGVRVNVVQNNLALLIYLMRMVKALMDNPTLYLEKYVHELIPAVMTCIVSRQLCLRPDVDNHWALRDFAARLVAQICKHFSTTTNNIQSRITKTFTKSWVDEKTPWTTRYGSIAGLAELGHDVIKTLILPRLQQEGERIRSVLDGPVLSNIDRIGADHVQSLLLKHCAPVLAKLRPPPDNQDAYRAEFGSLGPLLCSQVVKARAQAALQAQQVNRTTLTITQPRPTLTLSQAPQPGPRTPGLLKVPGSIALPVQTLVSARAAAPPQPSPPPTKFIVMSSSSSAPSTQQVLSLSTSAPGSGSTTTSPVTTTVPSVQPIVKLVSTATTAPPSTAPSGPGSVQKYIVVSLPPTGEGKGGPTSHPSPVPPPASSPSPLSGSALCGGKQEAGDSPPPAPGTPKANGSQPNSGSPQPAP

SEQ ID NO: 6735 - protein, 509 aa, Homo sapiens
MEDIQTNAELKSTQEQSVPAESAAVLNDYSLTKSHEMENVDSGEGPANEDEDIGDDSMKVKDEYSERDENVLKSEPMGNAEEPEIPYSYSREYNEYENIKLERHVVSFDSSRPTSGKMNCDVCGLSCISFNVLMVHKRSHTGERPFQCNQCGASFTQKGNLLRHIKLHTGEKPFKCHLCNYACQRRDALTGHLRTHSVEKPYKCEFCGRSYKQRSSLEEHKERCRTFLQSTDPGDTASAEARHIKAEMGSERALVLDRLASNVAKRKSSMPQKFIGEKRHCFDVNYNSSYMYEKESELIQTRMMDQAINNAISYLGAEALRPLVQTPPAPTSEMVPVISSMYPIALTRAEMSNGAPQELEKKSIHLPEKSVPSERGLSPNNSGHDSTDTDSNHEERQNHIYQQNHMVLSRARNGMPLLKEVPRSYELLKPPPICPRDSVKVINKEGEVMDVYRCDHCRVLFLDYVMFTIHMGCHGFRDPFECNMCGYRSHDRYEFSSHIARGEHRALLK

SEQ ID NO: 6736 - protein, 2332 aa, Homo sapiens
MAARAAAAAAAAAARARARAGSGERRAPPGPRPAPGARDLEAGARGAAAAAAAPGPMLGGGGDGGGGLNSVHHHPLLPRHELNMAHNAGAAAAAGTHSAKSGGSEAALKEGGSAAALSSSSSSSAAAAAASSSSSSGPGSAMETGLLPNHKLKTVGEAPAAPPHQQHHHHHHAHHHHHHAHHLHHHHALQQQLNQFQQQQQQQQQQQQQQQQQQHPISNNNSLGGAGGGAPQPGPDMEQPQHGGAKDSAAGGQADPPGPPLLSKPGDEDDAPPKMGEPAGGRYEHPGLGALGTQQPPVAVPGGGGGPAAVPEFNNYYGSAAPASGGPGGRAGPCFDQHGGQQSPGMGMMHSASAAAAGAPGSMDPLQNSHEGYPNSQCNHYPGYSRPGAGGGGGGGGGGGGGSGGGGGGGGAGAGGAGAGAVAAAAAAAAAAAGGGGGGGYGGSSAGYGVLSSPRQQGGGMMMGPGGGGAASLSKAAAGSAAGGFQRFAGQNQHPSGATPTLNQLLTSPSPMMRSYGGSYPEYSSPSAPPPPPSQPQSQAAAAGAAAGGQQAAAGMGLGKDMGAQYAAASPAWAAAQQRSHPAMSPGTPGPTMGRSQGSPMDPMVMKRPQLYGMGSNPHSQPQQSSPYPGGSYGPPGPQRYPIGIQGRTPGAMAGMQYPQQQDSGDATWKETFWLMPPQYGQQGVSGYCQQGQQPYYSQQPQPPHLPPQAQYLPSQSQQRYQPQQDMSQEGYGTRSQPPLAPGKPNHEDLNLIQQERPSSLPDLSGSIDDLPTGTEATLSSAVSASGSTSSQGDQSNPAQSPFSPHASPHLSSIPGGPSPSPVGSPVGSNQSRSGPISPASIPGSQMPPQPPGSQSESSSHPALSQSPMPQERGFMAGTQRNPQMAQYGPQQTGPSMSPHPSPGGQMHAGISSFQQSNSSGTYGPQMSQYGPQGNYSRPPAYSGVPSASYSGPGPGMGISANNQMHGQGPSQPCGAVPLGRMPSAGMQNRPFPGNMSSMTPSSPGMSQQGGPGMGPPMPTVNRKAQEAAAAVMQAAANSAQSRQGSFPGMNQSGLMASSSPYSQPMNNSSSLMNTQAPPYSMAPAMVNSSAASVGLADMMSPGESKLPLPLKADGKEEGTPQPESKSKKSSSSTTTGEKITKVYELGNEPERKLWVDRYLTFMEERGSPVSSLPAVGKKPLDLFRLYVCVKEIGGLAQVNKNKKWRELATNLNVGTSSSAASSLKKQYIQYLFAFECKIERGEEPPPEVFSTGDTKKQPKLQPPSPANSGSLQGPQTPQSTGSNSMAEVPGDLKPPTPASTPHGQMTPMQGGRSSTISVHDPFSDVSDSSFPKRNSMTPNAPYQQGMSMPDVMGRMPYEPNKDPFGGMRKVPGSSEPFMTQGQMPNSSMQDMYNQSPSGAMSNLGMGQRQQFPYGASYDRRHEPYGQQYPGQGPPSGQPPYGGHQPGLYPQQPNYKRHMDGMYGPPAKRHEGDMYNMQYSSQQQEMYNQYGGSYSGPDRRPIQGQYPYPYSRERMQGPGQIQTHGIPPQMMGGPLQSSSSEGPQQNMWAARNDMPYPYQNRQGPGGPTQAPPYPGMNRTDDMMVPDQRINHESQWPSHVSQRQPYMSSSASMQPITRPPQPSYQTPPSLPNHISRAPSPASFQRSLENRMSPSKSPFLPSMKMQKVMPTVPTSQVTGPPPQPPPIRREITFPPGSVEASQPVLKQRRKITSKDIVTPEAWRVMMSLKSGLLAESTWALDTINILLYDDSTVATFNLSQLSGFLELLVEYFRKCLIDIFGILMEYEVGDPSQKALDHNAARKDDSQSLADDSGKEEEDAECIDDDEEDEEDEEEDSEKTESDEKSSIALTAPDAAADPKEKPKQASKFDKLPIKIVKKNNLFVVDRSDKLGRVQEFNSGLLHWQLGGGDTTEHIQTHFESKMEIPPRRRPPPPLSSAGRKKEQEGKGDSEEQQEKSIIATIDDVLSARPGALPEDANPGPQTESSKFPFGIQQAKSHRNIKLLEDEPRSRDETPLCTIAHWQDSLAKRCICVSNIVRSLSFVPGNDAEMSKHPGLVLILGKLILLHHEHPERKRAPQTYEKEEDEDKGVACSKDEWWWDCLEVLRDNTLVTLANISGQLDLSAYTESICLPILDGLLHWMVCPSAEAQDPFPTVGPNSVLSPQRLVLETLCKLSIQDNNVDLILATPPFSRQEKFYATLVRYVGDRKNPVCREMSMALLSNLAQGDALAARAIAVQKGSIGNLISFLEDGVTMAQYQQSQHNLMHMQPPPLEPPSVDMMCRAAKALLAMARVDENRSEFLLHEGRLLDISISAVLNSLVASVICDVLFQIGQL

SEQ ID NO: 6737 - protein, 1004 aa, Homo sapiens
MGELCRRDSALTALDEETLWEMMESHRHRIVRCICPSRLTPYLRQAKVLCQLDEEEVLHSPRLTNSAMRAGHLLDLLKTRGKNGAIAFLESLKFHNPDVYTLVTGLQPDVDFSNFSGLMETSKLTECLAGAIGSLQEELNQEKGQKEVLLRRCQQLQEHLGLAETRAEGLHQLEADHSRMKREVSAHFHEVLRLKDEMLSLSLHYSNALQEKELAASRCRSLQEELYLLKQELQRANMVSSCELELQEQSLRTASDQESGDEELNRLKEENEKLRSLTFSLAEKDILEQSLDEARGSRQELVERIHSLRERAVAAERQREQYWEEKEQTLLQFQKSKMACQLYREKVNALQAQVCELQKERDQAYSARDSAQREISQSLVEKDSLRRQVFELTDQVCELRTQLRQLQAEPPGVLKQEARTREPCPREKQRLVRMHAICPRDDSDCSLVSSTESQLLSDLSATSSRELVDSFRSSSPAPPSQQSLYKRVAEDFGEEPWSFSSCLEIPEGDPGALPGAKAGDPHLDYELLDTADLPQLESSLQPVSPGRLDVSESGVLMRRRPARRILSQVTMLAFQGDALLEQISVIGGNLTGIFIHRVTPGSAADQMALRPGTQIVMVDYEASEPLFKAVLEDTTLEEAVGLLRRVDGFCCLSVKVNTDGYKRLLQDLEAKVATSGDSFYIRVNLAMEGRAKGELQVHCNEVLHVTDTMFQGCGCWHAHRVNSYTMKDTAAHGTIPNYSRAQQQLIALIQDMTQQCTVTRKPSSGGPQKLVRIVSMDKAKASPLRLSFDRGQLDPSRMEGSSTCFWAESCLTLVPYTLVRPHRPARPRPVLLVPRAVGKILSEKLCLLQGFKKCLAEYLSQEEYEAWSQRGDIIQEGEVSGGRCWVTRHAVESLMEKNTHALLDVQLDSVCTLHRMDIFPIVIHVSVNEKMAKKLKKGLQRLGTSEEQLLEAARQEEGDLDRAPCLYSSLAPDGWSDLDGLLSCVRQAIADEQKKVVWTEQSPR

SEQ ID NO: 6738 - protein, 79 aa, Homo sapiens
MNGFGRLEHFSGAVYEGQFKDNMFHGLGTYTFPNGAKYTGNFNENRVEGEGEYTDIQGLEWSGNFHFTAAPDLKLKLHM

SEQ ID NO: 6739 - protein, 1188 aa, Homo sapiens
MKAADEPAYLTVGTDVSAKYRGAFCEAKIKTVKRLVKVKVLLKQDNTTQLVQDDQVKGPLRVGAIVETRTSDGSFQEAIISKLTDASWYTVVFDDGDERTLRRTSLCLKGERHFAESETLDQLPLTNPEHFGTPVIAKKTNRGRRSSLPVTEDEKEEESSEEEDEDKRRLNDELLGKVVSVVSATERTEWYPALVISPSCNDDITVKKDQCLVRSFIDSKFYSIARKDIKEVDILNLPESELSTKPGLQKASIFLKTRVVPDNWKMDISEILESSSSDDEDGPAEENDEEKEKEAKKTEEEVPEEELDPEERDNFLQQLYKFMEDRGTPINKPPVLGYKDLNLFKLFRLVYHQGGCDNIDSGAVWKQIYMDLGIPILNSAASYNVKTAYRKYLYGFEEYCRSANIQFRTVHHHEPKVKEEKKDLEESMEEALKLDQEMPLTEVKSEPEENIDSNSESEREEIELKSPRGRRRIARDVNSIKKEIEEEKTEDKLKDNDTENKDVDDDYETAEKKENELLLGRKNTPKQKEKKIKKQEDSDKDSDEEEEKSQEREETESKCDSEGEEDEEDMEPCLTGTKVKVKYGRGKTQKIYEASIKSTEIDDGEVLYLVHYYGWNVRYDEWVKADRIIWPLDKGGPKKKQKKKAKNKEDSEKDEKRDEERQKSKRGRPPLKSTLSSNMPYGLSKTANSEGKSDSCSSDSETEDALEKNLINEELSLKDELEKNENLNDDKLDEENPKISAHILKENDRTQMQPLETLKLEVGENEQIVQIFGNKMEKTEEVKKEAEKSPKGKGRRSKTKDLSLEIIKISSFGQNEAGSEPHIEAHSLELSSLDNKNFSSATEDEIDQCVKEKKLKRKILGQSSPEKKIRIENGMEMTNTVSQERTSDCIGSEGMKNLNFEQHFERENEGMPSLIAESNQCIQQLTSERFDSPAEETVNIPLKEDEDAMPLIGPETLVCHEVDLDDLDEKDKTSIEDVAVESSESNSLVSIPPALPPVVQHNFSVASPLTLSQDESRSVKSESDITIEVDSIAEESQEGLCERESANGFETNVASGTCSIIVQERESREKGQKRPSDGNSGLMAKKQKRTPKRTSAAAKNEKNGTDELDNMNSTERISFLQEKLQEIRKYYMSLKSEVATIDRRRKRLKKKDREVSHAGASMSSASSDTGMSPSSSSPPQNVLAVECR

SEQ ID NO: 6740 - protein, 472 aa, Homo sapiens
MSRRVVRQSKFRHVFGQAAKADQAYEDIRVSKVTWDSSFCAVNPKFLAIIVEAGGGGAFIVLPLAKTGRVDKNYPLVTGHTAPVLDIDWCPHNDNVIASASDDTTIMVWQIPDYTPMRNITEPIITLEGHSKRVGILSWHPTARNVLLSAGGDNVIIIWNVGTGEVLLSLDDMHPDVIHSVCWNSNGSLLATTCKDKTLRIIDPRKGQVVAERFAAHEGMRPMRAVFTRQGHIFTTGFTRMSQRELGLWDPNNFEEPVALQEMDTSNGVLLPFYDPDSSIVYLCGKGDSSIRYFEITDEPPFVHYLNTFSSKEPQRGMGFMPKRGLDVSKCEIARFYKLHERKCEPIIMTVPRKSDLFQDDLYPDTPGPEPALEADEWLSGQDAEPVLISLRDGYVPPKHRELRVTKRNILDVRPPSGPRRSQSASDAPLSQQHTLETLLEEIKALRERVQAQEQRITALENMLCELVDGTD

SEQ ID NO: 6741 - protein, 276 aa, Homo sapiens
MSEEVTYATLTFQDSAGARNNRDGNNLRKRGHPAPSPIWRHAALGLVTLCLMLLIGLVTLGMMFLQISNDINSDSEKLSQLQKTIQQQQDNLSQQLGNSNNLSMEEEFLKSQISSVLKRQEQMAIKLCQELIIHTSDHRCNPCPKMWQWYQNSCYYFTTNEEKTWANSRKDCIDKNSTLVKIDSLEEKDFLMSQPLLMFSFFWLGLSWDSSGRSWFWEDGSVPSPSLFSTKELDQINGSKGCAYFQKGNIYISRCSAEIFWICEKTAAPVKTEDLD

SEQ ID NO: 6742 - protein, 256 aa, Homo sapiens
MKLTRKMVLTRAKASELHSVRKLNCWGSRLTDISICQEMPSLEVITLSVNSISTLEPVSRCQRLSELYLRRNRIPSLAELFYLKGLPRLRVLWLAENPCCGTSPHRYRMTVLRTLPRLQKLDNQAVTEEELSRALSEGEEITAAPEREGTGHGGPKLCCTLSSLSSAAETGRDPLDSEEEATSGAQDERGLKPPSRGQFPSLSARDASSSHRGRNVLTAILLLLRELDAEGLEAVQQTVGSRLQALRGEEVQEHAE

SEQ ID NO: 6743 - protein, 1006 aa, Homo sapiens
MHYDGHVRFDLPPQGSVLARNVSTRSCPPRTSPAVDLEEEEEESSVDGKGDRKSTGLKLSKKKARRRHTDDPSKECFTLKFDLNVDIETEIVPAMKKKSLGEVLLPVFERKGIALGKVDIYLDQSNTPLSLTFEAYRFGGHYLRVKAPAKPGDEGKVEQGMKDSKSLSLPILRPAGTGPPALERVDAQSRRESLDILAPGRRRKNMSEFLGEASIPGQEPPTPSSCSLPSGSSGSTNTGDSWKNRAASRFSGFFSSGPSTSAFGREVDKMEQLEGKLHTYSLFGLPRLPRGLRFDHDSWEEEYDEDEDEDNACLRLEDSWRELIDGHEKLTRRQCHQQEAVWELLHTEASYIRKLRVIINLFLCCLLNLQESGLLCEVEAERLFSNIPEIAQLHRRLWASVMAPVLEKARRTRALLQPGDFLKGFKMFGSLFKPYIRYCMEEEGCMEYMRGLLRDNDLFRAYITWAEKHPQCQRLKLSDMLAKPHQRLTKYPLLLKSVLRKTEEPRAKEAVVAMIGSVERFIHHVNACMRQRQERQRLAAVVSRIDAYEVVESSSDEVDKLLKEFLHLDLTAPIPGASPEETRQLLLEGSLRMKEGKDSKMDVYCFLFTDLLLVTKAVKKAERTRVIRPPLLVDKIVCRELRDPGSFLLIYLNEFHSAVGAYTFQASGQALCRGWVDTIYNAQNQLQQLRAQEPPGSQQPLQSLEEEEDEQEEEEEEEEEEEEGEDSGTSAASSPTIMRKSSGSPDSQHCASDGSTETLAMVVVEPGDTLSSPEFDSGPFSSQSDETSLSTTASSATPTSELLPLGPVDGRSCSMDSAYGTLSPTSLQDFVAPGPMAELVPRAPESPRVPSPPPSPRLRRRTPVQLLSCPPHLLKSKSEASLLQLLAGAGTHGTPSAPSRSLSELCLAVPAPGIRTQGSPQEAGPSWDCRGAPSPGSGPGLVGCLAGEPAGSHRKRCGDLPSGASPRVQPEPPPGVSAQHRKLTLAQLYRIRTTLLLNSTLTASEV

SEQ ID NO: 6744 - protein, 364 aa, Homo sapiens
MTSELDIFVGNTTLIDEDVYRLWLDGYSVTDAVALRVRSGILEQTGATAAVLQSDTMDHYRTFHMLERLLHAPPKLLHQLIFQIPPSRQALLIERYYAFDEAFVREVLGKKLSKGTKKDLDDISTKTGITLKSCRRQFDNFKRVFKVVEEMRGSLVDNIQQHFLLSDRLARDYAAIVFFANNRFETGKKKLQYLSFGDFAFCAELMIQNWTLGAVGEAPTDPDSQMDDMDMDLDKEFLQDLKELKVLVADKDLLDLHKSLVCTALRGKLGVFSEMEANFKNLSRGLVNVAAKLTHNKDVRDLFVDLVEKFVEPCRSDHWPLSDVRFFLNQYSASVHSLDGFRHQALWDRYMGTLRGCLLRLYHD

SEQ ID NO: 6745 - protein, 825 aa, Homo sapiens
MVGKSQQTDVIEKKKHMAIPKSSSPKATHRIGNTSGSKGSYSAKAYESIRVSSELQQTWTKRKHGQEMTSKSLQTDTIVEEKKEVKLVEETVVPEEKSADVREAAIELPESVQDVEIPPNIPSVQLKMDRSQQTSRTGYWTMMNIPPVEKVDKEQQTYFSESEIVVISRPDSSSTKSKEDALKHKSSGKIFASEHPEFQPATNSNEEIGQKNISRTSFTQETKKGPPVLLEDELREEVTVPVVQEGSAVKKVASAEIEPPSTEKFPAKIQPPLVEEATAKAEPRPAEETHVQVQPSTEETPDAEAATAVAENSVKVQPPPAEEAPLVEFPAEIQPPSAEESPSVELLAEILPPSAEESPSEEPPAEILPPPAEKSPSVELLGEIRSPSAQKAPIEVQPLPAEGALEEAPAKVEPPTVEETLADVQPLLPEEAPREEARELQLSTAMETPAEEAPTEFQSPLPKETTAEEASAEIQLLAATEPPADETPAEARSPLSEETSAEEAHAEVQSPLAEETTAEEASAEIQLLAAIEAPADETPAEAQSPLSEETSAEEAPAEVQSPSAKGVSIEEAPLELQPPSGEETTAEEASAAIQLLAATEASAEEAPAEVQPPPAEEAPAEVQPPPAEEAPAEVQPPPAEEAPAEVQPPPAEEAPAEVQPPPAEEAPAEVQPPPAEEAPAEVQSLPAEETPIEETLAAVHSPPADDVPAEEASVDKHSPPADLLLTEEFPIGEASAEVSPPPSEQTPEDEALVENVSTEFQSPQVAGIPAVKLGSVVLEGEAKFEEVSKINSVLKDLSNTNDGQAPTLEIESVFHIELKQRPPEL

SEQ ID NO: 6746 - protein, 502 aa, Homo sapiens
MQSCESSGDSADDPLSRGLRRRGQPRVVVIGAGLAGLAAAKALLEQGFTDVTVLEASSHIGGRVQSVKLGHATFELGATWIHGSHGNPIYHLAEANGLLEETTDGERSVGRISLYSKNGVACYLTNHGRRIPKDVVEEFSDLYNEVYNLTQEFFRHDKPVNAESQNSVGVFTREEVRNRIRNDPDDPEATKRLKLAMIQQYLKVESCESSSHSMDEVSLSAFGEWTEIPGAHHIIPSGFMRVVELLAEGIPAHVIQLGKPVRCIHWDQASARPRGPEIEPRGVLKRQYTSFFRPGLPTEKVAAIHRLGIGTTDKIFLEFEEPFWGPECNSLQFVWEDEAESHTLTYPPELWYRKICGFDVLYPPERYGHVLSGWICGEEALVMEKCDDEAVAEICTEMLRQFTGNPNIPKPRRILRSAWGSNPYFRGSYSYTQVGSSGADVEKLAKPLPYTESSKTAPMQVLFSGEATHRKYYSTTHGALLSGQREAARLIEMYRDLFQQGT

SEQ ID NO: 6747 - protein, 627 aa, Homo sapiens
MNASSEGESFAGSVQIPGGTTVLVELTPDIHICGICKQQFNNLDAFVAHKQSGCQLTGTSAAAPSTVQFVSEETVPATQTQTTTRTITSETQTITGCQFKTAYGMKDMERHLKIHTGDKPHKCEVCGKCFSRKDKLKTHMRCHTGVKPYKCKTCDYAAADSSSLNKHLRIHSDERPFKCQICPYASRNSSQLTVHLRSHTGDAPFQCWLCSAKFKISSDLKRHMRVHSGEKPFKCEFCNVRCTMKGNLKSHIRIKHSGNNFKCPHCDFLGDSKATLRKHSRVHQSEHPEKCSECSYSCSSKAALRIHERIHCTDRPFKCNYCSFDTKQPSNLSKHMKKFHGDMVKTEALERKDTGRQSSRQVAKLDAKKSFHCDICDASFMREDSLRSHKRQHSEYSESKNSDVTVLQFQIDPSKQPATPLTVGHLQVPLQPSQVPQFSEGRVKIIVGHQVPQANTIVQAAAAAVNIVPPALVAQNPEELPGNSRLQILRQVSLIAPPQSSRCPSEAGAMTQPAVLLTTHEQTDGATLHQTLIPTASGGPQEGSGNQTFITSSGITCTDFEGLNALIQEGTAEVTVVSDGGQNIAVATTAPPVFSSSSQQELPKQTYSIIQGAAHPALLCPADSIPD

SEQ ID NO: 6748 - protein, 321 aa, Homo sapiens
MERFVRVPYGLYQGYGSTVPLGQPGLSGHKQPDWRQNMGPPTFLARPGLLVPANAPDYCIDPYKRAQLKAILSQMNPSLSPRLCKPNTKEVGVQVSPRVDKAVQCSLGPRTLSSCSPWDGRDPQEPLPACGVTSPATGRRGLIRLRRDGDEAESKALPGPAEASQPQPPSRRSGADRQEEPGQLEESGEKDAPCPQETKSKQVPGDAASEPLRRPNFQFLEPKYGYFHCKDCKTRWESAYVWCISGTNKVYFKQLCCKCQKSFNPYRVEAIQCQTCSKSHCSCPQKKRHIDLRRPHRQELCGRCKDKRFSCGNIYSFKYVM

SEQ ID NO: 6749 - protein, 314 aa, Homo sapiens
MWRQEEELREQEKKIRKQEEKMWRQEERLREQEGKMREQEEKMRRQEKRLREQEKELREQEKELREQKKLREQEEQMQEQEEKMWEQEEKMREQEEKMWRQEERLWEQEKQMREQEQKMRDQEERMWEQDERLREKEERMREQEKMWEQVEKMREEKKMQEQEKKTRDQEEKMQEEERIREREKKMREEEETMREQEEKMQKQEENMWEQEEKEWQQQRLPEQKEKLWEQEKMQEQEEKIWEQEEKIRDQEEMWGQEKKMWRQEKMREQEDVGAGGDAREGGEDTRSEREDAGEAARARGAVLRALPPSLQSSL

SEQ ID NO: 6750 - protein, 894 aa, Homo sapiens
RSQVLQTYVAFLKSSEEVEMQFQSLKEFYETEIPQKEQDDAKAKHCSDSAEKQWQLFLKKSFITQDLGLEFLNLINMAKENEILDVKNEVYLMKNTMENQKAEREELSLLRLAWQLKATESKPGKQQWAAFKEQLKKTSHNLKLLQEALMPVSALDLGGSLQFILDLRQKWNDMKPQFQQLNDEVQYIMKESEELTGRGAPVKEKSQQLKDLIHFHQKQKERIQDYEDILYKVVQFHQVKEELGRLIKSRELEFVEQPKELGDAHDVQIHLRCSQEKQARVDHLHRLALSLGVDIISSVQRPHCSNVSAKNLQQQLELLEEDSMKWRAKAEEYGRTLSRSVEYCAMRDEINELKDSFKDIKKKFNNLKFNYTKKNEKSRNLKALKYQIQQVDMYAEKMQALKRKMEKVSNKTSDSFLNYPSDKVNVLLEVMKDLQKHVDDFDKVVTDYKKNLDLTEHFQEVIEECHFWYEDASATVVRVGKYSTECKTKEAVKILHQQFNKFIAPSVPQQEERIQEATDLAQHLYGLEEGQKYIEKIVTKHKEVLESVTELCESLTELEEKLKQGDVLKMNPNLEDFHYDYIDLLKEPAKNKQTIFNEERNKGQVQVADLLGINGTGEERLPQDLKVSTDKEGGVQDLLLPEDMLSGEEYECVSPDDISLPPLPGSPESPLAPSDMEVEEPVSSSLSLHISSYGVQAGTSSPGDAQESVLPPPVAFADACNDKRETFSSHFERPYLQFKAEPPLTSRGFVEKSTALHRISAEHPESMMSEVHERALQQHPQAQGGLLETREKMHADNNFTKTQDRLHASSDAFSGLRFQSGTSRGYQRQMVPREEIKSTSAKSSVVSLADQAPNFSRLLSNVTVMEGSPVTLEVEVTGFPEPTLTWWVAYNDKP

SEQ ID NO: 6751 - protein, 701 aa, Homo sapiens
MVVSTFTDMDTFPNNFPPGGDSGLTGSQSEFQKMLIDERLRCEHHKANYQTLKAEHTRLQNEHVKLQNELKHLFNEKQTQQEKLQLLLEELRGELVEKTKDLEEMKLQILTPQKLELLRAQIQQELETPMRERFRNLDEEVEKYRAVYNKLRYEHTFLKSEFEHQKEEYARILDEGKIKYESEIARLEEDKEELRNQLLNVDLTKDSKRVEQLAREKVYLCQKLKGLEAEVAELKAEKENSEAQVENAQRIQVRQLAEMQATVRSLEAEKQSANLRAERLEKELQSSSEQNTFLINKLHKAEREINTLSSKVKELKHSNKLEITDIKLETARAKSELERERNKIQSELDGLQSDNEILKAAVEHHKVLLVEKDRELIRKVQAAKEEGYQKLVVLQDEKLELENRLADLEKMKVEHDVWRQSEKDQYEEKLRASQMAEEITRKELQSVRLKLQQQIVTIENAEKEKNENSDLKQQISSLQIQVTSLAQSENDLLNSNQMLKEMVERLKQECRNFRSQAEKAQLEAEKTLEEKQIQWLEEKHKLHERITDREEKYNQAKEKLQRAAIAQKKRKSLHENKLKRLQEKVEVLEAKKEELETENQVLNRQNVPFEDYTRLQKRLKDIQRRHNEFRSLILVPNMPPTASINPVSFQSSAMVPSMELPFPPHMQEEQHQRELSLLRKRLEELETTQRKQLEELGSSGE

SEQ ID NO: 6752 - protein, 636 aa, Homo sapiens
MTTWSLRRRPARTLGLLLLVVLGFLVLRRLDWSTLVPLRLRHRQLGLQAKGWNFMLEDSTFWIFGGSIHYFRVPREYWRDRLLKMKACGLNTLTTYVPWNLHEPERGKFDFSGNLDLEAFVLMAAEIGLWVILRPGPYICSEMDLGGLPSWLLQDPGMRLRTTYKGFTEAVDLYFDHLMSRVVPLQYKRGGPIIAVQVENEYGSYNKDPAYMPYVKKALEDRGIVELLLTSDNKDGLSKGIVQGVLATINLQSTHELQLLTTFLFNVQGTQPKMVMEYWTGWFDSWGGPHNILDSSEVLKTVSAIVDAGSSINLYMFHGGTNFGFMNGAMHFHDYKSDVTSYDYDAVLTEAGDYTAKYMKLRDFFGSISGIPLPPPPDLLPKMPYEPLTPVLYLSLWDALKYLGEPIKSEKPINMENLPVNGGNGQSFGYILYETSITSSGILSGHVHDRGQVFVNTVSIGFLDYKTTKIAVPLIQGYTVLRILVENRGRVNYGENIDDQRKGLIGNLYLNDSPLKNFRIYSLDMKKSFFQRFGLDKWSSLPETPTLPAFFLGSLSISSTPCDTFLKLEGWEKGVVFINGQNLGRYWNIGPQKTLYLPGPWLSSGINQVIVFEETMAGPALQFTETPHLGRNQYIK

SEQ ID NO: 6753 - protein, 595 aa, Homo sapiens
MAGAIASRMSFSSLKRKQPKTFTVRIVTMDAEMEFNCEMKWKGKDLFDLVCRTLGLRETWFFGLQYTIKDTVAWLKMDKKVLDHDVSKEEPVTFHFLAKFYPENAEEELVQEITQHLFFLQVKKQILDEKIYCPPEASVLLASYAVQAKYGDYDPSVHKRGFLAQEELLPKRVINLYQMTPEMWEERITAWYAEHRGRARDEAEMEYLKIAQDLEMYGVNYFAIRNKKGTELLLGVDALGLHIYDPENRLTPKISFPWNEIRNISYSDKEFTIKPLDKKIDVFKFNSSKLRVNKLILQLCIGNHDLFMRRRKADSLEVQQMKAQAREEKARKQMERQRLAREKQMREEAERTRDELERRLLQMKEEATMANEALMRSEETADLLAEKAQITEEEAKLLAQKAAEAEQEMQRIKATAIRTEEEKRLMEQKVLEAEVLALKMAEESERRAKEADQLKQDLQEAREAERRAKQKLLEIATKPTYPPMNPIPAPLPPDIPSFNLIGDSLSFDFKDTDMKRLSMEIEKEKVEYMEKSKHLQEQLNELKTEIEALKLKERETALDILHNENSDRGGSSKHNTIKKLTLQSAKSRVAFFEEL

SEQ ID NO: 6754 - protein, 1606 aa, Homo sapiens
MVVFINAKIKSLIKLFKKKTVSNLDEESRWTVHYTAPWHQQENVFLPTTRPPCVEDLHRQAKLNLKSVLRECDKLRHDGYRSSQYYSQGPTFAANASPFCDDYQDEDEETDQKCSLSSSEEERFISIRRPKTPASSDFSDLNTQTNWTKSLPLPTPEEKMRQQAQTVQADVVPINITGENFDRQASLRRSLIYTDTLVRRPKKVKRRKTITGVPDNIQKELASGTGQDDADGHSVYTPDHYSTLGRFNSCRSAGQRSETRDSSCQTEDVKVVPPSMRRIRAQKGQGIAAQMGHFSGSSGNMSVLSDSAGIVFPSRLDSDAGFHSLPRSGARANIQSLEPRLGALGPAGDMNGTFLYQRGHPQADENLGHLGGASGTGTLLRPKSQELRHFESENIMSPACVVSPHATYSTSIIPNATLSSSSEVIAIPTAQSAGQRESKSSGSSHARIKSRDHLISRHAVKGDPQSPGRHWNEGHATILSQDLDPHSPGEPALLSLCDSAVPLNAPANRENGSQAMPYNCRNNLAFPAHPQDVDGKSESSYSGGGGHSSSEPWEYKSSGNGRASPLKPHLATPGYSTPTSNMSSCSLDQTSNKEDAGSLYSEDHDGYCASVHTDSGHGSGNLCNSSDGFGNPRHSVINVFVGRAQKNQGDRSNYQDKSLSRNISLKKAKKPPLPPSRTDSLRRIPKKSSQCNGQVLNESLIATLQHSLQLSLPGKSGSSPSQSPCSDLEEPWLPRSRSQSTVSAGSSMTSATTPNVYSLCGATPSQSDTSSVKSEYTDPWGYYIDYTGMQEDPGNPAGGCSTSSGVPTGNGPVRHVQEGSRATMPQVPGGSVKPKIMSPEKSHRVISPSSGYSSQSNTPTALTPVPVFLKSVSPANGKGKPKPKVPERKSSLISSVSISSSSTSLSSSTSTEGSGTMKKLDPAVGSPPAPPPPPVPSPPFPCPADRSPFLPPPPPVTDCSQGSPLPHSPVFPPPPPEALIPFCSPPDWCLSPPRPALSPILPDSPVSLPLPPPLLPSSEPPPAPPLDPKFMKDTRPPFTNSGQPESSRGSLRPPSTKEETSRPPMPLITTEALQMVQLRPVRKNSGAEAAQLSERTAQEQRTPVAPQYHLKPSAFLKSRNSTNEMESESQPASVTSSLPTPAKSSSQGDHGSAAERGGPVSRSPGAPSAGEAEARPSPSTTPLPDSSPSRKPPPISKKPKLFLVVPPPQKDFAVEPAENVSEALRAVPSPTTGEEGSVHSREAKESSAAQAGSHATHPGTSVLEGGAAGSMSPSRVEANVPMVQPDVSPAPKQEEPAENSADTGGDGESCLSQQDGAAGVPETNAAGSSSEACDFLKEDGNDEVMTPSRPRTTEDLFAAIHRSKRKVLGRRDSDDDHSRNHSPSPPVTPTGAAPSLASPKQVGSIQRSIRKSSTSSDNFKALLLKKGSRSDTSARMSAAEMLKNTDPRFQRSRSEPSPDAPESPSSCSPSKNRRAQEEWAKNEGLMPRSLSFSGPRYGRSRTPPSAASSRYSMRNRIQSSPMTVISEGEGEAVEPVDSIARGALGAAEGCSLDGLAREEMDEGGLLCGEGPAASLQPQAPGPVDGTASAEGREPSPQCGGSLSEES

SEQ ID NO: 6755 - protein, 506 aa, Homo sapiens
MDVRLYPSAPAVGARPGAEPAGLAHLDYYHGGKFDGDSAYVGMSDGNPELLSTSQTYNGQSENNEDYEIPPITPPNLPEPSLLHLGDHEASYHSLCHGLTPNGLLPAYSYQAMDLPAIMVSNMLAQDSHLLSGQLPTIQEMVHSEVAAYDSGRPGPLLGRPAMLASHMSALSQSQLISQMGIRSSIAHSSPSPPGSKSATPSPSSSTQEEESEVHFKISGEKRPSADPGKKAKNPKKKKKKDPNEPQKPVSAYALFFRDTQAAIKGQNPSATFGDVSKIVASMWDSLGEEQKQAYKRKTEAAKKEYLKALAAYRASLVSKSSPDQGETKSTQANPPAKMLPPKQPMYAMPGLASFLTPSDLQAFRSGASPASLARTLGSKSLLPGLSASPPPPPSFPLSPTLHQQLSLPPHAQGALLSPPVSMSPAPQPPVLPTPMALQVQLAMSPSPPGPQDFPHISEFPSSSGSCSPGPSNPTSSGDWDSSYPSGECGISTCSLLPRDKSLYLT

SEQ ID NO: 6756 - protein, 465 aa, Homo sapiens
MGSGSSSYRPKAIYLDIDGRIQKHSVQSETCGHQATLRAFKINELKAEVANHLAVLEKRVELEGLKVVEIEKCKSDIKKMREELAARSSRTNCPCKYSFLDNHKKLTPRRDVPTYPKYLLSPETIEALRKPTFDVWLWEPNEMLSCLEHMYHDLGLVRDFSINPVTLRRWLFCVHDNYRNNPFHNFRHCFCVAQMMYSMVWLCSLQEKFSQTDILILMTAAICHDLDHPGYNNTYQINARTELAVRYNDISPLENHHCAVAFQILAEPECNIFSNIPPDGFKQIRQGMITLILATDMARHAEIMDSFKEKMENFDYSNEEHMTLLKMILIKCCDISNEVRPMEVAEPWVDCLLEEYFMQSDREKSEGLPVAPFMDRDKVTKATAQIGFIKFVLIPMFETVTKLFPMVEEIMLQPLWESRDRYEELKRIDDAMKELQKKTDSLTSGATEKSRERSRDVKNSEGDCA

SEQ ID NO: 6757 - protein, 424 aa, Homo sapiens
MSDHGDVSLPPEDRVRALSQLGSAVEVNEDIPPRRYFRSGVEIIRMASIYSEEGNIEHAFILYNKYITLFIEKLPKHRDYKSAVIPEKKDTVKKLKEIAFPKAEELKAELLKRYTKEYTEYNEEKKKEAEELARNMAIQQELEKEKQRVAQQKQQQLEQEQFHAFEEMIRNQELEKERLKIVQEFGKVDPGLGGPLVPDLEKPSLDVFPTLTVSSIQPSDCHTTVRPAKPPVVDRSLKPGALSNSESIPTIDGLRHVVVPGRLCPQFLQLASANTARGVETCGILCGKLMRNEFTITHVLIPKQSAGSDYCNTENEEELFLIQDQQGLITLGWIHTHPTQTAFLSSVDLHTHCSYQMMLPESVAIVCSPKFQETGFFKLTDHGLEEISSCRQKGFHPHSKDPPLFCSCSHVTVVDRAVTITDLR

SEQ ID NO: 6758 - protein, 659 aa, Homo sapiens
MNKSLGPVSFKDVAVDFTQEEWQQLDPEQKITYRDVMLENYSNLVSVGYHIIKPDVISKLEQGEEPWIVEGEFLLQSYPDEVWQTDDLIERIQEEENKPSRQTVFIETLIEEREYISSDGSYARMKADECSGCGKSLLHIKLEKTHPGDQAYEFNQNGEPYTLNEESLYQKIRILEKPFEYIECQKAFQKDTVFVNHMEEKPYKWNGSEIAFLQMSDLTVHQTSHMEMKPYECSECGKSFCKKSKFIIHQRTHTGEKPYECNQCGKSFCQKGTLTVHQRTHTGEKPYECNECGKNFYQKLHLIQHQRTHSGEKPYECSYCGKSFCQKTHLTQHQRTHSGERPYVCHDCGKTFSQKSALNDHQKIHTGVKLYKCSECGKCFCRKSTLTTHLRTHTGEKPYECNECGKFFSRLSYLTVHYRTHSGEKPYECNECGKTFYLNSALMRHQRVHTGEKPYECNECGKLFSQLSYLTIHHRTHSGVKPYECSECGKTFYQNSALCRHRRIHKGEKPYECYICGKFFSQMSYLTIHHRIHSGEKPYECSECGKTFCQNSALNRHQRTHTGEKAYECYECGKCFSQMSYLTIHHRIHSGEKPFECNECGKAFSRMSYLTVHYRTHSGEKPYECTECGKKFYHKSAFNSHQRIHRRGNMNVIDVGRLL

SEQ ID NO: 6759 - protein, 554 aa, Homo sapiens
MNVLLFWKTFLLYNQGPEYHYLHQMLGLGLCLSRASASVLNLNCSLILLPMCRTLLAYLRGSQKVPSRRTRRLLDKSRTFHITCGVTICIFSGVHVAAHLVNALNFSVNYSEDFVELNAARYRDEDPRKLLFTTVPGLTGVCMVVVLFLMITASTYAIRVSNYDIFWYTHNLFFVFYMLLTLHVSGGLLKYQTNLDTHPPGCISLNRTSSQNISLPEYFSEHFHEPFPEGFSKPAEFTQHKFVKICMEEPRFQANFPQTWLWISGPLCLYCAERLYRYIRSNKPVTIISVMSHPSDVMEIRMVKENFKARPGQYITLHCPSVSALENHPFTLTMCPTETKATFGVHLKIVGDWTERFRDLLLPPSSQDSEILPFIQSRNYPKLYIDGPFGSPFEESLNYEVSLCVAGGIGVTPFASILNTLLDDWKPYKLRRLYFIWVCRDIQSFRWFADLLCMLHNKFWQENRPDYVNIQLYLSQTDGIQKIIGEKYHALNSRLFIGRPRWKLLFDEIAKYNRGKTVGVFCCGPNSLSKTLHKLSNQNNSYGTRFEYNKESFS

SEQ ID NO: 6760 - protein, 611 aa, Homo sapiens
MSEIPSTIVSKNMTNDKNSLESMNISSSSSTEENPKKQARKNEEHGPDPSANPFHLSGDVDFFLLRDQERNKALSERQQQKTMRVHQKMTYSSKVSAKHTSLRRQLQLEDKQEDLEARAEAEHQRAFRDYTTWKLTLTKEKNVEPENMSGYIKQKRQMFLLQYALDVKRREIQRLETLATKEEARLERAEKSLEKDAALFDEFVRENDCSSVQAMRAAEKETKAKIEKILEIRDLTTQIVNIKSEISRFEDTLKHYKVYKDFLYKLSPKEWLEEQEKKHSFLKKAKEVSEASKESSVNSTPGDKGPGIKGKASSMWAKEGQGTKKPWRFLQTMRLGRSPSYLSSPQQGSQPSESSGGDSRGSNSPIPPTQEDTDSDGEEPQLYFTEPQQLLDVFRELEEQNLSLIQNSQETEKTLEELSHTLKHTQIRMDREVNQLKQWVTTMMMSITKEEDTAAELELKARVFHFGEYKGDQQDKLLESLNCKVLDVYRHCTGTQQEANLGTVQMLTIIEHQLDELLENLEHVPQVKIEQAERAKEKERRIRLREEKLQMQKILQEEHLQRARARAQAEIKKKRGRTLVCRSRPPAHRIKQQSEHTLMDKEEEELLFFFT

SEQ ID NO: 6761 - protein, 172 aa, Homo sapiens
MPRRAENWDEAEVGAEEAGVEEYGPEEDGGEESGAEESGPEESGPEELGAEEEMEAGRPRPVLRSVNSREPSQVIFCNRSPRVVLPVWLNFDGEPQPYPTLPPGTGRRIHSYRVYTLKERCLQVVRSLVKPENYRRLDIVRSLYEDLEDHPNVQKDLERLTQERIAHQRMGD

SEQ ID NO: 6762 - protein, 699 aa, Homo sapiens
MKIAVLFCFFLLIIFQTDFGKNEEIPRKQRRKIYHRRLRKSSTSHKHRSNRQLGIQQTTVFTPVARLPIVNFDYSMEEKFESFSSFPGVESSYNVLPGKKGHCLVKGITMYNKAVWSPEPCTTCLCSDGRVLCDETMCHPQRCPQTVIPEGECCPVCSATVSYSLLSGIALNDRNEFSGDSSEQREPTNLLHKQLPPPQVGMDRIVRKEALQSEEDEEVKEEDTEQKRETPESRNQGQLYSEGDSRGGDRKQRPGEERRLAHQQQRQGREEEEDEEEEGEEGEEDEEDEEDPVRGDMFRMPSRSPLPAPPRGTLRLPSGCSLSYRTISCINAMLTQIPPLTAPQITSLELTGNSIASIPDEAFNGLPNLERLDLSKNNITSSGIGPKAFKLLKKLMRLNMDGNNLIQIPSQLPSTLEELKVNENNLQAIDEESLSDLNQLVTLELEGNNLSEANVNPLAFKPLKSLAYLRLGKNKFRIIPQGLPGSIEELYLENNQIEEITEICFNHTRKINVIVLRYNKIEENRIAPLAWINQENLESIDLSYNKLYHVPSYLPKSLLHLVLLGNQIERIPGYVFGHMEPGLEYLYLSFNKLADDGMDRVSFYGAYHSLRELFLDHNDLKSIPPGIQEMKALHFLRLNNNKIRNILPEEICNAEEDDDSNLEHLHLENNYIKIREIPSYTFSCIRSYSSIVLKPQNIK

SEQ ID NO: 6763 - protein, 315 aa, Homo sapiens
MQRRSRGINTGLILLLSQIFHVGINNIPPVTLATLALNIWFFLNPQKPLYSSCLSVEKCYQQKDWQRLLLSPLHHADDWHLYFNMASMLWKGINLERRLGSRWFAYVITAFSVLTGVVYLLLQFAVAEFMDEPDFKRSCAVGFSGVLFALKVLNNHYCPGGFVNILGFPVPNRFACWVELVAIHLFSPGTSFAGHLAGILVGLMYTQGPLKKIMEACAGGFSSSVGYPGRQYYFNSSGSSGYQDYYPHGRPDHYEEAPRNYDTYTAGLSEEEQLERALQASLWDRGNTRNSPPPYGFHLSPEEMRRQRLHRFDSQ

SEQ ID NO: 6764 - protein, 1240 aa, Homo sapiens
MARQPPPPWVHAAFLLCLLSLGGAIEIPMDPSIQNELTQPPTITKQSAKDHIVDPRDNILIECEAKGNPAPSFHWTRNSRFFNIAKDPRVSMRRRSGTLVIDFRSGGRPEEYEGEYQCFARNKFGTALSNRIRLQVSKSPLWPKENLDPVVVQEGAPLTLQCNPPPGLPSPVIFWMSSSMEPITQDKRVSQGHNGDLYFSNVMLQDMQTDYSCNARFHFTHTIQQKNPFTLKVLTTRGVAERTPSFMYPQGTASSQMVLRGMDLLLECIASGVPTPDIAWYKKGGDLPSDKAKFENFNKALRITNVSEEDSGEYFCLASNKMGSIRHTISVRVKAAPYWLDEPKNLILAPGEDGRLVCRANGNPKPTVQWMVNGEPLQSAPPNPNREVAGDTIIFRDTQISSRAVYQCNTSNEHGYLLANAFVSVLDVPPRMLSPRNQLIRVILYNRTRLDCPFFGSPIPTLRWFKNGQGSNLDGGNYHVYENGSLEIKMIRKEDQGIYTCVATNILGKAENQVRLEVKDPTRIYRMPEDQVARRGTTVQLECRVKHDPSLKLTVSWLKDDEPLYIGNRMKKEDDSLTIFGVAERDQGSYTCVASTELDQDLAKAYLTVLADQATPTNRLAALPKGRPDRPRDLELTDLAERSVRLTWIPGDANNSPITDYVVQFEEDQFQPGVWHDHSKYPGSVNSAVLRLSPYVNYQFRVIAINEVGSSHPSLPSERYRTSGAPPESNPGDVKGEGTRKNNMEITWTPMNATSAFGPNLRYIVKWRRRETREAWNNVTVWGSRYVVGQTPVYVPYEIRVQAENDFGKGPEPESVIGYSGEDLPSAPRRFRVRQPNLETINLEWDHPEHPNGIMIGYTLKYVAFNGTKVGKQIVENFSPNQTKFTVQRTDPVSRYRFTLSARTQVGSGEAVTEESPAPPNEATPTAAPPTLPPTTVGATGAVSSTDATAIAATTEATTVPIIPTVAPTTIATTTTVATTTTTTAAATTTTESPPTTTSGTKIHESAPDEQSIWNVTVLPNSKWANITWKHNFGPGTDFVVEYIDSNHTKKTVPVKAQAQPIQLTDLYPGMTYTLRVYSRDNEGISSTVITFMTSTAYTNNQADIATQGWFIGLMCAIALLVLILLIVCFIKRSRGGKYPVREKKDVPLGPEDPKEEDGSFDYSDEDNKPLQGSQTSLDGTIKQQESDDSLVDYGEGGEGQFNEDGSFIGQYTVKKDKEETEGNESSEATSPVNAIYSLA

SEQ ID NO: 6765 - protein, 722 aa, Homo sapiens
MMKEVLSTGQGNTEVIHTGTLQRYQSYHIGDFCFQEIEKEIHDIEFQCQEDERNGHEAPMTKIKKLTGSTDQHDHRHAGNKPIKDQLGSSFYSHLPELHIIQIKGKIGNQFEKSTSDAPSVSTSQRISPRPQIHISNNYGNNSPNSSLLPQKQEVYMREKSFQCNESGKAFNCSSLLRKHQIPHLGDKQYKCDVCGKLFNHKQYLTCHCRCHTGEKPYKCNECGKSFSQVSSLTCHRRLHTAVKSHKCNECGKIFGQNSALVIHKAIHTGEKPYKCNECDKAFNQQSNLARHRRIHTGEKPYKCEECDKVFSRKSTLESHKRIHTGEKPYKCKVCDTAFTWNSQLARHKRIHTGEKTYKCNECGKTFSHKSSLVCHHRLHGGEKSYKCKVCDKAFAWNSHLVRHTRIHSGGKPYKCNECGKTFGQNSDLLIHKSIHTGEQPYKYEECEKVFSCGSTLETHKIIHTGEKPYKCKVCDKAFACHSYLAKHTRIHSGEKPYKCNECSKTFRLRSYLASHRRVHSGEKPYKCNECSKTFSQRSYLHCHRRLHSGEKPYKCNECGKTFSHKPSLVHHRRLHTGEKSYKCTVCDKAFVRNSYLARHTRIHTAEKPYKCNECGKAFNQQSQLSLHHRIHAGEKLYKCETCDKVFSRKSHLKRHRRIHPGKKPYKCKVCDKTFGSDSHLKQHTGLHTGEKPYKCNECGKAFSKQSTLIHHQAVHGVGKLD

SEQ ID NO: 6766 - protein, 636 aa, Homo sapiens
MAARPLSRMLRRLLRSSARSCSSGAPVTQPCPGESARAASEEVSRRRQFLREHAAPFSAFLTDSFGRQHSYLRISLTEKCNLRCQYCMPEEGVPLTPKANLLTTEEILTLARLFVKEGIDKIRLTGGEPLIRPDVVDIVAQLQRLEGLRTIGVTTNGINLARLLPQLQKAGLSAINISLDTLVPAKFEFIVRRKGFHKVMEGIHKAIELGYNPVKVNCVVMRGLNEDELLDFAALTEGLPLDVRFIEYMPFDGNKWNFKKMVSYKEMLDTVRQQWPELEKVPEEESSTAKAFKIPGFQGQISFITSMSEHFCGTCNRLRITADGNLKVCLFGNSEVSLRDHLRAGASEQELLRIIGAAVGRKKRQHAGMFSISQMKNRPMILIELFLMFPNSPPANPSIFSWDPLHVQGLRPRMSFSSQVATLWKGCRVPQTPPLAQQRLGSGSFQRHYTSRADSDANSKCLSPGSWASAAPSGPQLTSEQLTHVDSEGRAAMVDVGRKPDTERVAVASAVVLLGPVAFKLVQQNQLKKGDALVVAQLAGVQAAKVTSQLIPLCHHVALSHIQVQLELDSTRHAVKIQASCRARGPTGVEMEALTSAAVAALTLYDMCKAVSRDIVLEEIKLISKTGGQRGDFHRA

SEQ ID NO: 6767 - protein, 1072 aa, Homo sapiens
MAKATSGAAGLRLLLLLLLPLLGKVALGLYFSRDAYWEKLYVDQAAGTPLLYVHALRDAPEEVPSFRLGQHLYGTYRTRLHENNWICIQEDTGLLYLNRSLDHSSWEKLSVRNRGFPLLTVYLKVFLSPTSLREGECQWPGCARVYFSFFNTSFPACSSLKPRELCFPETRPSFRIRENRPPGTFHQFRLLPVQFLCPNISVAYRLLEGEGLPFRCAPDSLEVSTRWALDREQREKYELVAVCTVHAGAREEVVMVPFPVTVYDEDDSAPTFPAGVDTASAVVEFKRKEDTVVATLRVFDADVVPASGELVRRYTSTLLPGDTWAQQTFRVEHWPNETSVQANGSFVRATVHDYRLVLNRNLSISENRTMQLAVLVNDSDFQGPGAGVLLLHFNVSVLPVSLHLPSTYSLSVSRRARRFAQIGKVCVENCQAFSGINVQYKLHSSGANCSTLGVVTSAEDTSGILFVNDTKALRRPKCAELHYMVVATDQQTSRQAQAQLLVTVEGSYVAEEAGCPLSCAVSKRRLECEECGGLGSPTGRCEWRQGDGKGITRNFSTCSPSTKTCPDGHCDVVETQDINICPQDCLRGSIVGGHEPGEPRGIKAGYGTCNCFPEEEKCFCEPEDIQDPLCDELCRTVIAAAVLFSFIVSVLLSAFCIHCYHKFAHKPPISSAEMTFRRPAQAFPVSYSSSGARRPSLDSMENQVSVDAFKILEDPKWEFPRKNLVLGKTLGEGEFGKVVKATAFHLKGRAGYTTVAVKMLKENASPSELRDLLSEFNVLKQVNHPHVIKLYGACSQDGPLLLIVEYAKYGSLRGFLRESRKVGPGYLGSGGSRNSSSLDHPDERALTMGDLISFAWQISQGMQYLAEMKLVHRDLAARNILVAEGRKMKISDFGLSRDVYEEDSYVKRSQGRIPVKWMAIESLFDHIYTTQSDVWSFGVLLWEIVTLGGNPYPGIPPERLFNLLKTGHRMERPDNCSEEMYRLMLQCWKQEPDKRPVFADISKDLEKMMVKRRDYLDLAASTPSDSLIYDDGLSEEETPLVDCNNAPLPRALPSTWIENKLYGRISHAFTRF

SEQ ID NO: 6768 - protein, 661 aa, Homo sapiens
MDLQQSTTITSLEKWCLDESLSGCRRHYSVKKKLKLIRVLGLFMGLVAISTVSFSISAFSETDTQSTGEASVVSGPRVAQGYHQRTLLDLNDKILDYTPQPPLSKEGESENSTDHAQGDYPKDIFSLEERRKGAIILHVIGMIYMFIALAIVCDEFFVPSLTVITEKLGISDDVAGATFMAAGGSAPELFTSLIGVFIAHSNVGIGTIVGSAVFNILFVIGMCALFSREILNLTWWPLFRDVSFYIVDLIMLIIFFLDNVIMWWESLLLLTAYFCYVVFMKFNVQVEKWVKQMINRNKVVKVTAPEAQAKPSAARDKDEPTLPAKPRLQRGGSSASLHNSLMRNSIFQLMIHTLDPLAEELGSYGKLKYYDTMTEEGRFREKASILHKIAKKKCHVDENERQNGAANHVEKIELPNSTSTDVEMTPSSDASEPVQNGNLSHNIEGAEAQTADEEEDQPLSLAWPSETRKQVTFLIVFPIVFPLWITLPDVRKPSSRKFFPITFFGSITWIAVFSYLMVWWAHQVGETIGISEEIMGLTILAAGTSIPDLITSVIVARKGLGDMAVSSSVGSNIFDITVGLPLPWLLYTVIHRFQPVAVSSNGLFCAIVLLFIMLLFVILSIALCKWRMNKILGFIMFGLYFVFLVVSVLLEDRILTCPVSI

SEQ ID NO: 6769 - protein, 507 aa, Homo sapiens
MVATGWARRSGLHPAPRPLRGAQEALAKNLWREERNRPLILSSLIIKKLHWPEQELAKKSILNAEDSLIIDNKRSISHLSSGVLKDIFTTGTSSYNVLLQSKEEKKYHSQKQSSSTYSKRCRKPSKSPNTSRSKDPRRMKALVPVTSSGTWYCLERRPAVFVTSSVSSPVKFTHDISVTGNGIVLPPKPKSKVKWCHFSTLPKPKPQLSRSFEKGDDFSGKKFCILTAIKPTNLEKEKLRFFKSDYTYNPQFEYANPALPSVLAKHSHASDRFLKQIVVHLTEDLLSRASMTVVNGCPTLTINVSTAREHWLEGMLRHEIGTHYFRGINNLQQPWNSWTGRKKHELKPNNPTEEGLASIHSVLFRKDPFLWRAALLYYTVYQASQMSFCELFKDIGRFVKDPNTRWDYCVRAKRGWTDTSQPGCFSKDQVYLDGILQILRYRDTIDFHLLTALGKVSYEDVDRLKGLAVTENMRVPHFLQDHGRYMEHLEKIMEVNELTDRELKDLI

SEQ ID NO: 6770 - protein, 474 aa, Homo sapiens
MAEGEDVGWWRSWLQQSYQAVKEKSSEALEFMKRDLTEFTQVVQHDTACTIAATASVVKEKLAIAACSRGACFLCPFSIQTEGSSGATEKMKKGLSDFLGVISDTFAPSPDKTIDCDVITLMGTPSGTAEPYDGTKARLYSLQSDPATYCNEPDGPPELFDAWLSQFCLEEKKGEISELLVGSPSIRALYTKMVPAAVSHSEFWHRYFYKVHQLEQEQARRDALKQRAEQSISEEPGWEEEEEELMGISPISPKEAKVPVAKISTFPEGEPGPQSPCEENLVTSVEPPAEVTPSESSESISLVTQIANPATAPEARVLPKDLSQKLLEASLEEQGLAVDVGETGPSPPIHSKPLTPAGHTGGPEPRPPARVETLREEAPTDLRVFELNSDSGKSTPSNNGKKGSSTDISEDWEKDFDLDMTEEEVQMALSKVDASGEVSGPGGSEGSEPNGPGCESSPQPAQLSPQEGPCSCLR

SEQ ID NO: 6771 - protein, 685 aa, Homo sapiens
MQIFVKTLTGKTITLEVEPSDTIENVKAKIQDKEGIPPDQQRLIFAGKQLEDGRTLSDYNIQKESTLHLVLRLRGGMQIFVKTLTGKTITLEVEPSDTIENVKAKIQDKEGIPPDQQRLIFAGKQLEDGRTLSDYNIQKESTLHLVLRLRGGMQIFVKTLTGKTITLEVEPSDTIENVKAKIQDKEGIPPDQQRLIFAGKQLEDGRTLSDYNIQKESTLHLVLRLRGGMQIFVKTLTGKTITLEVEPSDTIENVKAKIQDKEGIPPDQQRLIFAGKQLEDGRTLSDYNIQKESTLHLVLRLRGGMQIFVKTLTGKTITLEVEPSDTIENVKAKIQDKEGIPPDQQRLIFAGKQLEDGRTLSDYNIQKESTLHLVLRLRGGMQIFVKTLTGKTITLEVEPSDTIENVKAKIQDKEGIPPDQQRLIFAGKQLEDGRTLSDYNIQKESTLHLVLRLRGGMQIFVKTLTGKTITLEVEPSDTIENVKAKIQDKEGIPPDQQRLIFAGKQLEDGRTLSDYNIQKESTLHLVLRLRGGMQIFVKTLTGKTITLEVEPSDTIENVKAKIQDKEGIPPDQQRLIFAGKQLEDGRTLSDYNIQKESTLHLVLRLRGGMQIFVKTLTGKTITLEVEPSDTIENVKAKIQDKEGIPPDQQRLIFAGKQLEDGRTLSDYNIQKESTLHLVLRLRGGV

SEQ ID NO: 6772 - protein, 459 aa, Homo sapiens
MPQLNGGGGDDLGANDELISFKDEGEQEEKSSENSSAERDLADVKSSLVNESETNQNSSSDSEAERRPPPRSESFRDKSRESLEEAAKRQDGGLFKGPPYPGYPFIMIPDLTSPYLPNGSLSPTARTYLQMKWPLLDVQAGSLQSRQALKDARSPSPAHIVSNKVPVVQHPHHVHPLTPLITYSNEHFTPGNPPPHLPADVDPKTGIPRPPHPPDISPYYPLSPGTVGQIPHPLGWLVPQQGQPVYPITTGGFRHPYPTALTVNASMSRFPPHMVPPHHTLHTTGIPHPAIVTPTVKQESSQSDVGSLHSSKHQDSKKEEEKKKPHIKKPLNAFMLYMKEMRAKVVAECTLKESAAINQILGRRWHALSREEQAKYYELARKERQLHMQLYPGWSARDNYGKKKKRKRDKQPGETNEHSECFLNPCLSLPPITDLSAPKKCRARFGLDQQNNWCGPCSL

SEQ ID NO: 6773 - protein, 525 aa, Homo sapiens
MGTISLCIGVCAFEGANTSTSFYKLVYTAILSYSIQDLLPEQDMKDLCQKVTLTRHRSWGLDNLHLVKDWRTVNEGKGQKEYCNRLTQCSSTKSKIFQCIECGRNFSWRSILTEHKRIHTGEKPYKCEECGKVFNRCSNLTKHKRIHTGEKPYKCDECGKVFNWWSQLTNHKKIHTGEKPYKCDECDKVFNWWSQLTSHKKIHSGEKPYPCEECGKAFTQFSNLTQHKRIHTGEKPYKCKECCKAFNKFSNLTQHKRIHTGEKPYKCEECGNVFNECSHLTRHRRIHTGEKPYKCEECGKAFTQFASLTRHKRIHTGEKPYQCEECGKTFNRCSHLSSHKRIHTGEKPYKCEECGRTFTQFSNLTQHKRIHTGEKPYKCKECGKAFNKFSSLTQHRRIHTGVKPYKCEECGKVFKQCSHLTSHKRIHTGEKPYKCKECGKAFYQSSILSKHKRIHTEEKPYKCEECGKAFNQFSSLTRHKRIHTGEKRYKCKECGKGFYQSSIHSKYKRIYTGEEPDKCKKCGSL

SEQ ID NO: 6774 - protein, 338 aa, Homo sapiens
MDPETRGQEIIKVTPLQQMLASCTGAILTSVIVTPLDVVKIRLQAQNNPLPKGKCFVYSNGLMDHLCVCEEGGNKLWYKKPGNFQGTLDAFFKIIRNEGIKSLWSGLPPTLVMAVPATVIYFTCYDQLSALLRSKLGENETCIPIVAGIVARFGAVTVISPLELIRTKMQSKKFSYVELHRFVSKKVSEDGWISLWRGWAPTVLRDVPFSAMYWYNYEILKKWLCEKSGLYEPTFMINFTSGALSGSFAAVATLPFDVVKTQKQTQLWTYESHKISMPLHMSTWIIMKNIVAKNGFSGLFSGLIPRLIKIAPACAIMISTYEFGKAFFQKQNVRRQQY

SEQ ID NO: 6775 - protein, 1509 aa, Homo sapiens
MPCAQRSWLANLSVVAQLLNFGALCYGRQPQPGPVRFPDRRQEHFIKGLPEYHVVGPVRVDASGHFLSYGLHYPITSSRRKRDLDGSEDWVYYRISHEEKDLFFNLTVNQGFLSNSYIMEKRYGNLSHVKMMASSAPLCHLSGTVLQQGTRVGTAALSACHGLTGFFQLPHGDFFIEPVKKHPLVEGGYHPHIVYRRQKVPETKEPTCGLKDSVNISQKQELWREKWERHNLPSRSLSRRSISKERWVETLVVADTKMIEYHGSENVESYILTIMNMVTGLFHNPSIGNAIHIVVVRLILLEEEEQGLKIVHHAEKTLSSFCKWQKSINPKSDLNPVHHDVAVLLTRKDICAGFNRPCETLGLSHLSGMCQPHRSCNINEDSGLPLAFTIAHELGHSFGIQHDGKENDCEPVGRHPYIMSRQLQYDPTPLTWSKCSEEYITRFLDRGWGFCLDDIPKKKGLKSKVIAPGVIYDVHHQCQLQYGPNATFCQEVENVCQTLWCSVKGFCRSKLDAAADGTQCGEKKWCMAGKCITVGKKPESIPGGWGRWSPWSHCSRTCGAGVQSAERLCNNPEPKFGGKYCTGERKRYRLCNVHPCRSEAPTFRQMQCSEFDTVPYKNELYHWFPIFNPGYVDIGLIPKGARDIRVMEIEGAGNFLAIRSEDPEKYYLNGGFIIQWNGNYKLAGTVFQYDRKGDLEKLMATGPTNESVWIQLLFQVTNPGIKYEYTIQKDGLDNDVEQQMYFWQYGHWTECSVTCGTGIRRQTAHCIKKGRGMVKATFCDPETQPNGRQKKCHEKACPPRWWAGEWEACSATCGPHGEKKRTVLCIQTMVSDEQALPPTDCQHLLKPKTLLSCNRDILCPSDWTVGNWSECSVSCGGGVRIRSVTCAKNHDEPCDVTRKPNSRALCGLQQCPSSRRVLKPNKGTISNGKNPPTLKPVPPPTSRPRMLTTPTGPESMSTSTPAISSPSPTTASKEGDLGGKQWQDSSTQPELSSRYLISTGSTSQPILTSQSLSIQPSEENVSSSDTGPTSEGGLVATTTSGSGLSSSRNPITWPVTPFYNTLTKGPEMEIHSGSGEEREQPEDKDESNPVIWTKIRVPGNDAPVESTEMPLAPPLTPDLSRESWWPPFSTVMEGLLPSQRPTTSETGTPRVEGMVTEKPANTLLPLGGDHQPEPSGKTANRNHLKLPNNMNQTKSSEPVLTEEDATSLITEGFLLNASNYKQLTNGHGSAHWIVGNWSECSTTCGLGAYWRRVECSTQMDSDCAAIQRPDPAKRCHLRPCAGWKVGNWSKCSRNCSGGFKIREIQCVDSRDHRNLRPFHCQFLAGIPPPLSMSCNPEPCEAWQVEPWSQCSRSCGGGVQERGVFCPGGLCDWTKRPTSTMSCNEHLCCHWATGNWDLCSTSCGGGFQKRTVQCVPSEGNKTEDQDQCLCDHKPRPPEFKKCNQQACKKSADLLCTKDKLSASFCQTLKAMKKCSVPTVRAECCFSCPQTHITHTQRQRRQRLLQKSKEL

SEQ ID NO: 6776 - protein, 4547 aa, Homo sapiens
MSQHQLRVPQPEGLGRKRTSSEDNLYLAVLRASEGKKDERDRVQKKTFTKWVNKHLIKAQRHISDLYEDLRDGHNLISLLEVLSGDSLPREKGRMRFHKLQNVQIALDYLRHRQVKLVNIRNDDIADGNPKLTLGLIWTIILHFQISDIQVSGQSEDMTAKEKLLLWSQRMVEGYQGLRCDNFTSSWRDGRLFNAIIHRHKPLLIDMNKVYRQTNLENLDQAFSVAERDLGVTRLLDPEDVDVPQPDEKSIITYVSSLYDAMPRVPDVQDGVRANELQLRWQEYRELVLLLLQWMRHHTAAFEERRFPSSFEEIEILWSQFLKFKEMELPAKEADKNRSKGIYQSLEGAVQAGQLKVPPGYHPLDVEKEWGKLHVAILEREKQLRSEFERLECLQRIVTKLQMEAGLCEEQLNQADALLQSDVRLLAAGKVPQRAGEVERDLDKADSMIRLLFNDVQTLKDGRHPQGEQMYRRVYRLHERLVAIRTEYNLRLKAGVAAPATQVAQVTLQSVQRRPELEDSTLRYLQDLLAWVEENQHRVDGAEWGVDLPSVEAQLGSHRGLHQSIEEFRAKIERARSDEGQLSPATRGAYRDCLGRLDLQYAKLLNSSKARLRSLESLHSFVAAATKELMWLNEKEEEEVGFDWSDRNTNMTAKKESYSALMRELELKEKKIKELQNAGDRLLREDHPARPTVESFQAALQTQWSWMLQLCCCIEAHLKENAAYFQFFSDVREAEGQLQKLQEALRRKYSCDRSATVTRLEDLLQDAQDEKEQLNEYKGHLSGLAKRAKAVVQLKPRHPAHPMRGRLPLLAVCDYKQVEVTVHKGDECQLVGPAQPSHWKVLSSSGSEAAVPSVCFLVPPPNQEAQEAVTRLEAQHQALVTLWHQLHVDMKSLLAWQSLRRDVQLIRSWSLATFRTLKPEEQRQALHSLELHYQAFLRDSQDAGGFGPEDRLMAEREYGSCSHHYQQLLQSLEQGAQEESRCQRCISELKDIRLQLEACETRTVHRLRLPLDKEPARECAQRIAEQQKAQAEVEGLGKGVARLSAEAEKVLALPEPSPAAPTLRSELELTLGKLEQVRSLSAIYLEKLKTISLVIRGTQGAEEVLRAHEEQLKEAQAVPATLPELEATKASLKKLRAQAEAQQPTFDALRDELRGAQEVGERLQQRHGERDVEVERWRERVAQLLERWQAVLAQTDVRQRELEQLGRQLRYYRESADPLGAWLQDARRRQEQIQAMPLADSQAVREQLRQEQALLEEIERHGEKVEECQRFAKQYINAIKDYELQLVTYKAQLEPVASPAKKPKVQSGSESVIQEYVDLRTHYSELTTLTSQYIKFISETLRRMEEEERLAEQQRAEERERLAEVEAALEKQRQLAEAHAQAKAQAEREAKELQQRMQEEVVRREEAAVDAQQQKRSIQEELQQLRQSSEAEIQAKARQAEAAERSRLRIEEEIRVVRLQLEATERQRGGAEGELQALRARAEEAEAQKRQAQEEAERLRRQVQDESQRKRQAEVELASRVKAEAEAAREKQRALQALEELRLQAEEAERRLRQAEVERARQVQVALETAQRSAEAELQSKRASFAEKTAQLERSLQEEHVAVAQLREEAERRAQQQAEAERAREEAERELERWQLKANEALRLRLQAEEVAQQKSLAQAEAEKQKEEAEREARRRGKAEEQAVRQRELAEQELEKQRQLAEGTAQQRLAAEQELIRLRAETEQGEQQRQLLEEELARLQREAAAATQKRQELEAELAKVRAEMEVLLASKARAEEESRSTSEKSKQRLEAEAGRFRELAEEAARLRALAEEAKRQRQLAEEDAARQRAEAERVLAEKLAAIGEATRLKTEAEIALKEKEAENERLRRLAEDEAFQRRRLEEQAAQHKADIEERLAQLRKASDSELERQKGLVEDTLRQRRQVEEEILALKASFEKAAAGKAELELELGRIRSNAEDTLRSKEQAELEAARQRQLAAEEERRRREAEERVQKSLAAEEEAARQRKAALEEVERLKAKVEEARRLRERAEQESARQLQLAQEAAQKRLQAEEKAHAFAVQQKEQELQQTLQQEQSVLDQLRGEAEAARRAAEEAEEARVQAEREAAQSRRQVEEAERLKQSAEEQAQARAQAQAAAEKLRKEAEQEAARRAQAEQAALRQKQAADAEMEKHKKFAEQTLRQKAQVEQELTTLRLQLEETDHQKNLLDEELQRLKAEATEAARQRSQVEEELFSVRVQMEELSKLKARIEAENRALILRDKDNTQRFLQEEAEKMKQVAEEAARLSVAAQEAARLRQLAEEDLAQQRALAEKMLKEKMQAVQEATRLKAEAELLQQQKELAQEQARRLQEDKEQMAQQLAEETQGFQRTLEAERQRQLEMSAEAERLKLRVAEMSRAQARAEEDAQRFRKQAEEIGEKLHRTELATQEKVTLVQTLEIQRQQSDHDAERLREAIAELEREKEKLQQEAKLLQLKSEEMQTVQQEQLLQETQALQQSFLSEKDSLLQRERFIEQEKAKLEQLFQDEVAKAQQLREEQQRQQQQMEQERQRLVASMEEARRRQHEAEEGVRRKQEELQQLEQQRRQQEELLAEENQRLREQLQLLEEQHRAALAHSEEVTASQVAATKTLPNGRDALDGPAAEAEPEHSFDGLRRKVSAQRLQEAGILSAEELQRLAQGHTTVDELARREDVRHYLQGRSSIAGLLLKATNEKLSVYAALQRQLLSPGTALILLEAQAASGFLLDPVRNRRLTVNEAVKEGVVGPELHHKLLSAERAVTGYKDPYTGQQISLFQAMQKGLIVREHGIRLLEAQIATGGVIDPVHSHRVPVDVAYRRGYFDEEMNRVLADPSDDTKGFFDPNTHENLTYLQLLERCVEDPETGLCLLPLTDKAAKGGELVYTDSEARDVFEKATVSAPFGKFQGKTVTIWEIINSEYFTAEQRRDLLRQFRTGRITVEKIIKIIITVVEEQEQKGRLCFEGLRSLVPAAELLESRVIDRELYQQLQRGERSVRDVAEVDTVRRALRGANVIAGVWLEEAGQKLSIYNALKKDLLPSDMAVALLEAQAGTGHIIDPATSARLTVDEAVRAGLVGPEFHEKLLSAEKAVTGYRDPYTGQSVSLFQALKKGLIPREQGLRLLDAQLSTGGIVDPSKSHRVPLDVACARGCLDEETSRALSAPRADAKAYSDPSTGEPATYGELQQRCRPDQLTGLSLLPLSEKAARARQEELYSELQARETFEKTPVEVPVGGFKGRTVTVWELISSEYFTAEQRQELLRQFRTGKVTVEKVIKILITIVEEVETLRQERLSFSGLRAPVPASELLASGVLSRAQFEQLKDGKTTVKDLSELGSVRTLLQGSGCLAGIYLEDTKEKVSIYEAMRRGLLRATTAALLLEAQAATGFLVDPVRNQRLYVHEAVKAGVVGPELHEQLLSAEKAVTGYRDPYSGSTISLFQAMQKGLVLRQHGIRLLEAQIATGGIIDPVHSHRVPVDVAYQRGYFSEEMNRVLADPSDDTKGFFDPNTHENLTYRQLLERCVEDPETGLRLLPLKGAEKAEVVETTQVYTEEETRRAFEETQIDIPGGGSHGGSTMSLWEVMQSDLIPEEQRAQLMADFQAGRVTKERMIIIIIEIIEKTEIIRQQGLASYDYVRRRLTAEDLFEARIISLETYNLLREGTRSLREALEAESAWCYLYGTGSVAGVYLPGSRQTLSIYQALKKGLLSAEVARLLLEAQAATGFLLDPVKGERLTVDEAVRKGLVGPELHDRLLSAERAVTGYRDPYTEQTISLFQAMKKELIPTEEALRLLDAQLATGGIVDPRLGFHLPLEVAYQRGYLNKDTHDQLSEPSEVRSYVDPSTDERLSYTQLLRRCRRDDGTGQLLLPLSDARKLTFRGLRKQITMEELVRSQVMDEATALQLREGLTSIEEVTKNLQKFLEGTSCIAGVFVDATKERLSVYQAMKKGIIRPGTAFELLEAQAATGYVIDPIKGLKLTVEEAVRMGIVGPEFKDKLLSAERAVTGYKDPYSGKLISLFQAMKKGLILKDHGIRLLEAQIATGGIIDPEESHRLPVEVAYKRGLFDEEMNEILTDPSDDTKGFFDPNTEENLTYLQLMERCITDPQTGLCLLPLKEKKRERKTSSKSSVRKRRVVIVDPETGKEMSVYEAYRKGLIDHQTYLELSEQECEWEEITISSSDGVVKSMIIDRRSGRQYDIDDAIAKNLIDRSALDQYRAGTLSITEFADMLSGNAGGFRSRSSSVGSSSSYPISPAVSRTQLASWSDPTEETGPVAGILDTETLEKVSITEAMHRNLVDNITGQRLLEAQACTGGIIDPSTGERFPVTDAVNKGLVDKIMVDRINLAQKAFCGFEDPRTKTKMSAAQALKKGWLYYEAGQRFLEVQYLTGGLIEPDTPGRVPLDEALQRGTVDARTAQKLRDVGAYSKYLTCPKTKLKISYKDALDRSMVEEGTGLRLLEAAAQSTKGYYSPYSVSGSGSTAGSRTGSRTGSRAGSRRGSFDATGSGFSMTFSSSSYSSSGYGRRYASGSSASLGGPESAVA

SEQ ID NO: 6777 - protein, 418 aa, Homo sapiens
METHISCLFPELLAMIFGYLDVRDKGRAAQVCTAWRDAAYHKSVWRGVEAKLHLRRANPSLFPSLQARGIRRVQILSLRRSLSYVIQGMANIESLNLSGCYNLTDNGLGHAFVQEIGSLRALNLSLCKQITDSSLGRIAQYLKGLEVLELGGCSNITNTGLLLIAWGLQRLKSLNLRSCRHLSDVGIGHLAGMTRSAAEGCLGLEQLTLQDCQKLTDLSLKHISRGLTGLRLLNLSFCGGISDAGLLHLSHMGSLRSLNLRSCDNISDTGIMHLAMGSLRLSGLDVSFCDKVGDQSLAYIAQGLDGLKSLSLCSCHISDDGINRMVRQMHGLRTLNIGQCVRITDKGLELIAEHLSQLTGIDLYGCTRITKRGLERITQLPCLKVLNLGLWQMTDSEKEARGDFSPLFTVRTRGSSRR

SEQ ID NO: 6778 - protein, 95 aa, Homo sapiens
MFLTGDTSPAEDNREATLPQCSLPELYACIENFNKESKKSNLLKMHGISLNEAQEVLARNLNVMSFTRGADVRGDLQPVIRKTIHESKGSGMEIF

SEQ ID NO: 6779 - protein, 691 aa, Homo sapiens
MAPFPEEVDVFTAPHWRMKQLVGLYCDKLSKTNFSNNNDFRALLQSLYATFKEFKMHEQIENEYIIGLLQQRSQTIYNVHSDNKLSEMLSLFEKGLKNVKNEYEQLNYAKQLKERLEAFTRDFLPHMKEEEEVFQPMLMEYFTYEELKDIKKKVIAQHCSQKDTAELLRGLSLWNHAEERQKFFKYSVDEKSDKEAEVSEHSTGITHLPPEVMLSIFSYLNPQELCRCSQVSMKWSQLTKTGSLWKHLYPVHWARGDWYSGPATELDTEPDDEWVKNRKDESRAFHEWDEDADIDESEESAEESIAISIAQMEKRLLHGLIHNVLPYVGTSVKTLVLAYSSAVSSKMVRQILELCPNLEHLDLTQTDISDSAFDSWSWLGCCQSLRHLDLSGCEKITDVALEKISRALGILTSHQSGFLKTSTSKITSTAWKNKDITMQSTKQYACLHDLTNKGIGEEIDNEHPWTKPVSSENFTSPYVWMLDAEDLADIEDTVEWRHRNVESLCVMETASNFSCSTSGCFSKDIVGLRTSVCWQQHCASPAFAYCGHSFCCTGTALRTMSSLPESSAMCRKAARTRLPRGKDLIYFGSEKSDQETGRVLLFLSLSGCYQITDHGLRVLTLGGGLPYLEHLNLSGCLTITGAGLQDLVSACPSLNDEYFYYCDNINGPHADTASGCQNLQCGFRACCRSGE

SEQ ID NO: 6780 - protein, 753 aa, Homo sapiens
MSRRKISSESFSSLGSDYLETSPEEEGECPLSRLCWNGSRSPPGPLEPSPAAAAAAAAPAPTPAASAAAAAATAGARRVQRRRRVNLDSLGESISRLTAPSPQTIQQTLKRTLQYYEHQVIGYRDAEKNFHNISNRCSYADHSNKEEIEDVSGILQCTANILGLKFEEIQKRFGEEFFNICFHENERVLRAVGGTLQDFFNGFDALLEHIRTSFGKQATLESPSFLCKELPEGTLMLHYFHPHHIVGFAMLGMIKAAGKKIYRLDVEVEQVANEKLCSDVSNPGNCSCLTFLIKECENTNIMKNLPQGTSQVPADLRISINTFCRAFPFHLMFDPSMSVLQLGEGLRKQLRCDTHKVLKFEDCFEIVSPKVNATFERVLLRLSTPFVIRTKPEASGSENKDKSKHVTEGHLTQLSVAGFNSLEVMEVKGQMIHVPESNSILFLGSPCVDKLDELMGRGLHLSDIPIHDATRDVILVGEQAKAQDGLKKRMDKLKATLERTHQALEEEKKKTVDLLYSIFPGDVAQQLWQGQQVQARKFDDVTMLFSDIVGFTAICAQCTPMQVISMLNELYTRFDHQCGFLDIYKVETIGDAYCVAAGLHRKSLCHAKPIALMALKMMELSEEVLTPDGRPIQMRIGIHSGSVLAGVVGVRMPRYCLFGNNVTLASKFESGSHPRRINVSPTTYQLLKREESFTFIPRSREELPDNFPKEIPGICYFLEVRTGPKPPKPSLSSSRIKKVSYNIGTMFLRETSL

SEQ ID NO: 6781 - protein, 738 aa, Homo sapiens
MRMCTPIRGLLMALAVMFGTAMAFAPIPRITWEHREVHLVQFHEPDIYNYSALLLSEDKDTLYIGAREAVFAVNALNISEKQHEVYWKVSEDKKAKCAEKGKSKQTECLNYIRVLQPLSATSLYVCGTNAFQPACDHLNLTSFKFLGKNEDGKGRCPFDPAHSYTSVMVDGELYSGTSYNFLGSEPIISRNSSHSPLRTEYAIPWLNEPSFVFADVIRKSPDSPDGEDDRVYFFFTEVSVEYEFVFRVLIPRIARVCKGDQGGLRTLQKKWTSFLKARLICSRPDSGLVFNVLRDVFVLRSPGLKVPVFYALFTPQLNNVGLSAVCAYNLSTAEEVFSHGKYMQSTTVEQSHTKWVRYNGPVPKPRPGACIDSEARAANYTSSLNLPDKTLQFVKDHPLMDDSVTPIDNRPRLIKKDVNYTQIVVDRTQALDGTVYDVMFVSTDRGALHKAISLEHAVHIIEETQLFQDFEPVQTLLLSSKKGNRFVYAGSNSGVVQAPLAFCGKHGTCEDCVLARDPYCAWSPPTATCVALHQTESPSRGLIQEMSGDASVCPASSPKPLPPPGSSSLSCLGHVGDRRLSSPWTPWPASGAGPDSSSRVSLLPPFLSDQAQHVHALGNFYLFCQATGPADIRFVWEKNGRALETCVPVQTHALPDGRAHALSWLQDAIRESAEYRCSVLSSAGNKTSKVQVAVMRPEVTHQERWTRELSAWRAVAGEHDRMMQSWRKAWESCSKDTL

SEQ ID NO: 6782 - protein, 453 aa, Homo sapiens
MLRILCLALCSLLTGTRADPGALLRLGMDIMNQVQSAMDESHILEKMAAEAGKKQPGMKPIKGITNLKVKDVQLPVITLNFVPGVGIFQCVSTGMTVTGKSFMGGNMEIIVALNITATNRLLRDEETGLPVFKSEGCEVILVNVKTNLPSNMLPKMVNKFLDSTLHKVLPGLMCPAIDAVLVYVNRKWTNLSDPMPVGQMGTVKYVLMSAPATTASYIQLDFSPVVQQQKGKTIKLADAGEALTFPEGYAKGSSQLLLPATFLSAELALLQKSFHVNIQDTMIGELPPQTTKTLARFIPEVAVAYPKSKPLTTQIKIKKPPKVTMKTGKSLLHLHSTLEMFAARWRSKAPMSLFLLEVHFNLKVQYSVHENQLQMATSLDRLLSLSRKSSSIGNFNERELTGFITSYLEEAYIPVVNDVLQVGLPLPDFLAMNYNLAELDIVENALMLDLKLG

SEQ ID NO: 6783 - protein, 716 aa, Homo sapiens
MMSIRQRREIRATEVSEDFPAQEENVKLENKLPSGCTSRRLWKILSLTIGGTIALCIGLLTSVYLATLHENDLWFSNIKEVEREISFRTECGLYYSYYKQMLQAPTLVQGFHGLIYDNKTESMKTINLLQRMNIYQEVFLSILYRVLPIQKYLEPVYFYIYTLFGLQAIYVTALYITSWLLSGTWLSGLLAAFWYVTNRIDTTRVEFTIPLRENWALPFFAIQIAAITYFLRPNLQPLSERLTLLAIFISTFLFSLTWQFNQFMMLMQALVLFTLDSLDMLPAVKATWLYGIQITSLLLVCILQFFNSMILGSLLISFNLSVFIARKLQKNLKTGSFLNRLGKLLLHLFMVLCLTLFLNNIIKKILNLKSDEHIFKFLKAKFGLGATRDFDANLYLCEEAFGLLPFNTFGRLSDTLLFYAYIFVLSITVIVAFVVAFHNLSDSTNQQSVGKMEKGTVDLKPETAYNLIHTILFGFLALSTMRMKYLWTSHMCVFASFGLCSPEIWELLLKSVHLYNPKRICIMRYSVPILILLYLCYKFWPGMMDELSELREFYDPDTVELMNWINSNTPRKAVFAGSMQLLAGVKLCTGRTLTNHPHYEDSSLRERTRAVYQIYAKRAPEEVHALLRSFGTDYVILEDSICYERRHRRGCRLRDLLDIANGHMMDGPGENDPDLKPADHPRFCEEIKRNLPPYVAYFTRVFQNKTFHVYKLSRNK

SEQ ID NO: 6784 - protein, 691 aa, Homo sapiens
MEKTESFCPEVPPQDCGASPRPSLRSLPKNQGSLLQFDRQAPGRISTSPTLRRLRTRGCGTRQDAWQVTTWGSWGAPVGFPCYLSKSLPGSPKDSSHLLSPLRLHSRLTSEPERALNAADSLEPQTRPTDKYLPPELQPVNEGSLHQASLRQQEGHFLPSPTLRHPSPQGEELHPSRFYEHRRSSVVLNLPGLEVFPGDLLVSDGAADYLCHPLLLLNSESKKPRWPFSKRGVGKDKHKHISDLENCLSSVKITSFRGYDFYGLKDKTWDEVLETHHKLPTDQLDLKKQQEAVWELFTSECTYFLDHLLVLKMIFMNTLRYLQTHEYLLDVDLWRLFANLEELTQTSLGFVNSLFGIIKDYVDASEISSSLDFISVLTKYFRGSLCQSHQTYCLNYSAAIFYLESLRQRDDFGIYLKWCEQNEQCRRLHVPELLVAPLQRLTRYPLLLKNIWKRSMDSAEKIMIYSIKEKVEKSIRDLEGKVKWLDNFQKFRYLQEIIVWPPLWDRDKRFFIPECLKHIFKEHMAENILSPTSRHLLYEGKLTLAESTRFLDVYLFLFNDFLLVTKTKCNKKKLGGSDPGLMCPSLTPELQAVIKEGGSCTVLDQPIPLDRLVVKSIEPLHVSVFGLRNAFLIQHENRYRQCIAAFLLQAQTENIKKTWMAQITTAISCFTKSQETKKISLFTLPAESSEI

SEQ ID NO: 6785 - protein, 898 aa, Homo sapiens
MVFSVRQCGHVGRTEEVLLTFKIFLVIICLHVVLVTSLEEDTDNSSLSPPPEVETTSLNDVTLSLLPSNETGVKPQRNICNLSSICNDSAFFRGEIMFQYDKESTVPQNQHITNGTLTGVLSLSELKRSELNKTLQTLSETYFIMCATAEAQSTLNCTFTIKLNNTMNACAVIAALERVKIRPMEHCCCSVRIPCPSSPEELEKLQCDLQDPIVCLADHPRGPPFSSSQSIPVVPRATVLSQVPKATSFAEPPDYSPVTHNVPSPIGEIQPLSPQPSAPIASSPAIDMPPQSETISSPMPQTHVSGTPPPVKASFSSPTVSAPANVNTTSAPPVQTDIVNTSSISDLENQVLQMEKALSLGSLEPNLAGEMINQVSRLLHSPPDMLAPLAQRLLKVVDDIGLQLNFSNTTISLTSPSLALAVIRVNASSFNTTTFVAQDPANLQDELTVRCVFWDLGRNGGRGGWSDNGCSVKDRRLNETICTCSHLTSFGVLLDLSRTSVLPAQMMALTFITYIGCGLSSIFLSVTLVTYIAFEKIRRDYPSKILIQLCAALLLLNLVFLLDSWIALYKMQGLCISVAVFLHYFLLVSFTWMGLEAFHMYLALVKVFNTYIRKYILKFCIVGWGVPAVVVTIILTISPDNYGLGSYGKFPNGSPDDFCWINNNAVFYITVVGYFCVIFLLNVSMFIVVLVQLCRIKKKKQLGAQRKTSIQDLRSIAGLTFLLGITWGFAFFAWGPVNVTFMYLFAIFNTLQGFFIFIFYCVAKENVRKQWRRYLCCGKLRLAENSDWSKTATNGLKKQTVNQGVSSSSNSLQSSSNSTNSTTLLVNNDCSVHASGNGNASTERNGVSFSVQNGDVCLHDFTGKQHMFNEKEDSCNGKGRMALRRTSKRGSLHFIEQM

SEQ ID NO: 6786 - protein, 458 aa, Homo sapiens
MARMGLAGAAGRWWGLALGLTAFFLPGVHSQVVQVNDSMYGFIGTDVVLHCSFANPLPSVKITQVTWQKSTNGSKQNVAIYNPSMGVSVLAPYRERVEFLRPSFTDGTIRLSRLELEDEGVYICEFATFPTGNRESQLNLTVMAKPTNWIEGTQAVLRAKKGQDDKVLVATCTSANGKPPSVVSWETRLKGEAEYQEIRNPNGTVTVISRYRLVPSREAHQQSLACIVNYHMDRFKESLTLNVQYEPEVTIEGFDGNWYLQRMDVKLTCKADANPPATEYHWTTLNGSLPKGVEAQNRTLFFKGPINYSLAGTYICEATNPIGTRSGQVEVNITEKPRPQRGLGSAARLLAGTVAVFLILVAVLTVFFLYNRQQKSPPETDGAGTDQPLSQKPEPSPSRQSSLVPEDIQVVHLDPGRQQQQEEEDLQKLSLQPPYYDLGVSPSYHPSVRTTEPRGECP

SEQ ID NO: 6787 - protein, 543 aa, Homo sapiens
MATRRLGVGETLGALNAALGPGGPVWIKETRTRHLRSRDFLAPHRALQARFDDGQVPEHLLHALACLQGPGVAPVLRCAPTPAGLSLQLQRSAVFERVLSAVAAYATPASPASLGQRVLLHCPALRSSPCALRLSQLRTVLVADHLARALRAHGVCVRLVPAVRDPHMLTFLQQLRVDWPAASERASSHTLRSHALEELTSANDGRTLSPGILGRLCLKELVEEQGRTAGYDPNLDNCLVTEDLLSVLAELQEALWHWPEDSHPGLAGASDTGTGGCLVVHVVSCEEEFQQQKLDLLWQKLVDKAPLRQKHLICGPVKVAGAPGTLMTAPEYYEFRHTQVCKASALKHGGDLAQDPAWTEIFGVLSVATIKFEMLSTAPQSQLFLALADSSISTKGTKSGTFVMYNCARLATLFESYKCSMEQGLYPTFPPVSSLDFSLLHDEGEWLLLFNSILPFPDLLSRTAVLDCTAPGLHIAVRTEMICKFLVQLSMDFSSYYNRVHILGEPRPHLFGQMFVRLQLLRAVREVLHTGLAMLGLPPLSHI

SEQ ID NO: 6788 - protein, 673 aa, Homo sapiens
MAESSLYRQRLEVIAEKRRLQEEIRAARREVEEEKLRVERLKRKSLRERWLMDGAAAVPEPSEDPTSKDPQSPEGQAQARIRNLEDSLFTLQSQLQLLQSASTGAQHKPSGRPSWRRQGHRPLSQSIVEAGSVGQTDLNKRASLPAGLVGTPPESPSEPREDVLGFLPGPRQVPGAAGDSSEANGPCPSPIPTPEQGLSQRAVPSEGRVGEAKGGGVVSVVWEGLRATEDCATGATGPELEAKVEEVVLEAIGDRKGAGSLELPAWVKEDRGIVEVVWEGVGGSDAEAMGEIGRVPEVVQTSSPRLQERLEAAASIEGEDVPQGSPEGDGQGGSGGEEGSFIWVERVTLSEEWEELLVEGLEGPEVAGRERGDESPLGAEGAKTGGGEETWEAEKRKAEESMGIGSEEKPGTGRDEAEMSPVVERKGGEKKLELESRGSAEKLGTEREGGEEPLGIERKVEGHLRAEKEGDEEKRGAEEEEVEEPLGVEKKGGEEEPEATKEPLEAERKGGEETLEAEKRGGEESLETEKTQGTEGDLNLEQGSREGSESQAEEMNEAGPPLEANTETRPEKEGPQPQEKPVGALEEEGVKPQTAAEGQGPLGDATPLLAETPAPEQPAECQPLLQGEGPSANPSAHPVPTYAPARQPEPSAPTEGEEASGPKQKTCQCCAVM

SEQ ID NO: 6789 - protein, 341 aa, Homo sapiens
MALPSRILLWKLVLLQSSAVLLHSAVEETDAGLYTCNLHHHYCHLYESLAVRLEVTDGPPATPAYWDGEKEVLAVARGAPALLTCVNRGHVWTDRHVEEAQQVVHWDRQPPGVPHDRADRLLDLYASGERRAYGPLFLRDRVAVGADAFERGDFSLRIEPLEVADEGTYSCHLHHHYCGLHERRVFHLTVAEPHAEPPPRGSPGNGSSHSGAPGPDPTLARGHNVINVIVPESRAHFFQQLGYVLATLLLFILLLVTVLLAARRRRGGYEYSDQKSGKSKGKDVNLAEFAVAAGDQMLYRSEDIQLDYKNNILKERAELAHSPLPAKYIDLDKGFRKENCK

SEQ ID NO: 6790 - protein, 650 aa, Homo sapiens
MATSNNPRKFSEKIALHNQKQAEETAAFEEVMKDLSLTRAARLQLQKSQYLQLGPSRGQYYGGSLPNVNQIGSGTMDLPFQPSGFLGEALAAAPVSLTPFQSSGLDTSRTTRHHGLVDRVYRERGRLGSPHRRPLSVDKHGRQADSCPYGTMYLSPPADTSWRRTNSDSALHQSTMTPTQPESFSSGSQDVHQKRVLLLTVPGMEETTSEADKNLSKQAWDTKKTGSRPKSCEVPGINIFPSADQENTTALIPATHNTGGSLPDLTNIHFPSPLPTPLDPEEPTFPALSSSSSTGNLAANLTHLGIGGAGQGMSTPGSSPQHRPAGVSPLSLSTEARRQQASPTLSPLSPITQAVAMDALSLEQQLPYAFFTQAGSQQPPPQPQPPPPPPPASQQPPPPPPPQAPVRLPPGGPLLPSASLTRGPQPPPLAVTVPSSLPQSPPENPGQPSMGIDIASAPALQQYRTSAGSPANQSPTSPVSNQGFSPGSSPQHTSTLGSVFGDAYYEQQMAARQANALSHQLEQFNMMENAISSSSLYSPGSTLNYSQAAMMGLTGSHGSLPDSQQLGYASHSGIPNIILTVTGESPPSLSKELTSSLAGVGDVSFDSDSQFPLDELKIDPLTLDGLHMLNDPDMVLADPATEDTFRMDRL

SEQ ID NO: 6791 - protein, 448 aa, Homo sapiens
MPGIKRILTVTILALCLPSPGNAQAQCTNGFDLDRQSGQCLDIDECRTIPEACRGDMMCVNQNGGYLCIPRTNPVYRGPYSNPYSTPYSGPYPAAAPPLSAPNYPTISRPLICRFGYQMDESNQCVDVDECATDSHQCNPTQICINTEGGYTCSCTDGYWLLEGQCLDIDECRYGYCQQLCANVPGSYSCTCNPGFTLNEDGRSCQDVNECATENPCVQTCVNTYGSFICRCDPGYELEEDGVHCSDMDECSFSEFLCQHECVNQPGTYFCSCPPGYILLDDNRSCQDINECEHRNHTCNLQQTCYNLQGGFKCIDPIRCEEPYLRISDNRCMCPAENPGCRDQPFTILYRDMDVVSGRSVPADIFQMQATTRYPGAYYIFQIKSGNEGREFYMRQTGPISATLVMTRPIKGPREIQLDLEMITVNTVINFRGSSVIRLRIYVSQYPF

SEQ ID NO: 6792 - protein, 376 aa, Homo sapiens
MAALGDIQESPSVPSPVSLSSPGTPGTQHHEPQLHLHGHQHGSPGSSPKVLSQPSDLDLQDVEEVEIGRDTFWPDSEPKPEQAPRSPGSQAPDEGAGGALRSLLRSLPRRARCSAGFGPESSAERPAGQPPGAVPCAQPRGAWRVTLVQQAAAGPEGAPERAAELGVNFGRSRQGSARGAKPHRCEACGKSFKYNSLLLKHQRIHTGEKPYACHECGKRFRGWSGFIQHHRIHTGEKPYECGQCGRAFSHSSHFTQHLRIHNGEKPYKCGECGQAFSQSSNLVRHQRLHTGEKPYACSQCGKAFIWSSVLIEHQRIHTGEKPYECSDCGKAFRGRSHFFRHLRTHTGEKPFACGACGKAFGQSSQLIQHQRVHYRE

SEQ ID NO: 6793 - protein, 366 aa, Homo sapiens
MLLLRCQLKQAPPQKVSFRFCVVMGKQQSKLKHSTYKYGPDEIIEERIQTKAFQEYSPAHMDTVSVVAALNSDLCVSGGKDKTVVAYNWKTGNVVKRFKGHEHEITKVACIPKSSQFFSASRDRMVMMWDLHGSSQPRQQLCGHAMVVTGLAVSPDSSQLCTGSRDNTLLLWDVVTGQSVERASVSRNVVTHLCWVPREPYILQTSEDKTLRLWDSRGLQVAHMFPAKQHIQTYCEVSVDGHKCISCSNGFGGEGCEATLWDLRQTRNRICEYKGHFQTVASCVFLPRALALMPLIATSSHDCKVKIWNQDTGACLFTLSLDGSGPLTSLAVGDAISLLCASFNRGIHLLRMDHSQGLELQEVAAF

SEQ ID NO: 6794 - protein, 245 aa, Homo sapiens
MEGNKLEEQDSSPPQSTPGLMKGNKREEQGLGPEPAAPQQPTAEEEALIEFHRSYRELFEFFCNNTTIHGAIRLVCSQHNRMKTAFWAVLWLCTFGMMYWQFGLLFGEYFSYPVSLNINLNSDKLVFPAVTICTLNPYRYPEIKEELEELDRITEQTLFDLYKYSSFTTLVAGSRSRRDLRGTLPHPLQRLRVPPPPHGARRARSVASSLRDNNPQVDWKDWKIGFQLELLSLPPPDVWKLLYFQ

SEQ ID NO: 6795 - protein, 791 aa, Homo sapiens
MGDQRLQDWLRSPGMDSKPWYCNKRPSKCFAKCKHRRLRFPPMDTQNWVFVKEGMDDFRYGCPSPEDTLVCRRDEFLLPKISLRGPQADPKSGQKKLLKKAALFSKLSPAQLARKAFVEQVEAQLMAKHPLAMYPNLGEDMPPDLLLQVLKHLDPERELEDAWACCETQEKTTEVPTEPGKHPCGEFCLKPPETPVSHLLPEPPETGVSHLSPEPPKTPVSSLRPEPPETGVSHLRPEPPETGVSHIRPGPPITRRRSSLLRQLLKLDSERKLEDARAPCEGREKTTDEPTEPGKYPCGKFCPRPFETPLSHLRQEPPKTPVSSLRPEPPETGESHLRLEHSKTRRGSSLRSEPSETGVSRLRLAPPKTRRGSSLHAEPSKTGVSHLSPEPPKTEVSHLHPVPPKTGVCHLRLEPPDTSQVSNLLLYILKVLDSGRTLKDVWDRCEARVKKTKEPTEPHKSPCGEPCLQPPETQVSHPHPEHPKTRRRSSLHSQPPKTRRTSSLRSEPPKTRRTSSLRSEPPKTRRTSSLGPEPPKTRRVSSLRPELPKSRRVSSLHPEPPKAPESHQFSEPPKIRASYIKELLQEDTPSTKECVSDSLQYRYTSEKLREFFKWAGDLGADEESIRNLFDFTPKYRATHEDQKFKKVKECSSELKYSMELDEKDEDKFFSQEKYWGRKFHTPSNSYTAQRVKMKYGAWYLKPKLWKKLRSDEPLIDPKLLLKKPDEPDVLDDLYGPIAFKDFILSKGYEMPGIIQRLFARRGWTYDSVKTPIQRAMIFYKYKEIVEASEED

SEQ ID NO: 6796 - protein, 951 aa, Homo sapiens
MPRHHAGGEEGGAAGLWVKSGAAAAAAGGGRLGSGMKDVESGRGRVLLNSAAARGDGLLLLGTRAATLGGGGGGLRESRRGKQGARMSLLGKPLSYTSSQSCRRNVKYRRVQNYLYNVLERPRGWAFIYHAFVFLLVFGCLILSVFSTIPEHTKLASSCLLILEFVMIVVFGLEFIIRIWSAGCCCRYRGWQGRLRFARKPFCVIDTIVLIASIAVVSAKTQGNIFATSALRSLRFLQILRMVRMDRRGGTWKLLGSVVYAHSKELITAWYIGFLVLIFSSFLVYLVEKDANKEFSTYADALWWGTITLTTIGYGDKTPLTWLGRLLSAGFALLGISFFALPAGILGSGFALKVQEQHRQKHFEKRRNPAANLIQCVWRSYAADEKSVSIATWKPHLKALHTCSPTKKEQGEASSSKFCSNKQKLFRMYTSRKQSQKLSFKERVRMASPRGQSIKSRQASVGDRRSPSTDITAEGSPTKVQKSWSFNDRTRFRPSLRLKSSQPKPVIDADTALGTDDVYDEKGCQCDVSVEDLTPPLKTVIRAIRIMKFHVAKRKFKETLRPYDVKDVIEQYSAGHLDMLCRIKSLQTRVDQILGKGQITSDKKSREKITAEHETTDDLSMLGRVVKVEKQVQSIESKLDCLLDIYQQVLRKGSASALALASFQIPPFECEQTSDYQSPVDSKDLSGSAQNSGCLSRSTSANISRGLQFILTPNEFSAQTFYALSPTMHSQATQVPISQSDGSAVAATNTIANQINTAPKPAAPTTLQIPPPLPAIKHLPRPETLHPNPAGLQESISDVTTCLVASKENVQVAQSNLTKDRSMRKSFDMGGETLLSVCPMVPKDLGKSLSVQNLIRSTEELNIQLSGSESSGSRGSQDFYPKWRESKLFITDEEVGPEETETDTFDAAPQPAREAAFASDSLRTGRSRSSQSICKAGESTDALSLPHVKLK

SEQ ID NO: 6797 - protein, 881 aa, Homo sapiens
MAAAAAEEGMEPRALQYEQTLMYGRYTQDLGAFAKEEAARIRLGGPEPWKGPPSSRAAPELLEYGRSRCARCRVCSVRCHKFLVSRVGEDWIFLVLLGLLMALVSWVMDYAIAACLQAQQWMSRGLNTSILLQYLAWVTYPVVLITFSAGFTQILAPQAVGSGIPEMKTILRGVVLKEYLTLKTFIAKVIGLTCALGSGMPLGKEGPFVHIASMCAALLSKFLSLFGGIYENESRNTEMLAAACAVGVGCCFAAPIGGVLFSIEVTSTFFAVRNYWRGFFAATFSAFIFRVLAVWNRDEETITALFKTRFRLDFPFDLQELPAFAVIGIASGFGGALFVYLNRKIVQVMRKQKTINRFLMRKRLLFPALVTLLISTLTFPPGFGQFMAGQLSQKETLVTLFDNRTWVRQGLVEELEPPSTSQAWNPPRANVFLTLVIFILMKFWMSALATTIPVPCGAFMPVFVIDGIHTDSSTYRIVPGGYAVVGAAALAGAVTHTVSTAVIVFELTGQIAHILPVMIAVILANAVAQSLQPSLYDSIIRIKKLPYLPELGWGRHQQYRVRVEDIMVRDVPHVALSCTFRDLRLALHRTKGRMLALVESPESMILLGSIERSQVVALLGAQLSPARRRQHMQERRATQTSPLSDQEGPPTPEASVCFQVNTEDSAFPAARGETHKPLKPALKRGPSVTRNLGESPTGSAESAGIALRSLFCGSPPPEAASEKLESCEKRKLKRVRISLASDADLEGEMSPEEILEWEEQQLDEPVNFSDCKIDPAPFQLVERTSLHKTHTIFSLLGVDHAYVTSIGRLIGIVTLKELRKAIEGSVTAQGVKVRPPLASFRDSATSSSDTETTEVHALWGPHSRHGLPREGSPSDSDDKCQ

SEQ ID NO: 6798 - protein, 1369 aa, Homo sapiens
MSPCGRKMGEGRQQRRAPVGKLLLLPGRRDTPHGRSGSSGARTQRSLLWLLVHVWLWAASGSSAQLFNLTLSVDEGLPPDTLVGDIRAGLPAAQQQEGSGFFLSEDSDDSPLLDDFHVHPDTGIIRTARRLDRERRDHYSFVAATLLGAVVQVEIRVNDVNDHSPRFPLDSLQLDVSELSPPGTAFRLPVAHDPDAGLFSTQGYTLVQPSDLPKDPAGPFFQLRYRTPGPLPSPLLPGSSSPLEPLDLVLLRRLDREEAAAHRLQIEAWDGGRPRRTGLLSVELRVLDENDNPPVFEQDEYRAAVREDAQPGAEVCRVRATDRDLGPNGFVRYSVRARQVPGAGSGGGALGDAAYFAVEELSGVVRVWRPLDREAQAWHQLVVEARDGGAEPEVATVRVSIAVLDVNDNRPAIHVLFLTEGGVARVSEGARPGDYVARVSVSDADGDWEKEDEATGELGVGLGDGSISLSLEGGEGDFALLPGGPPGVFFLCVEGPLDRESRDLYELLLVATDAGSPPLSTEETLLLRVADLNDQPPLFSQQHYKASVSEAAAPGTVVMWVSASDADEAGSDHAWLRYTVVQLSAPCNLGSLQSKMVHTAECGPSFAIDSESGAISTIRTLDREVQEAVELKVVAQDLGEPPLSATCLVSITVDDVNDNEPIFWRQVYNATIAEHAPVGHCFLQVTASDADSGLYGFIEYSLYDGFLSYEAPQAFRIDPHDGQICVSQDIDRERDPATYDLLVEAKDGGGLSAQAFVRVDLEDVNDNHPVFNPSTYVTSISDETQPGTEIINVLATDQDSGIYGTVAYELIPGNVSSLFTIDSTTGIIYLTLPLSHLESTTLSLMVSAQDGGGLTAVINADVTIHIFQTTLAPAEFERPKYTFLVYEDVPEDSPIGTVKAREPLNSSEPIFYRISSGDLGGKFSIHPRLGTIRTRKPLDHETQPVVVLTVQAQLGSAPACSSTEVNITVMDVNDNHPAFLRTSDEIRISQTTPPGTALYLARAEDRDSGRNGLIRYSIASPQPGVFAIDRALGVLFLNGSLGAGEQRELTLTLRAEDQGVHPQAALLVLTVVIEKREHSPSWTFEHLVYQVEVSESLSPMTQMLQTQAHPLGPQRAASPLRYSLEPSVDSAMFGIRPYTGWIYLRRQFDYESTQTYNFRVFAWIPEDGFLQNVSTTVIVRVWDENDNSPTFLHDVLFLKVEESPVPQGVIGKITAIDMDSGKNGQLLYFLLSDGKFFKMNPNTGELINWVALDREHRGHHEMTVLVTDRGSPPRNATMAVYVSVTDINDNRPFFPQCLPGKELHVKVLEGQPVNMLVTTVFAKDPDEGNNAEVTYSVSSARPMPLKGKTAFGKQSCKKQTNKQTNKILT

SEQ ID NO: 6799 - protein, 831 aa, Homo sapiens
MPLEMEPKMSKLAFGCQRSSTSDDDSGCALEEYAWVPPGLRPEQIQLYFACLPEEKVPYVNSPGEKHRIKQLLYQLPPHDNEVRYCQSLSEEEKKELQVFSAQRKKEALGRGTIKLLSRAVMHAVCEQCGLKINGGEVAVFASRAGPGVCWHPSCFVCFTCNELLVDLIYFYQDGKIHCGRHHAELLKPRCSACDEIIFADECTEAEGRHWHMKHFCCLECETVLGGQRYIMKDGRPFCCGCFESLYAEYCETCGEHIGVDHAQMTYDGQHWHATEACFSCAQCKASLLGCPFLPKQGQIYCSKTCSLGEDVHASDSSDSAFQSARSRDSRRSVRMGKSSRSADQCRQSLLLSPALNYKFPGLSGNADDTLSRKLDDLSLSRQGTSFASEEFWKGRVEQETPEDPEEWADHEDYMTQLLLKFGDKSLFQPQPNEMDIRASEHWISDNMVKSKTELKQNNQSLASKKYQSDMYWAQSQDGLGDSAYGSHPGPASSRRLQELELDHGASGYNHDETQWYEDSLECLSDLKPEQSVRDSMDSLALSNITGASVDGENKPRPSLYSLQNFEEMETEDCEKMSNMGTLNSSMLHRSAESLKSLSSELCPEKILPEEKPVHLPVLRRSKSQSRPQQVKFSDDVIDNGNYDIEIRQPPMSERTRRRVYNFEERGSRSHHHRRRRSRKSRSDNALNLVTERKYSPKDRLRLYTPDNYEKFIQNKSAREIQAYIQNADLYGQYAHATSDYGLQNPGMNRFLGLYGEDDDSWCSSSSSSSDSEEEGYFLGQPIPQPRPQRFAYYTDDLSSPPSALPTPQFGQRTTKSKKKKGHKGKNCIIS

SEQ ID NO: 6800 - protein, 583 aa, Homo sapiens
MLRMRVPALLVLLFCFRGRAGWSRYWISGNAANGQHDLHIRPVELEDEASYECQATQAGLRSRPAQLHVLVPPEAPQVLGGPSVSLVAGVPANLTCRSRGDARPTPELLWFRDGVLLDGATFHQTLLKEGTPGSVESTLTLTPFSHDDGATFVCRARSQALPTGRDTAITLSLQYPPEVTLSASPHTVQEGEKVIFLCQATAQPPVTGYRWAKGGSPVLGARGPRLEVVADASFLTEPVSCEVSNAVGSANRSTALDVLFGPILQAKPEPVSVDVGEDASFSCAWRGNPLPRVTWTRRGGAQVLGSGATLRLPSVGPEDAGDYVCRAEAGLSGLRGGAAEARLTVNAPPVVTALHSAPAFLRGPARLQCLVFASPAPDAVVWSWDEGFLEAGSQGRFLVETFPAPESRGGLGPGLISVLHISGTQESDFSRSFNCSARNRLGEGGAQASLGRRDLLPTVRIVAGVAAATTTLLMVITGVALCCWRHSKASASFSEQKNLMRIPGSSDGSSSRGPEEEETGSREDRGPIVHTDHSDLVLEEEGTLETKDPTNGYYKVRGVSPPASPDSRVTSFQWKSPGISNLP

SEQ ID NO: 6801 - protein, 267 aa, Homo sapiens
MSSKYPRSVRRCLPLCALTLEAALILLFYFFTHYDASLEDQKGLVASYQVGQDLTVMAALGLGFLTSNFRRHSWSSVAFNLFMLALGVQWAILLDGFLSQFPPGKVVITLFSIRLATMSAMSVLISAGAVLGKVNLAQLVVMVLVEVTALGTLRMVISNIFNTYVHSAVLAGGVAVGTSCHLIPSPWLAMVLGLVAGLISIGGAKCLPVCCNRVLGIHHISVMHSIFSLLGLLGEITYIVLLVLHTVWNGNGMFAPKSQNMESTSCG

SEQ ID NO: 6802 - protein, 373 aa, Homo sapiens
MKLINGKKQTFPWFGMDIGGTLVKLVYFEPKDITAEEEQEEVENLKSIRKYLTSNTAYGKTGIRDVHLELKNLTMCGRKGNLHFIRFPSCAMHRFIQMGSEKNFSSLHTTLCATGGGAFKFEEDFRMIADLQLHKLDELDCLIQGLLYVDSVGFNGKPECYYFENPTNPELCQKKPYCLDNPYPMLLVNMGSGVSILAVYSKDNYKRVTGTSLGGGTFLGLCCLLTGCETFEEALEMAAKGDSTNVDKLVKDIYGGDYERFGLQGSAVASSFGNMMSKEKRDSISKEDLARATLVTITNNIGSIARMCALNENIDRVVFVGNFLRINMVSMKLLAYAMDFWSKGQLKALFLEHEGYFGAVGALLELFKMTDDK

SEQ ID NO: 6803 - protein, 1551 aa, Homo sapiens
MERRLRALEQLARGEAGGCPGLDGLLDLLLALHHELSSGPLRRERSVAQFLSWASPFVSKVKELRLQRDDFEILKVIGRGAFGEVTVVRQRDTGQIFAMKMLHKWEMLKRAETACFREERDVLVKGDSRWVTTLHYAFQDEEYLYLVMDYYAGGDLLTLLSRFEDRLPPELAQFYLAEMVLAIHSLHQLGYVHRDVKPDNVLLDVNGHIRLADFGSCLRLNTNGMVDSSVAVGTPDYISPEILQAMEEGKGHYGPQCDWWSLGVCAYELLFGETPFYAESLVETYGKIMNHEDHLQFPPDVPDVPASAQDLIRQLLCRQEERLGRGGLDDFRNHPFFEGVDWERLASSTAPYIPELRGPMDTSNFDVDDDTLNHPGTLPPPSHGAFSGHHLPFVGFTYTSGSHSPESSSEAWAALERKLQCLEQEKVELSRKHQEALHAPTDHRELEQLRKEVQTLRDRLPEMLRDKASLSQTDGPPAGSPGQDSDLRQELDRLHRELAEGRAGLQAQEQELCRAQGQQEELLQRLQEAQEREAATASQTRALSSQLEEARAAQRELEAQVSSLSRQVTQLQGQWEQRLEESSQAKTIHTASETNGMGPPEGGPQEAQLRKEVAALREQLEQAHSHRPSGKEEALCQLQEENRRLSREQERLEAELAQEQESKQRLEGERRETESNWEAQLADILSWVNDEKVSRGYLQALATKMAEELESLRNVGTQTLPARPLDHQWKARRLQKMEASARLELQSALEAEIRAKQGLQERLTQVQEAQLQAERRLQEAEKQSQALQQELAMLREELRARGPVDTKPSNSLIPFLSFRSSEKDSAKDPGISGEATRHGGEPDLRPEGRRSLRMGAVFPRAPTANTASTEGLPAKPGSHTLRPRSFPSPTKCLRCTSLMLGLGRQGLGCDACGYFCHTTCAPQAPPCPVPPDLLRTALGVHPETGTGTAYEGFLSVPRPSGVRRGWQRVFAALSDSRLLLFDAPDLRLSPPSGALLQVLDLRDPQFSATPVLASDVIHAQSRDLPRIFRVTTSQLAVPPTTCTVLLLAESEGERERWLQVLGELQRLLLDARPRPRPVYTLKEAYDNGLPLLPHTLCAAILDQDRLALGTEEGLFVIHLRSNDIFQVGECRRVQQLTLSPSAGLLVVLCGRGPSVRLFALAELENIEVAGAKIPESRGCQVLAAGSILQARTPVLCVAVKRQVLCYQLGPGPGPWQRRIRELQAPATVQSLGLLGDRLCVGAAGGFALYPLLNEAAPLALGAGLVPEELPPSRGGLGEALGAVELSLSEFLLLFTTAGIYVDGAGRKSRGHELLWPAAPMGWGYAAPYLTVFSENSIDVFDVRRAEWVQTVPLKKVRPLNPEGSLFLYGTEKVRLTYLRNQLAEKDEFDIPDLTDNSRRQLFRTKSKRRFFFRVSEEQQKQQRREMLKDPFVRSKLISPPTNFNHLVHVGPANGRPGARDKSPAPEEKGRVARGSGPQRPHSFSEALRRPASMGSEGLGGDADPMKRKPWTSLSSESVSCPQGSLSPATSLMQVSERPRSLPLSPELESSP

SEQ ID NO: 6804 - protein, 1230 aa, Homo sapiens
MIKTEKSYPERRLRGVLEELSCGCCRFLSLADKDQGHSSRTRLDRERLKSCMRELENMGQQARMLRAQVKRHTVRDKLRLCQNFLQKLRFLADEPQHSIPDIFIWMMSNNKRVAYARVPSKDLLFSIVEEETGKDCAKVKTLFLKLPGKRGFGSAGWTVQAKVELYLWLGLSKQRKEFLCGLPCGFQEVKAAQGLGLHAFPPVSLVYTKKQAFQLRAHMYQARSLFAADSSGLSDPFARVFFINQSQCTEVLNETLCPTWDQMLVFDNLELYGEAHELRDDPPIIVIEIYDQDSMGKADFMGRTFAKPLVKMADEAYCPPRFPPQLEYYQIYRGNATAGDLLAAFELLQIGPAGKADLPPINGPVDVDRGPIMPVPMGIRPVLSKYRVEVLFWGLRDLKRVNLAQVDRPRVDIECAGKGVQSSLIHNYKKNPNFNTLVKWFEVDLPENELLHPPLNIRVVDCRAFGRYTLVGSHAVSSLRRFIYRPPDRSAPSWNTTGEVVVTMEPEVPIKKLETMVKLDATSEAVVKVDVAEEEKEKKKKKKGTAEEPEEEEPDESMLDWWSKYFASIDTMKEQLRQQEPSGIDLEEKEEVDNTEGLKGSMKGKEKARAAKEEKKKKTQSSGSGQGSEAPEKKKPKIDELKVYPKELESEFDNFEDWLHTFNLLRGKTGDDEDGSTEEERIVGRFKGSLCVYKVPLPEDVSREAGYDSTYGMFQGIPSNDPINVLVRVYVVRATDLHPADINGKADPYIAIRLGKTDIRDKENYISKQLNPVFGKSFDIEASFPMESMLTVAVYDWDLVGTDDLIGETKIDLENRFYSKHRATCGIAQTYSTHGYNIWRDPMKPSQILTRLCKDGKVDGPHFGPPGRVKVANRVFTGPSEIEDENGQRKPTDEHVALLALRHWEDIPRAGCRLVPEHVETRPLLNPDKPGIEQGRLELWVDMFPMDMPAPGTPLDISPRKPKKYELRVIIWNTDEVVLEDDDFFTGEKSSDIFVRGWLKGQQEDKQDTDVHYHSLTGEGNFNWRYLFPFDYLAAEEKIVISKKESMFSWDETEYKIPARLTLQIWDADHFSADDFLGAIELDLNRFPRGAKTAKQCTMEMATGEVDVPLVSIFKQKRVKGWWPLLARNENDEFELTGKVEAELHLLTAEEAEKNPVGLARNEPDPLEKPNRPDTSFIWFLNPLKSARYFLWHTYRWLLLKLLLLLLLLLLLALFLYSVPGYLVKKILGA

SEQ ID NO: 6805 - protein, 644 aa, Homo sapiens
MAEAVAAPISPWTMAATIQAMERKIESQAARLLSLEGRTGMAEKKLADCEKTAVEFGNQLEGKWAVLGTLLQEYGLLQRRLENVENLLRNRNFWILRLPPGSKGESPKEWGKLEDWQKELYKHVMRGNYETLVSLDYAISKPEVLSQIEQGKEPCNWRRPGPKIPDVPVDPSPGSGPPVPAPDLLMQIKQEGELQLQEQQALGVEAWAAGQPDIGEEPWGLSQLDSGAGDISTDATSGVHSNFSTTIPPTSWQTDLPPHHPSSACSDGTLKLNTAASTEDVKIVIKTEVQEEEVVATPVHPTDLEAHGTLFGPGQATRFFPSPAQEGAWESQGSSFPSQDPVLGLREPARPERDMGELSPAVAQEETPPGDWLFGGVRWGWNFRCKPPVGLNPRTGPEGLPYSSPDNGEAILDPSQAPRPFNEPCKYPGRTKGFGHKPGLKKHPAAPPGGRPFTCATCGKSFQLQVSLSAHQRSCGAPDGSGPGTGGGGSGSGGGGGGSGGGSARDGSALRCGECGRCFTRPAHLIRHRMLHTGERPFPCTECEKRFTERSKLIDHYRTHTGVRPFTCTVCGKSFIRKDHLRKHQRNHAAGAKTPARGQPLPTPPAPPDPFKSPASKGPLASTDLVTDWTCGLSVLGPTDGGDM

SEQ ID NO: 6806 - protein, 551 aa, Homo sapiens
MEEELPLFSGDSGKPVQATLSSLKMLDVGKWPIFSLCSEEELQLIRQACVFGSAGNEVLYTTVNDEIFVLGTNCCGCLGLGDVQSTIEPRRLDSLNGKKIACLSYGSGPHIVLATTEGEVFTWGHNAYSQLGNGTTNHGLVPCHISTNLSNKQVIEVACGSYHSLVLTSDGEVFAWGYNNSGQVGSGSTVNQPIPRRVTGCLQNKVVVTIACGQMCCMAVVDTGEVYVWGYNGNGQLGLGNSGNQPTPCRVAALQGIRVQRVACGYAHTLVLTDEGQVYAWGANSYGQLGTGNKSNQSYPTPVTVEKDRIIEIAACHSTHTSAAKTQGGHVYMWGQCRGQSVILPHLTHFSCTDDVFACFATPAVTWRLLSVEPDDHLTVAESLKREFDNPDTADLKFLVDGKYIYAHKVLLKIRCEHFRSSLEDNEDDIVEMSEFSYPVYRAFLEYLYTDSISLSPEEAVGLLDLATFYRENRLKKLCQQTIKQGICEENAIALLSAAVKYDAQDLEEFCFRFCINHLTVVTQTSGFAEMDHDLLKNFISKASRVGAFKN

SEQ ID NO: 6807 - protein, 287 aa, Homo sapiens
MAEHFKQIIRCPVCLKDLEEAVQLKCGYACCLQCLNSLQKEPDGEGLLCRFCSVVSQKDDIKPKYKLRALVSIIKELEPKLKSVLTMNPRMRKFQVDMTFDVDTANNYLIISEDLRSFRSGDLSQNRKEQAERFDTALCVLGTPRFTSGRHYWEVDVGTSQVWDVGVCKESVNRQGKIELSSEHGFLTVGCREGKVFAASTVPMTPLWVSPQLHRVGIFLDVGMRSIAFYNVSDGCHINTFIEIPVCEPWRPFFAHKRGSQDDQSILSICSVINPSTASAPVSSEGK

SEQ ID NO: 6808 - protein, 322 aa, Homo sapiens
MERARRRGGGGGRGRGGKNVGGSGLSKSRLYPQAQHSHYPHYAASATPNQAGGAAEIQELASKRVDIQKKRFYLDVKQSSRGRFLKIAEVWIGRGRQDNIRKSKLTLSLSVAAELKDCLGDFIEHYAHLGLKGHRQEHGHSKEQGSRRRQKHSAPSPPVSVGSEEHPHSVLKTDYIERDNRKYYLDLKENQRGRFLRIRQTMMRGTGMIGYFGHSLGQEQTIVLPAQGMIEFRDALVQLIEDYGEGDIEERRGGDDDPLELPEGTSFRVDNKRFYFDVGSNKYGIFLKLTNYPKSRENINLFHCCQIKHKEQPHDTTKTVEE

SEQ ID NO: 6809 - protein, 505 aa, Homo sapiens
MWPSLLLLLLLPGPPPVAGLEDAAFPHLGESLQPLPRACPLRCSCPRVDTVDCDGLDLRVFPDNITRAAQHLSLQNNQLQELPYNELSRLSGLRTLNLHNNLISSEGLPDEAFESLTQLQHLCVAHNKLSVAPQFLPRSLRVADLAANQVMEIFPLTFGEKPALRSVYLHNNQLSNAGLPPDAFRGSEAIATLSLSNNQLSYLPPSLPPSLERLHLQNNLISKVPRGALSRQTQLRELYLQHNQLTDSGLDATTFSKLHSLEYLDLSHNQLTTVPAGLPRTLAILHLGRNRIRQVEAARLHGARGLRYLLLQHNQLGSSGLPAGALRPLRGLHTLHLYGNGLDRVPPALPRRLRALVLPHNHVAALGARDLVATPGLTELNLAYNRLASARVHHRAFRRLRALRSLDLAGNQLTRLPMGLPTGLRTLQLQRNQLRMLEPEPLAGLDQLRELSLAHNRLRVGDIGPGTWHELQALQVRHRLVSHTVPRAPPSPCLPCHVPNILVSW

SEQ ID NO: 6810 - protein, 325 aa, Homo sapiens
MNKSRWQSRRRHGRRSHQQNPWFRLRDSEDRSDSRAAQPAHDSGHGDDESPSTSSGTAGTSSVPELPGFYFDPEKKRYFRLLPGHNNCNPLTKESIRQKEMESKRLRLLQEEDRRKKADTNSDRLFTVNDVKVGGSKYGIINLQSLKTPTLKVFMHENLYFTNRKAPLLFNGCRSGEIFAIDLRCGNQGKGWKATRLFHDSAVTSVRILQDEQYLMASDMAGKIKLWDLRTTKCVRQYEGHVNEYAYLPLHVHEEEGILVAVGQDCYTRIWSLHDARLLRTIPSPYPASKADIPSVAFSSRLGGSRGAPGLLMAVGQDLYCYSYS

SEQ ID NO: 6811 - protein, 4097 aa, Homo sapiens
MAGSGAGVRCSLLRLQETLSAADRCGAALAGHQLIRGLGQECVLSSSPAVLALQTSLVFSRDFGLLVFVRKSLNSIEFRECREEILKFLCIFLEKMGQKIAPYSVEIKNTCTSVYTKDRAAKCKIPALDLLIKLLQTFRSSRLMDEFKIGELFSKFYGELALKKKIPDTVLEKVYELLGLLGEVHPSEMINNAENLFRAFLGELKTQMTSAVREPKLPVLAGCLKGLSSLLCNFTKSMEEDPQTSREIFNFVLKAIRPQIDLKRYAVPSAGLRLFALHASQFSTCLLDNYVSLFEVLLKWCAHTNVELKKAALSALESFLKQVSNMVAKNAEMHKNKLQYFMEQFYGIIRNVDSNNKELSIAIRGYGLFAGPCKVINAKDVDFMYVELIQRCKQMFLTQTDTGDDRVYQMPSFLQSVASVLLYLDTVPEVYTPVLEHLVVMQIDSFPQYSPKMQLVCCRAIVKVFLALAAKGPVLRNCISTVVHQGLIRICSKPVVLPKGPESESEDHRASGEVRTGKWKVPTYKDYVDLFRHLLSSDQMMDSILADEAFFSVNSSSESLNHLLYDEFVKSVLKIVEKLDLTLEIQTVGEQENGDEAPGVWMIPTSDPAANLHPAKPKDFSAFINLVEFCREILPEKQAEFFEPWVYSFSYELILQSTRLPLISGFYKLLSITVRNAKKIKYFEGVSPKSLKHSPEDPEKYSCFALFVKFGKEVAVKMKQYKDELLASCLTFLLSLPHNIIELDVRAYVPALQMAFKLGLSYTPLAEVGLNALEEWSIYIDRHVMQPYYKDILPCLDGYLKTSALSDETKNNWEVSALSRAAQKGFNKVVLKHLKKTKNLSSNEAISLEEIRIRVVQMLGSLGGQINKNLLTVTSSDEMMKSYVAWDREKRLSFAVPFREMKPVIFLDVFLPRVTELALTASDRQTKVAACELLHSMVMFMLGKATQMPEGGQGAPPMYQLYKRTFPVLLRLACDVDQVTRQLYEPLVMQLIHWFTNNKKFESQDTVALLEAILDGIVDPVDSTLRDFCGRCIREFLKWSIKQITPQQQEKSPVNTKSLFKRLYSLALHPNAFKRLGASLAFNNIYREFREEESLVEQFVFEALVIYMESLALAHADEKSLGTIQQCCDAIDHLCRIIEKKHVSLNKAKKRRLPRGFPPSASLCLLDLVKWLLAHCGRPQTECRHKSIELFYKFVPLLPGNRSPNLWLKDVLKEEGVSFLINTFEGGGCGQPSGILAQPTLLYLRGPFSLQATLCWLDLLLAALECYNTFIGERTVGALQVLGTEAQSSLLKAVAFFLESIAMHDIIAAEKCFGTGAAGNRTSPQEGERYNYSKCTVVVRIMEFTTTLLNTSPEGWKLLKKDLCNTHLMRVLVQTLCEPASIGFNIGDVQVMAHLPDVCVNLMKALKMSPYKDILETHLREKITAQSIEELCAVNLYGPDAQVDRSRLAAVVSACKQLHRAGLLHNILPSQSTDLHHSVGTELLSLVYKGIAPGDERQCLPSLDLSCKQLASGLLELAFAFGGLCERLVSLLLNPAVLSTASLGSSQGSVIHFSHGEYFYSLFSETINTELLKNLDLAVLELMQSSVDNTKMVSAVLNGMLDQSFRERANQKHQGLKLATTILQHWKKCDSWWAKDSPLETKMAVLALLAKILQIDSSVSFNTSHGSFPEVFTTYISLLADTKLDLHLKGQAVTLLPFFTSLTGGSLEELRRVLEQLIVAHFPMQSREFPPGTPRFNNYVDCMKKFLDALELSQSPMLLELMTEVLCREQQHVMEELFQSSFRRIARRGSCVTQVGLLESVYEMFRKDDPRLSFTRQSFVDRSLLTLLWHCSLDALREFFSTIVVDAIDVLKSRFTKLNESTFDTQITKKMGYYKILDVMYSRLPKDDVHAKESKINQVFHGSCITEGNELTKTLIKLCYDAFTENMAGENQLLERRRLYHCAAYNCAISVICCVFNELKFYQGFLFSEKPEKNLLIFENLIDLKRRYNFPVEVEVPMERKKKYIEIRKEAREAANGDSDGPSYMSSLSYLADSTLSEEMSQFDFSTGVQSYSYSSQDPRPATGRFRRREQRDPTVHDDVLELEMDELNRHECMAPLTALVKHMHRSLGPPQGEEDSVPRDLPSWMKFLHGKLGNPIVPLNIRLFLAKLVINTEEVFRPYAKHWLSPLLQLAASENNGGEGIHYMVVEIVATILSWTGLATPTGVPKDEVLANRLLNFLMKHVFHPKRAVFRHNLEIIKTLVECWKDCLSIPYRLIFEKFSGKDPNSKDNSVGIQLLGIVMANDLPPYDPQCGIQSSEYFQALVNNMSFVRYKEVYAAAAEVLGLILRYVMERKNILEESLCELVAKQLKQHQNTMEDKFIVCLNKVTKSFPPLADRFMNAVFFLLPKFHGVLKTLCLEVVLCRVEGMTELYFQLKSKDFVQVMRHRDDERQKVCLDIIYKMMPKLKPVELRELLNPVVEFVSHPSTTCREQMYNILMWIHDNYRDPESETDNDSQEIFKLAKDVLIQGLIDENPGLQLIIRNFWSHETRLPSNTLDRLLALNSLYSPKIEVHFLSLATNFLLEMTSMSPDYPNPMFEHPLSECEFQEYTIDSDWRFRSTVLTPMFVETQASQGTLQTRTQEGSLSARWPVAGQIRATQQQHDFTLTQTADGRSSFDWLTGSSTDPLVDHTSPSSDSLLFAHKRSERLQRAPLKSVGPDFGKKRLGLPGDEVDNKVKGAAGRTDLLRLRRRFMRDQEKLSLMYARKGVAEQKREKEIKSELKMKQDAQVVLYRSYRHGDLPDIQIKHSSLITPLQAVAQRDPIIAKQLFSSLFSGILKEMDKFKTLSEKNNITQKLLQDFNRFLNTTFSFFPPFVSCIQDISCQHAALLSLDPAAVSAGCLASLQQPVGIRLLEEALLRLLPAELPAKRVRGKARLPPDVLRWVELAKLYRSIGEYDVLRGIFTSEIGTKQITQSALLAEARSDYSEAAKQYDEALNKQDWVDGEPTEAEKDFWELASLDCYNHLAEWKSLEYCSTASIDSENPPDLNKIWSEPFYQETYLPYMIRSKLKLLLQGEADQSLLTFIDKAMHGELQKAILELHYSQELSLLYLLQDDVDRAKYYIQNGIQSFMQNYSSIDVLLHQSRLTKLQSVQALTEIQEFISFISKQGNLSSQVPLKRLLNTWTNRYPDAKMDPMNIWDDIITNRCFFLSKIEEKLTPLPEDNSMNVDQDGDPSDRMEVQEQEEDISSLIRSCKFSMKMKMIDSARKQNNFSLAMKLLKELHKESKTRDDWLVSWVQSYCRLSHCRSRSQGCSEQVLTVLKTVSLLDENNVSSYLSKNILAFRDQNILLGTTYRIIANALSSEPACLAEIEEDKARRILELSGSSSEDSEKVIAGLYQRAFQHLSEAVQAAEEEAQPPSWSCGPAAGVIDAYMTLADFCDQQLRKEEENASVIDSAELQAYPALVVEKMLKALKLNSNEARLKFPRLLQIIERYPEETLSLMTKEISSVPCWQFISWISHMVALLDKDQAVAVQHSVEEITDNYPQAIVYPFIISSESYSFKDTSTGHKNKEFVARIKSKLDQGGVIQDFINALDQLSNPELLFKDWSNDVRAELAKTPVNKKNIEKMYERMYAALGDPKAPGLGAFRRKFIQTFGKEFDKHFGKGGSKLLRMKLSDFNDITNMLLLKMNKDSKPPGNLKECSPWMSDFKVEFLRNELEIPGQYDGRGKPLPEYHVRIAGFDERVTVMASLRRPKRIIIRGHDEREHPFLVKGGEDLRQDQRVEQLFQVMNGILAQDSACSQRALQLRTYSVVPMTSSDPRAPPCEYKDWLTKMSGKHDVGAYMLMYKGANRTETVTSFRKRESKVPADLLKRAFVRMSTSPEAFLALRSHFASSHALICISHWILGIGDRHLNNFMVAMETGGVIGIDFGHAFGSATQFLPVPELMPFRLTRQFINLMLPMKETGLMYSIMVHALRAFRSDPGLLTNTMDVFVKEPSFDWKNFEQKMLKKGGSWIQEINVAEKNWYPRQKICYAKRKLAGANPAVITCDELLLGHEKAPAFRDYVAVARGSKDHNIRAQEPESGLSEETQVKCLMDQATDPNILGRTWEGWEPWM

SEQ ID NO: 6812 - protein, 643 aa, Homo sapiens
MTPALTALLCLGLSLGPRTRMQAGPFPKPTLWAEPGSVISWGSPVTIWCQGSLEAQEYQLDKEGSPEPWDRNNPLEPKNKARFSIPSMTQHHAGRYRCHYYSSAGWSEPSDPLELVMTGFYNKPTLSALPSPVVASGGNMTLRCGSQKGYHHFVLMKEGEHQLPRTLDSQQLHSGGFQALFPVGPVTPSHRWRFTCYYYYTNTPWVWSHPSDPLEILPSGVSRKPSLLTLQGPVLAPGQSLTLQCGSDVGYDRFVLYKEGERDFLQRPGQQPQAGLSQANFTLGPVSRSYGGQYRCYGAHNLSSEWSAPSDPLDILITGQIYDTVSLSAQPGPTVASGENMTLLCQSRGYFDTFLLTKEGAAHPPLRLRSMYGAHKYQAEFPMSPVTSAHAGTYRCYGSRSSNPHLLSFPSEPLELMVSGPEDQPLNPPGSGPQNAPGLGSGAGTRAAGLGRYLEVLIGVSVAFVLLLFLLLFLLLLRQRHSKHRTSDQRKTDFQRPAGAAETEPKDRGLLRRSSPAADVQEENLYAAVKDTQSEDRVELDSQSPHDEDPQAVTYAPVKHSSPRREMASPPSSLSGEFLDTKDRQVEEDRQMDTEAAASEASQDVTYAQLHSLTLRRKATEPPPSQEGEPPAEPSIYATLAIH

SEQ ID NO: 6813 - protein, 1261 aa, Homo sapiens
MMMNVPGGGAAAVMMTGYNNGRCPRNSLYSDCIIEEKTVVLQKKDNEGFGFVLRGAKADTPIEEFTPTPAFPALQYLESVDEGGVAWQAGLRTGDFLIEVNNENVVKVGHRQVVNMIRQGGNHLVLKVVTVTRNLDPDDTARKKAPPPPKRAPTTALTLRSKSMTSELEELVDKASVRKKKDKPEEIVPASKPSRAAENMAVEPRVATIKQRPSSRCFPAGSDMNSVYERQGIAVMTPTVPGSPKAPFLGIPRGTMRRQKSIDSRIFLSGITEEERQFLAPPMLKFTRSLSMPDTSEDIPPPPQSVPPSPPPPSPTTYNCPKSPTPRVYGTIKPAFNQNSAAKVSPATRSDTVATMMREKGMYFRRELDRYSLDSEDLYSRNAGPQANFRNKRGQMPENPYSEVGKIASKAVYVPAKPARRKGMLVKQSNVEDSPEKTCSIPIPTIIVKEPSTSSSGKSSQGSSMEIDPQAPEPPSQLRPDESLTVSSPFAAAIAGAVRDREKRLEARRNSPAFLSTDLGDEDVGLGPPAPRTRPSMFPEEGDFADEDSAEQLSSPMPSATPREPENHFVGGAEASAPGEAGRPLNSTSKAQGPESSPAVPSASSGTAGPGNYVHPLTGRLLDPSSPLALALSARDRAMKESQQGPKGEAPKADLNKPLYIDTKMRPSLDAGFPTVTRQNTRGPLRRQETENKYETDLGRDRKGDDKKNMLIDIMDTSQQKSAGLLMVHTVDATKLDNALQEEDEKAEVEMKPDSSPSEVPEGVSETEGALQISAAPEPTTVPGRTIVAVGSMEEAVILPFRIPPPPLASVDLDEDFIFTEPLPPPLEFANSFDIPDDRAASVPALSDLVKQKKSDTPQSPSLNSSQPTNSADSKKPASLSNCLPASFLPPPESFDAVADSGIEEVDSRSSSDHHLETTSTISTVSSISTLSSEGGENVDTCTVYADGQAFMVDKPPVPPKPKMKPIIHKSNALYQDALVEEDVDSFVIPPPAPPPPPGSAQPGMAKVLQPRTSKLWGDVTEIKSPILSGPKANVISELNSILQQMNREKLAKPGEGLDSPMGAKSASLAPRSPEIMSTISGTRSTTVTFTVRPGTSQPITLQSRPPDYESRTSGTRRAPSPVVSPTEMNKETLPAPLSAATASPSPALSDVFSLPSQPPSGDLFGLNPAGRSRSPSPSILQQPISNKPFTTKPVHLWTKPDVADWLESLNLGEHKEAFMDNEIDGSHLPNLQKEDLIDLGVTRVGHRMNIERALKQLLDR

SEQ ID NO: 6814 - protein, 624 aa, Homo sapiens
MAENGESSGPPRPSRGPAAAQGSAAAPAEPKIIKVTVKTPKEKEEFAVPENSSVQQFKEAISKRFKSQTDQLVLIFAGKILKDQDTLIQHGIHDGLTVHLVIKSQNRPQGQSTQPSNAAGTNTTSASTPRSNSTPISTNSNPFGLGSLGGLAGLSSLGLSSTNFSELQSQMQQQLMASPEMMIQIMENPFVQSMLSNPDLMRQLIMANPQMQQLIQRNPEISHLLNNPDIMRQTLEIARNPAMMQEMMRNQDLALSNLESIPGGYNALRRMYTDIQEPMLNAAQEQFGGNPFASVGSSSSSGEGTQPSRTENRDPLPNPWAPPPATQSSATTSTTTSTGSGSGNSSSNATGNTVAAANYVASIFSTPGMQSLLQQITENPQLIQNMLSAPYMRSMMQSLSQNPDLAAQMMLNSPLFTANPQLQEQMRPQLPAFLQQMQNPDTLSAMSNPRAMQALMQIQQGLQTLATEAPGLIPSFTPGVGVGVLGTAIGPVGPVTPIGPIGPIVPFTPIGPIGPIGPTGPAAPPGSTGSGGPTGPTVSSAAPSETTSPTSESGPNQQFIQQMVQALAGANAPQLPNPEVRFQQQLEQLNAMGFLNREANLQALIATGGDINAAIERLLGSQPS

SEQ ID NO: 6815 - protein, 400 aa, Homo sapiens
MSTELFSSTREEGSSGSGPSFRSNQRKMLNLLLERDTSFTVCPDVPRTPVGKFLGDSANLSILSGSPGFFRTSGSAFSWDDNGNLVDSEMKYLGSPITTVPKLDKNPNLGEDQAEEISDELMEFSLKDQEAKVSRSGLYRSPSMPENLNRPRLKQVEKFKDNTIPDKVKKKYFSGQGKLRKGLCLKKTVSLCDITITQMLEEDSNQGHLIGDFSKVCALPTVSGKHQDLKYVNPETVAALLSGKFQGLIEKFYVIDCRYPYEYLGGHIQGALNLYSQEELFNFFLKKPIVPLDTQKRIIIVFHCEFSSERGPRMCRCLREEDRSLNQYPALYYPELYILKGGYRDFFPEYMELCEPQSYCPMHHQDHKTELLRCRSQSKVQEGERQLREQIALLVKDMSP

SEQ ID NO: 6816 - protein, 1684 aa, Homo sapiens
MSWKRNYFSGGRGSVQGMFAPRSSTSIAPSKGLSNEPGQNSCFLNSALQVLWHLDIFRRSFRQLTTHKCMGDSCIFCALKGIFNQFQCSSEKVLPSDTLRSALAKTFQDEQRFQLGIMDDAAECFENLLMRIHFHIADETKEDICTAQHCISHQKFAMTLFEQCVCTSCGATSDPLPFIQMVHYISTTSLCNQAICMLERREKPSPSMFGELLQNASTMGDLRNCPSNCGERIRIRRVLMNAPQIITIGLVWDSDHSDLAEDVIHSLGTCLKLGDLFFRVTDDRAKQSELYLVGMICYYGKHYSTFFFQTKIRKWMYFDDAHVKEIGPKWKDVVTKCIKGHYQPLLLLYADPQGTPVSTQDLPPQAEFQSYSRTCYDSEDSGREPSISSDTRTDSSTESYPYKHSHHESVVSHFSSDSQGTVIYNVENDSMSQSSRDTGHLTDSECNQKHTSKKGSLIERKRSSGRVRRKGDEPQASGYHSEGETLKEKQAPRNASKPSSSTNRLRDFKETVSNMIHNRPSLASQTNVGSHCRGRGGDQPDKKPPRTLPLHSRDWEIESTSSESKSSSSSKYRPTWRPKRESLNIDSIFSKDKRKHCGYTQLSPFSEDSAKEFIPDEPSKPPSYDIKFGGPSPQYKRWGPARPGSHLLEQHPRLIQRMESGYESSERNSSSPVSLDAALPESSNVYRDPSAKRSAGLVPSWRHIPKSHSSSILEVDSTASMGGWTKSQPFSGEEISSKSELDELQEEVARRAQEQELRRKREKELEAAKGFNPHPSRFMDLDELQNQGRSDGFERSLQEAESVFEESLHLEQKGDCAAALALCNEAISKLRLALHGASCSTHSRALVDKKLQISIRKARSLQDRMQQQQSPQQPSQPSACLPTQAGTLSQPTSEQPIPLQVLLSQEAQLESGMDTEFGASSFFHSPASCHESHSSLSPESSAPQHSSPSRSALKLLTSVEVDNIEPSAFHRQGLPKAPGWTEKNSHHSWEPLDAPEGKLQGSRCDNSSCSKLPPQEGRGIAQEQLFQEKKDPANPSPVMPGIATSERGDEHSLGCSPSNSSAQPSLPLYRTCHPIMPVASSFVLHCPDPVQKTNQCLQGQSLKTSLTLKVDRGSEETYRPEFPSTKGLVRSLAEQFQRMQGVSMRDSTGFKDRSLSGSLRKNSSPSDSKPPFSQGQEKGHWPWAKQQSSLEGGDRPLSWEESTEHSSLALNSGLPNGETSSGGQPRLAEPDIYQEKLSQVRDVRSKDLGSSTDLGTSLPLDSWVNITRFCDSQLKHGAPRPGMKSSPHDSHTCVTYPERNHILLHPHWNQDTEQETSELESLYQASLQASQAGCSGWGQQDTAWHPLSQTGSADGMGRRLHSAHDPGLSKTSTAEMEHGLHEARTVRTSQATPCRGLSRECGEDEQYSAENLRRISRSLSGTVVSEREEAPVSSHSFDSSNVRKPLETGHRCSSSSSLPVIHDPSVFLLGPQLYLPQPQFLSPDVLMPTMAGEPNRLPGTSRSVQQFLAMCDRGETSQGAKYTGRTLNYQSLPHRSRTDNSWAPWSETNQHIGTRFLTTPGCNPQLTYTATLPERSKGLQVPHTQSWSDLFHSPSHPPIVHPVYPPSSSLHVPLRSAWNSDPVPGSRTPGPRRVDMPPDDDWRQSSYASHSGHRRTVGEGFLFVLSDAPRREQIRARVLQHSQW

SEQ ID NO: 6817 - protein, 737 aa, Homo sapiens
MQPRRAQAPGAQLLPALALLLLLLGAGPRGSSLANPVPAAPLSAPGPCAAQPCRNGGVCTSRPEPDPQHPAPAGEPGYSCTCPAGISGANCQLVADPCASNPCHHGNCSSSSSSSSDGYLCICNEGYEGPNCEQALPSLPATGWTESMAPRQLQPVPATQEPDKILPRSQATVTLPTWQPKTGQKVVEMKWDQVEVIPDIACGNASSNSSAGGRLVSFEVPQNTSVKIRQDATASLILLWKVTATGFQQCSLIDGRSVTPLQASGGLVLLEEMLALGNNHFIGFVNDSVTKSIVALRLTLVVKVSTCVPGESHANDLECSGKGKCTTKPSEATFSCTCEEQYVGTFCEEYDACQRKPCQNNASCIDANEKQDGSNFTCVCLPGYTGELCQSKIDYCILDPCRNGATCISSLSGFTCQCPEGYFGSACEEKVDPCASSPCQNNGTCYVDGVHFTCNCSPGFTGPTCAQLIDFCALSPCAHGTCRSVGTSYKCLCDPGYHGLYCEEEYNECLSAPCLNAATCRDLVNGYECVCLAEYKGTHCELYKDPCANVSCLNGATCDSDGLNGTCICAPGFTGEECDIDINECDSNPCHHGGSCLDQPNGYNCHCPHGWVGANCEIHLQWKSGHMAESLTNMPRHSLYIIIGALCVAFILMLIILIVGICRISRIEYQGSSRPAYEEFYNCRSIDSEFSNAIASIRHARFGKKSRPAMYDVSPIAYEDYSPDDKPLVTLIKTKDL

SEQ ID NO: 6818 - protein, 697 aa, Homo sapiens
MLLPLLLSSLLGGSQAMDGRFWIRVQESVMVPEGLCISVPCSFSYPRQDWTGSTPAYGYWFKAVTETTKGAPVATNHQSREVEMSTRGRFQLTGDPAKGNCSLVIRDAQMQDESQYFFRVERGSYVRYNFMNDGFFLKVTALTQKPDVYIPETLEPGQPVTVICVFNWAFEECPPPSFSWTGAALSSQGTKPTTSHFSVLSFTPRPQDHNTDLTCHVDFSRKGVSAQRTVRLRVAYAPRDLVISISRDNTPALEPQPQGNVPYLEAQKGQFLRLLCAADSQPPATLSWVLQNRVLSSSHPWGPRPLGLELPGVKAGDSGRYTCRAENRLGSQQRALDLSVQYPPENLRVMVSQANRTVLENLGNGTSLPVLEGQSLCLVCVTHSSPPARLSWTQRGQVLSPSQPSDPGVLELPRVQVEHEGEFTCHARHPLGSQHVSLSLSVHYSPKLLGPSCSWEAEGLHCSCSSQASPAPSLRWWLGEELLEGNSSQDSFEVTPSSAGPWANSSLSLHGGLSSGLRLRCEAWNVHGAQSGSILQLPDKKGLISTAFSNGAFLGIGITALLFLCLALIIMKILPKRRTQTETPRPRFSRHSTILDYINVVPTAGPLAQKRNQKATPNSPRTPLPPGAPSPESKKNQKKQYQLPSFPEPKSSTQAPESQESQEELHYATLNFPGVRPRPEARMPKGTQADYAEVKFQ

SEQ ID NO: 6819 - protein, 287 aa, Homo sapiens
MASHPQTRIQAYLEKNKIGPLFEELMTKLITETPDQPIPFLIDHLQSKQGNRGQLQRTLSGSAALWAESEKSESKGTRRDFRSYDKPWQLNAKKPKKSKSDLAVSNISPPSPDSKSLPRSVEHPKWNWRTKPQSRDFDELNHILQESKKLGKALENLSRSIAISDELDKETVTFNSSLLRPRVIGEWIGREENDADPLAAEMLQPPIPRSKNDQWESEDSGSSPAGSLKMEPKNKGLKQQQQQHKKLLAAMLSQDSFESIHSPTPSVTEEDIDNEDDAMELLGNFKN

SEQ ID NO: 6820 - protein, 864 aa, Homo sapiens
MTTEKSLVTEAENSQHQQKEEGEEAINSGQQEPQQEESCQTAAEGDNWCEQKLKASNGDTPTHEDLTKNKERTSESRGLSRLFSSFLKRPKSQVSEEEGKEVESDKEKGEGGQKEIEFGTSLDEEIILKAPIAAPEPELKTDPSLDLHSLSSAETQPAQEELREDPDFEIKEGEGLEECSKIEVKEESPQSKAETELKASQKPIRKHRNMHCKVSLLDDTVYECVVEKHAKGQDLLKRVCEHLNLLEEDYFGLAIWDNATSKTWLDSAKEIKKQVRGVPWNFTFNVKFYPPDPAQLTEDITRYYLCLQLRQDIVAGRLPCSFATLALLGSYTIQSELGDYDPELHGVDYVSDFKLAPNQTKELEEKVMELHKSYRSMTPAQADLEFLENAKKLSMYGVDLHKAKDLEGVDIILGVCSSGLLVYKDKLRINRFPWPKVLKISYKRSSFFIKIRPGEQEQYESTIGFKLPSYRAAKKLWKVCVEHHTFFRLTSTDTIPKSKFLALGSKFRYSGRTQAQTRQASALIDRPAPHFERTASKRASRSLDGAAAVDSADRSPRPTSAPAITQGQVAEGGVLDASAKKTVVPKAQKETVKAEVKKEDEPPEQAEPEPTEAWKVEKTHIEVTVPTSNGDQTQKLAEKTEDLIRMRKKKRERLDGENIYIRHSNLMLEDLDKSQEEIKKHHASISELKKNFMESVPEPRPSEWDKRLSTHSPFRTLNINGQIPTGEGPPLVKTQTVTISDNANAVKSEIPTKDVPIVHTETKTITYEAAQTDDNSGDLDPGVLLTAQTITSETPSSTTTTQITKTVKGGISETRIEKRIVITGDADIDHDQVLVQAIKEAKEQHPDMSVTKVVVHQETEIADE

SEQ ID NO: 6821 - protein, 533 aa, Homo sapiens
MKMRRYKLFLMFCMAGLCLISFLHFFKTLSYVTFPRELASLSPNLVSSFFWNNAPVTPQASPEPGGPDLLRTPLYSHSPLLQPLPPSKAAEELHRVDLVLPEDTTEYFVRTKAGGVCFKPGTKMLERPPPGRPEEKPEGANGSSARRPPRYLLSARERTGGRGARRKWVECVCLPGWHGPSCGVPTVVQYSNLPTKERLVPREVPRRVINAINVNHEFDLLDVRFHELGDVVDAFVVCESNFTAYGEPRPLKFREMLTNGTFEYIRHKVLYVFLDHFPPGGRQDGWIADDYLRTFLTQDGVSRLRNLRPDDVFIIDDADEIPARDGVLFLKLYDGWTEPFAFHMRKSLYGFFWKQPGTLEVVSGCTVDMLQAVYGLDGIRLRRRQYYTMPNFRQYENRTGHILVQWSLGSPLHFAGWHCSWCFTPEGIYFKLVSAQNGDFPRWGDYEDKRDLNYIRGLIRTGGWFDGTQQEYPPADPSEHMYAPKYLLKNYDRFHYLLDNPYQEPRSTAAGGWRHRGPEGRPPARGKLDEAEV

SEQ ID NO: 6822 - protein, 184 aa, Homo sapiens
MGNGMNKILPGLYIGNFKDARDAEQLSKNKVTHILSVHDSARPMLEGVKYLCIPAADSPSQNLTRHFKESIKFIHECRLRGESCLVHCLAGVSRSVTLVIAYIMTVTDFGWEDALHTVRAGRSCANPNVGFQRQLQEFEKHEVHQYRQWLKEEYGESPLQDAEEAKNILAAPGILKFWAFLRRL

SEQ ID NO: 6823 - protein, 449 aa, Homo sapiens
MAHVRHFRTLVSGFYFWEAALLLSLVATKETDSARSRSAPMSPSDFLDKLMGRTSGYDARIRPNFKGPPVNVTCNIFINSFGSIAETTMDYRVNIFLRQKWNDPRLAYSEYPDDSLDLDPSMLDSIWKPDLFFANEKGANFHEVTTDNKLLRIFKNGNVLYSIRLTLTLSCPMDLKNFPMDVQTCIMQLESFGYTMNDLIFEWQDEAPVQVAEGLTLPQFLLKEEKDLRYCTKHYNTGKFTCIEVRFHLERQMGYYLIQMYIPSLLIVILSWVSFWINMDAAPARVALGITTVLTMTTQSSGSRASLPKVSYVKAIDIWMAVCLLFVFSALLEYAAVNFVSRQHKELLRFRRKRKNKDDEVRESRFSFTAYGMGPCLQAKDGMTPKGPNHPVQVMPKSPDEMRKVFIDRAKKIDTISRACFPLAFLIFNIFYWVIYKILRHEDIHQQQD

SEQ ID NO: 6824 - protein, 352 aa, Homo sapiens
MARMGLAGAAGRWWGLALGLTAFFLPGVHSQVVQVNDSMYGFIGTDVVLHCSFANPLPSVKITQVTWQKSTNGSKQNVAIYNPSMGVSVLAPYRERVEFLRPSFTDGTIRLSRLELEDEGVYICEFATFPTGNRESQLNLTVMAKPTNWIEGTQAVLRAKKGQDDKVLVATCTSANGKPPSVVSWETRLKGEAEYQEIRNPNGTVTVISRYRLVPSREAHQQSLACIVNYHMDRFKESLTLNVQYEPEVTIEGFDGNWYLQRMDVKLTCKADANPPATEYHWTTLNGSLPKGVEAQNRTLFFKGPINYSLAGTYICEATNPIGTRSGQVEVNITAFCQLIYPGKGRTRARMF

SEQ ID NO: 6825 - protein, 727 aa, Homo sapiens
MNGEADCPTDLEMAAPKGQDRWSQEDMLTLLECMKNNLPSNDSSKFKTTESHMDWEKVAFKDFSGDMCKLKWVEISNEVRKFRTLTELILDAQEHVKNPYKGKKLKKHPDFPKKPLTPYFRFFMEKRAKYAKLHPEMSNLDLTKILSKKYKELPEKKKMKYIQDFQREKQEFERNLARFREDHPDLIQNAKKSDIPEKPKTPQQLWYTHEKKVYLKVRPDEIMRDYIQKHPELNISEEGITKSTLTKAERQLKDKFDGRPTKPPPNSYSLYCAELMANMKDVPSTERMVLCSQQWKLLSQKEKDAYHKKCDQKKKDYEVELLRFLESLPEEEQQRVLGEEKMLNINKKQATSPASKKPAQEGGKGGSEKPKRPVSAMFIFSEEKRRQLQEERPELSESELTRLLARMWNDLSEKKKAKYKAREAALKAQSERKPGGEREERGKLPESPKRAEEIWQQSVIGDYLARFKNDRVKALKAMEMTWNNMEKKEKLMWIKKAAEDQKRYERELSEMRAPPAATNSSKKMKFQGEPKKPPMNGYQKFSQELLSNGELNHLPLKERMVEIGSRWQRISQSQKEHYKKLAEEQQKQYKVHLDLWVKSLSPQDRAAYKEYISNKRKSMTKLRGPNPKSSRTTLQSKSESEEDDEEDEDDEDEDEEEEDDENGDSSEDGGDSSESSSEDESEDGDENEEDDEDEDDDEDDDEDEDNESEGSSSSSSSSGDSSDSDSN

SEQ ID NO: 6826 - protein, 775 aa, Homo sapiens
MLPPLIDPWDPGLTARDLLFRGGCRYRKRPRVVLDVTEQISRFLLDHGDVAFAPLGKLMLENFKLEGAGSRTKKKTVVSVKKLLQDLGGHQPWGCPWAYLSNRQRRFSILGGPILGTSVASHLAELLHEELVLRWEQLLLDEACTGGALAWVPGRTPQFGQLVYPAGGAQDRLHFQEVVLTPGDNPQFLGKPGRIQLQGPVRQVVTCTVQGETLLAVRSDYHCAVWKFGKQWQPTLLQAMQVEKGATGISLSPHLPGELAICSRSGAVCLWSPEDGLRQIYRDPETLVFRDSSSWRWADFTAHPRVLTVGDRTGVKMLDTQGPPGCGLLLFRLGAEASCQKGERVLLTQYLGHSSPKCLPPTLHLVCTQFSLYLVDERLPLVPMLKWNHGLPSPLLLARLLPPPRPSCVQPLLLGGQGGQLQLLHLAEGASVPRLAGPPQSLPSRIDSLPAFPLLEPKIQWRLQERLKAPTIGLAAVVPPLPSAPTPGLVLFQLSAAGDVFYQQLRPQVDSSLRRDAGPPGDTQPDCHAPTASWTSQDTAGCSQWLKALLKVPLAPPVWTAPTFTHRQMLGSTELRREEEEGQRLGVLRKAMARGQLLLQRDLGSLPAAEPPPAPESGLEDKLSERLGEAWAGRGAAWWERQQGRTSEPGRQTRRPKRRTQLSSSFSLSGHVDPSEDTSSPHSPEWPPADALPLPPTTPPSQELTPDACAQGVPSEQRQMLRDYMAKLPPQRDTPGCATTPPHSQASSVRATRSQQHTPVLSSSQPLRKKPRMGF

SEQ ID NO: 6827 - protein, 983 aa, Homo sapiens
MMTSVGTNRARGNWEQPQNQNQTQHKQRPQATAEQIRLAQMISDHNDADFEEKVKQLIDITGKNQDECVIALHDCNGDVNRAINVLLEGNPDTHSWEMVGKKKGVSGQKDGGQTESNEEGKENRDRDRDYSRRRGGPPRRGRGASRGREFRGQENGLDGTKSGGPSGRGTERGRRGRGRGRGGSGRRGGRFSAQGMGTFNPADYAEPANTDDNYGNSSGNTWNNTGHFEPDDGTSAWRTATEEWGTEDWNEDLSETKIFTASNVSSVPLPAENVTITAGQRIDLAVLLGKTPSTMENDSSNLDPSQAPSLAQPLVFSNSKQTAISQPASGNTFSHHSMVSMLGKGFGDVGEAKGGSTTGSQFLEQFKTAQALAQLAAQHSQSGSTTTSSWDMGSTTQSPSLVQYDLKNPSDSAVHSPFTKRQAFTPSSTMMEVFLQEKSPAVATSTAAPPPPSSPLPSKSTSAPQMSPGSSDNQSSSPQPAQQKLKQQKKKASLTSKIPALAVEMPGSADISGLNLQFGALQFGSEPVLSDYESTPTTSASSSQAPSSLYTSTASESSSTISSNQSQESGYQSGPIQSTTYTSQNNAQGPLYEQRSTQTRRYPSSISSSPQKDLTQAKNGFSSVQATQLQTTQSVEGATGSAVKSDSPSTSSIPPLNETVSAASLLTTTNQHSSSLGGLSHSEEIPNTTTTQHSSTLSTQQNTLSSSTSSGRTSTSTLLHTSVESEANLHSSSSTFSTTSSTVSAPPPVVSVSSSLNSGSSLGLSLGSNSTVTASTRSSVATTSGKAPPNLPPGVPPLLPNPYIMAPGLLHAYPPQVYGYDDLQMLQTRFPLDYYSIPFPTPTTPLTGRDGSLASNPYSGDLTKFGRGDASSPAPATTLAQPQQNQTQTHHTTQQTFLNPALPPGYSYTSLPYYTGVPGLPSTFQYGPAVFPVAPTSSKQHGVNVSVNASATPFQQPSGYGSHGYNTGRKYPPPYKHFWTAES

SEQ ID NO: 6828 - protein, 555 aa, Homo sapiens
MADRGGVGEAAAVGASPASVPGLNPTLGWRERLRAGLAGTGASLWFVAGLGLLYALRIPLRLCENLAAVTVFLNSLTPKFYVALTGTSSLISGLIFIFEWWYFHKHGTSFIEQVSVSHLQPLMGGTESSISEPGSPSRNRENETSRQNLSECKVWRNPLNLFRGAEYRRYTWVTGKEPLTYYDMNLSAQDHQTFFTCDTDFLRPSDTVMQKAWRERNPPARIKAAYQALELNNDCATAYVLLAEEEATTIVDAERLFKQALKAGETIYRQSQQCQHQSPQHEAQLRRDTNVLVYIKRRLAMCARKLGRIREAVKIMRDLMKEFPPLTMLNIHENLLESLLELQAYPDVQAVLAKYDDISLPKSAAICYTAALLKTRTVSEKFSPETASRRGLSTAEINAVEAIHRAVEFNPHVPKYLLEMKSLILPPEHILKRGDSEAIAYAFFHLQHWKRIEGALNLLQCTWEGTFRMIPYPLEKGHLFYPYPSCTETADRELLPTFHHVSVYPKKELPLFIHFTAGFCSSTAMIAILTHQFPEIMGIFAKAVSMISRTCVDYL

SEQ ID NO: 6829 - protein, 406 aa, Homo sapiens
MASTEEQYDLKIVKVEEDPIWDQETHLRGNNFSGQEASRQLFRQFCYQETPGPREALSRLRELCHQWLRPEIHTKEQILELLVLEQFLTILPEELQAWVREHHPESGEEAVAVVEDLEQELSEPGNQAPDHEHGHSEVLLEDVEHLKVKQEPTDIQLQPMVTQLRYESFCLHQFQEQDGESIPENQELASKQEILKEMEHLGDSKLQRDVSLDSKYRETCKRDSKAEKQQAHSTGERRHRCNECGKSFTKSSVLIEHQRIHTGEKPYECEECGKAFSRRSSLNEHRRSHTGEKPYQCKECGKAFSASNGLTRHRRIHTGEKPYECKVCGKAFLLSSCLVQHQRIHTGEKRYQCRECGKAFIQNAGLFQHLRVHTGEKPYQCSQCSKLFSKRTLLKKHQKIHTGERP

SEQ ID NO: 6830 - protein, 810 aa, Homo sapiens
MKLLKPTWVNHNGKPIFSVDIHPDGTKFATGGQGQDSGKVVIWNMSPVLQEDDEKDENIPKMLCQMDNHLACVNCVRWSNSGMYLASGGDDKLIMVWKRATYIGPSTVFGSSGKLANVEQWRCVSILRNHSGDVMDVAWSPHDAWLASCSVDNTVVIWNAVKFPEILATLRGHSGLVKGLTWDPVGKYIASQADDRSLKVWRTLDWQLETSITKPFDECGGTTHVLRLSWSPDGHYLVSAHAMNNSGPTAQIIEREGWKTNMDFVGHRKAVTVVKFNPKIFKKKQKNGSSAKPSCPYCCCAVGSKDRSLSVWLTCLKRPLVVIHELFDKSIMDISWTLNGLGILVCSMDGSVAFLDFSQDELGDPLSEEEKSRIHQSTYGKSLAIMTEAQLSTAVIENPEMLKYQRRQQQQQLDQKSAATREMGSATSVAGVVNGESLEDIRKNLLKKQVETRTADGRRRITPLCIAQLDTGDFSTAFFNSIPLSGSLAGTMLSSHSSPQLLPLDSSTPNSFGASKPCTEPVVAASARPAGDSVNKDSMNATSTPAALSPSVLTTPSKIEPMKAFDSRFTERSKATPGAPALTSMTPTAVERDVHRQVVVVKEESLHSILAGSDMTVSQILLTQHGIPVMNLSDGKAYCFNPSLSTWNLVSDKQDSLAQCADFRSSLPSQDAMLCSGPLAIIQGRTSNSGRQAARLFSVPHVVQQETTLAYLENQVAAALTLQSSHEYRHWLLVYARYLVNEGFEYRLREICKDLLGPVHYSTGSQWESTVVGLRKRELLKELLPVIGQNLRFQRLFTECQEQLDILRDK

SEQ ID NO: 6831 - protein, 1276 aa, Homo sapiens
MASDSPARSLDEIDLSALRDPAGIFELVELVGNGTYGQVYKGRHVKTGQLAAIKVMDVTGDEEEEIKQEINMLKKYSHHRNIATYYGAFIKKNPPGMDDQLWLVMEFCGAGSVTDLIKNTKGNTLKEEWIAYICREILRGLSHLHQHKVIHRDIKGQNVLLTENAEVKLVDFGVSAQLDRTVGRRNTFIGTPYWMAPEVIACDENPDATYDFKSDLWSLGITAIEMAEGAPPLCDMHPMRALFLIPRNPAPRLKSKKWSKKFQSFIESCLVKNHSQRPATEQLMKHPFIRDQPNERQVRIQLKDHIDRTKKKRGEKDETEYEYSGSEEEEEENDSGEPSSILNLPGESTLRRDFLRLQLANKERSEALRRQQLEQQQRENEEHKRQLLAERQKRIEEQKEQRRRLEEQQRREKELRKQQEREQRRHYEEQMRREEERRRAEHEQEYKRKQLEEQRQAERLQRQLKQERDYLVSLQHQRQEQRPVEKKPLYHYKEGMSPSEKPAWAKEIPHLVAVKSQGPALTASQSVHEQPTKGLSGFQEALNVTSHRVEMPRQNSDPTSENPPLPTRIEKFDRSSWLRQEEDIPPKVPQRTTSISPALARKNSPGNGSALGPRLGSQPIRASNPDLRRTEPILESPLQRTSSGSSSSSSTPSSQPSSQGGSQPGSQAGSSERTRVRANSKSEGSPVLPHEPAKVKPEESRDITRPSRPASYKKAIDEDLTALAKELRELRIEETNRPMKKVTDYSSSSEESESSEEEEEDGESETHDGTVAVSDIPRLIPTGAPGSNEQYNVGMVGTHGLETSHADSFSGSISREGTLMIRETSGEKKRSGHSDSNGFAGHINLPDLVQQSHSPAGTPTEGLGRVSTHSQEMDSGTEYGMGSSTKASFTPFVDPRVYQTSPTDEDEEDEESSAAALFTSELLRQEQAKLNEARKISVVNVNPTNIRPHSDTPEIRKYKKRFNSEILCAALWGVNLLVGTENGLMLLDRSGQGKVYNLINRRRFQQMDVLEGLNVLVTISGKKNKLRVYYLSWLRNRILHNDPEVEKKQGWITVGDLEGCIHYKVVKYERIKFLVIALKNAVEIYAWAPKPYHKFMAFKSFADLQHKPLLVDLTVEEGQRLKVIFGSHTGFHVIDVDSGNSYDIYIPSHIQGNITPHAIVILPKTDGMEMLVCYEDEGVYVNTYGRITKDVVLQWGEMPTSVAYIHSNQIMGWGEKAIEIRSVETGHLDGVFMHKRAQRLKFLCERNDKVFFASVRSGGSSQVFFMTLNRNSMMNW

SEQ ID NO: 6832 - protein, 572 aa, Homo sapiens
MDRAGADMWASTFTLAMAERKPQDVWVLLPEHSLVPGCLDGGGVQYLLVGLSRLQCGHCPGTWDSAHVHVLFHLWWDRASHRGLVKMRIWGQRCRLCPAPGDCQVRPPGEQPFLSRLVLHILQDCYGDGPGPARHPREAYEGCCEACELGVCFLQKAPDPAWSANATKGNFPATAWGGTGTVSRGKPLSTPGDDLGKGGVVIAIPFSLVGTSNDQVPIAEGPAPPAGASLPVTGSCEALVIGQGSIFLSGDSVAMPGGKGFPVAIGDPLFHGPGLLGSSIQTFELKGFLFKGRGSLCSPVGVAQGWGPISLNNGLVPVGKHTPTVFYCVGLSASGEGSLTFPSSLTSIFTNTLSEPTDGPVATKEASITFPFIFTDVKDAVAEVAEGNGKEGGGQGLVPVGHDALPETNAGGLPSQVKGSLALPFPADVQGKDAFTDITEGKEKEGGLVTAGHDAPLEANAEGPITVSEGCITIPFAVFDVIKRKGGGHVAYGPQGNGCFSQGYYQKRQLRSRFHKARCGCRREEDERPGRACRRPHAEPYEDFWIWVSMTVCVFWLMCMCRLNPGIYPQQV

SEQ ID NO: 6833 - protein, 1251 aa, Homo sapiens
MRLLLLVPLLLAPAPGSSAPKVRRQSDTWGPWSQWSPCSRTCGGGVSFRERPCYSQRRDGGSSCVGPARSHRSCRTESCPDGARDFRAEQCAEFDGAEFQGRRYRWLPYYSAPNKCELNCIPKGENFYYKHREAVVDGTPCEPGKRDVCVDGSCRVVGCDHELDSSKQEDKCLRCGGDGTTCYPVAGTFDANDLSRAVKNVRGEYYLNGHWTIEAARALPAASTILHYERGAEGDLAPERLHARGPTSEPLVIELISQEPNPGVHYEYHLPLRRPSPGFSWSHGSWSDCSAECGGGHQSRLVFCTIDHEAYPDHMCQRQPRPADRRSCNLHPCPETKRWKAGPWAPCSASCGGGSQSRSVYCISSDGAGIQEAVEEAECAGLPGKPPAIQACNLQRCAAWSPEPWGECSVSCGVGVRKRSVTCRGERGSLLHTAACSLEDRPPLTEPCVHEDCPLLSDQAWHVGTWGLCSKSCSSGTRRRQVICAIGPPSHCGSLQHSKPVDVEPCNTQPCHLPQEVPSMQDVHTPASNPWMPLGPQESPASDSRGQWWAAQEHPSARGDHRGERGDPRGDQGTHLSALGPAPSLQQPPYQQPLRSGSGPHDCRHSPHGCCPDGHTASLGPQWQGCPGAPCQQSRYGCCPDRVSVAEGPHHAGCTKSYGGDSTGGMPRSRAVASTVHNTHQPQAQQNEPSECRGSQFGCCYDNVATAAGPLGEGCVGQPSHAYPVRCLLPSAHGSCADWAARWYFVASVGQCNRFWYGGCHGNANNFASEQECMSSCQGSLHGPRRPQPGASGRSTHTDGGGSSPAGEQEPSQHRTGAAVQRKPWPSGGLWRQDQQPGPGEAPHTQAFGEWPWGQELGSRAPGLGGDAGSPAPPFHSSSYRISLAGVEPSLVQAALGQLVRLSCSDDTAPESQAAWQKDGQPISSDRHRLQFDGSLIIHPLQAEDAGTYSCGSTRPGRDSQKIQLRIIGGDMAVLSEAELSRFPQPRDPAQDFGQAGAAGPLGAIPSSHPQPANRLRLDQNQPRVVDASPGQRIRMTCRAEGFPPPAIEWQRDGQPVSSPRHQLQPDGSLVISRVAVEDGGFYTCVAFNGQDRDQRWVQLRVLGELTISGLPPTVTVPEGDTARLLCVVAGESVNIRWSRNGLPVQADGHRVHQSPDGTLLIYNLRARDEGSYTCSAYQGSQAVSRSTEVKVVSPAPTAQPRDPGRDCVDQPELANCDLILQAQLCGNEYYSSFCCASCSRFQPHAQPIWQ

SEQ ID NO: 6834 - protein, 1091 aa, Homo sapiens
MSAKAISEQTGKELLYKFICTTSAIQNRFKYARVTPDTDWARLLQDHPWLLSQNLVVKPDQLIKRRGKLGLVGVNLTLDGVKSWLKPRLGQEATVGKATGFLKNFLIEPFVPHSQAEEFYVCIYATREGDYVLFHHEGGVDVGDVDAKAQKLLVGVDEKLNPEDIKKHLLVHAPEDKKEILASFISGLFNFYEDLYFTYLEINPLVVTKDGVYVLDLAAKVDATADYICKVKWGDIEFPPPFGREAYPEEAYIADLDAKSGASLKLTLLNPKGRIWTMVAGGGASVVYSDTICDLGGVNELANYGEYSGAPSEQQTYDYAKTILSLMTREKHPDGKILIIGGSIANFTNVAATFKGIVRAIRDYQGPLKEHEVTIFVRRGGPNYQEGLRVMGEVGKTTGIPIHVFGTETHMTAIVGMALGHRPIPNQPPTAAHTANFLLNASGSTSTPAPSRTASFSESRADEVAPAKKAKPAMPQGKSTTLFSRHTKAIVWGMQTRAVQGMLDFDYVCSRDEPSVAAMVYPFTGDHKQKFYWGHKEILIPVFKNMADAMRKHPEVDVLINFASLRSAYDSTMETMNYAQIRTIAIIAEGIPEALTRKLIKKADQKGVTIIGPATVGGIKPGCFKIGNTGGMLDNILASKLYRPGSVAYVSRSGGMSNELNNIISRTTDGVYEGVAIGGDRYPGSTFMDHVLRYQDTPGVKMIVVLGEIGGTEEYKICRGIKEGRLTKPIVCWCIGTCATMFSSEVQFGHAGACANQASETAVAKNQALKEAGVFVPRSFDELGEIIQSVYEDLVANGVIVPAQEVPPPTVPMDYSWARELGLIRKPASFMTSICDERGQELIYAGMPITEVFKEEMGIGGVLGLLWFQKRLPKYSCQFIEMCLMVTADHGPAVSGAHNTIICARAGKDLVSSLTSGLLTIGDRFGGALDAAAKMFSKAFDSGIIPMEFVNKMKKEGKLIMGIGHRVKSINNPDMRVQILKDYVRQHFPATPLLDYALEVEKITTSKKPNLILNVDGLIGVAFVDMLRNCGSFTREEADEYIDIGALNGIFVLGRSMGFIGHYLDQKRLKQGLYRHPWDDISYVLPEHMSM

SEQ ID NO: 6835 - protein, 276 aa, Homo sapiens
MTTAGRGNLGLIPRSTAFQKQEGRLTVKQEPANQTWGQGSSLQKNYPPVCEIFRLHFRQLCYHEMSGPQEALSRLRELCRWWLMPEVHTKEQILELLVLEQFLSILPGELRTWVQLHHPESGEEAVAVVEDFQRHLSGSEEVSAPAQKQEMHFEETTALGTTKESPPTSPLSGGSAPGAHLEPPYDPGTHHLPSGDFAQCTSPVPTLPQVGNSGDQAGATVLRMVRPQDTVAYEDLSVDYTQKKWKSLTLSQRALQWNMMPENHHSMASLGWSTMA

SEQ ID NO: 6836 - protein, 173 aa, Homo sapiens
MMETRKPAERLALPYSLRTAPLGVPGTLPGLPRRDPLRVALRLDAACWEWARSGCARGWQYLPVPLDSAFEPAFLRKRNERERQRVRCVNEGYARLRDHLPRELADKRLSKVETLRAAIDYIKHLQELLERQAWGLEGAAGAVPQRRAECNSDGESKASSAPSPSSEPEEGGS

SEQ ID NO: 6837 - protein, 873 aa, Homo sapiens
MNPGFDLSRRNPQEDFELIQRIGSGTYGDVYKARNVNTGELAAIKVIKLEPGEDFAVVQQEIIMMKDCKHPNIVAYFGSYLRRDKLWICMEFCGGGSLQDIYHVTGPLSELQIAYVSRETLQGLYYLHSKGKMHRDIKGANILLTDNGHVKLADFGVSAQITATIAKRKSFIGTPYWMAPEVAAVERKGGYNQLCDLWAVGITAIELAELQPPMFDLHPMRALFLMTKSNFQPPKLKDKMKWSNSFHHFVKMALTKNPKKRPTAEKLLQHPFVTQHLTRSLAIELLDKVNNPDHSTYHDFDDDDPEPLVAVPHRIHSTSRNVREEKTRSEITFGQVKFDPPLRKETEPHHELDLQLEYGQGHQGGYFLGANKSLLKSVEEELHQRGHVAHLEDDEGDDDESKHSTLKAKIPPPLPPKPKSIFIPQEMHSTEDENQGTIKRCPMSGSPAKPSQVPPRPPPPRLPPHKPVALGNGMSSFQLNGERDGSLCQQQNEHRGTNLSRKEKKDVPKPISNGLPPTPKVHMGACFSKVFNGCPLKIHCASSWINPDTRDQYLIFGAEEGIYTLNLNELHETSMEQLFPRRCTWLYVMNNCLLSISGKASQLYSHNLPGLFDYARQMQKLPVAIPAHKLPDRILPRKFSVSAKIPETKWCQKCCVVRNPYTGHKYLCGALQTSIVLLEWVEPMQKFMLIKHIDFPIPCPLRMFEMLVVPEQEYPLVCVGVSRGRDFNQVVRFETVNPNSTSSWFTESDTPQTNVTHVTQLERDTILVCLDCCIKIVNLQGRLKSSRKLSSELTFDFQIESIVCLQDSVLAFWKHGMQGRSFRSNEVTQEISDSTRIFRLLGSDRVVVLESRPTDNPTANSNLYILAGHENSY

SEQ ID NO: 6838 - protein, 1431 aa, Homo sapiens
MGKEQELVQAVKAEDVGTAQRLLQRPRPGKAKLLGSTKKINVNFQDPDGFSALHHAALNGNTELISLLLEAQAAVDIKDNKGMRPLHYAAWQGRKEPMKLVLKAGSAVNIPSDEGHIPLHLAAQHGHYDVSEMLLQHQSNPCMVDNSGKTPLDLACEFGRVGVVQLLLSSNMCAALLEPRPGDATDPNGTSPLHLAAKNGHIDIIRLLLQAGIDINRQTKSGTALHEAALCGKTEVVRLLLDSGINAHVRNTYSQTALDIVHQFTTSQASREIKQLLREASAALQVRATKDYCNNYDLTSLNVKAGDIITVLEQHPDGRWKGCIHDNRTGNDRVGYFPSSLGEAIVKRAGSRAGTEPSLPQGSSSSGPSAPPEEIWVLRKPFAGGDRSGSISGMAGGRGSGGHALHAGSEGVKLLATVLSQKSVSESGPGDSPAKPPEGSAGVARSQPPVAHAGQVYGEQPPKKLEPASEGKSSEAVSQWLTAFQLQLYAPNFISAGYDLPTISRMTPEDLTAIGVTKPGHRKKIAAEISGLSIPDWLPEHKPANLAVWLSMIGLAQYYKVLVDNGYENIDFITDITWEDLQEIGITKLGHQKKLMLAVRKLAELQKAEYAKYEGGPLRRKAPQSLEVMAIESPPPPEPTPADCQSPKMTTFQDSELSDELQAAMTGPAEVGPTTEKPSSHLPPTPRATTRQDSSLGGRARHMSSSQELLGDGPPGPSSPMSRSQEYLLDEGPAPGTPPREARPGRHGHSIKRASVPPVPGKPRQVLPPGTSHFTPPQTPTKTRPGSPQALGGPHGPAPATAKVKPTPQLLPPTERPMSPRSLPQSPTHRGFAYVLPQPVEGEVGPAAPGPAPPPVPTAVPTLCLPPEADAEPGRPKKRAHSLNRYAASDSEPERDELLVPAAAGPYATVQRRVGRSHSVRAPAGADKNVNRSQSFAVRPRKKGPPPPPPKRSSSALASANLADEPVPDAEPEDGLLGVRAQCRRASDLAGSVDTGSAGSVKSIAAMLELSSIGGGGRAARRPPEGHPTPRPASPEPGRVATVLASVKHKEAIGPGGEVVNRRRTLSGPVTGLLATARRGPGESADPGPFVEDGTGRQRPRGPSKGEAGVEGPPLAKVEASATLKRRIRAKQNQQENVKFILTESDTVKRRPKAKEREAGPEPPPPLSVYHNGTGTVRRRPASEQAGPPELPPPPPPAEPPPTDLAHLPPLPPPEGEARKPAKPPVSPKPVLTQPVPKLQGSPTPTSKKVPLPGPGSPEVKRAHGTPPPVSPKPPPPPTAPKPVKAVAGLPSGSAGPSPAPSPARQPPAALAKPPGTPPSLGASPAKPPSPGAPALHVPAKPPRAAAAAAAAAAAPPAPPEGASPGDSARQKLEETSACLAAALQAVEEKIRQEDAQGPRDSAAEKSTGSILDDIGSMFDDLADQLDAMLE

SEQ ID NO: 6839 - protein, 838 aa, Homo sapiens
MGCAPSIHVSQSGVIYCRDSDESSSPRQTTSVSQGPAAPLPGLFVQTDAADAIPPSRASGPPSVARVRRARTELGSGSSAGSAAPAATTSRGRRRHCCSSAEAETQTCYTSVKQVSSAEVRIGPMRLTQDPIQVLLIFAKEDSQSDGFWWACDRAGYRCNIARTPESALECFLDKHHEIIVIDHRQTQNFDAEAVCRSIRATNPSEHTVILAVVSRVSDDHEEASVLPLLHAGFNRRFMENSSIIACYNELIQIEHGEVRSQFKLRACNSVFTALDHCHEAIEITSDDHVIQEWQGVYYARRKSGDSIQQHVKITPVIGQGGKIRHFVSLKKLCCTTDNNKQIHKIHRDSGDNSQTEPHSFRYKNRRKESIDVKSISSRGSDAPSLQNRRYPSMARIHSMTIEAPITKVINIINAAQENSPVTVAEALDRVLEILRTTELYSPQLGTKDEDPHTSDLVGGLMTDGLRRLSGNEYVFTKNVHQSHSHLAMPITINDVPPCISQLLDNEESWDFNIFELEAITHKRPLVYLGLKVFSRFGVCEFLNCSETTLRAWFQVIEANYHSSNAYHNSTHAADVLHATAFFLGKERVKGSLDQLDEVAALIAATVHDVDHPGRTNSFLCNAGSELAVLYNDTAVLESHHTALAFQLTVKDTKCNIFKNIDRNHYRTLRQAIIDMVLATEMTKHFEHVNKFVNSINKPMAAEIEGSDCECNPAGKNFPENQILIKRMMIKCADVANPCRPLDLCIEWAGRISEEYFAQTDEEKRQGLPVVMPVFDRNTCSIPKSQISFIDYFITDMFDAWDAFAHLPALMQHLADNYKHWKTLDDLKCKSLRLPSDS

SEQ ID NO: 6840 - protein, 1276 aa, Homo sapiens
MDLFDFFRDWDLEQQCHYEQDRSALKKREWERRNQEVQQEDDLFSSGFDLFGEPYKTNKGDALANRVQNTLGNYDEMKNLLTNHSNQNHLVGIPKNSVPQNPNNKNEPSFFPEQKNRIIPPHQDNTHPSAPMPPPSVVILNSTLIHSNRKSKPEWSRDSHNPSTVLASQASGQPNKMQTLTQDQSQAKLEDFFVYPAEQPQIGEVEESNPSAKEDSNPNSSGEDAFKEIFQSNSPEESEFAVQAPGSPLVASSLLAPSSGLSVQNFPPGLYCKTSMGQQKPTAYVRPMDGQDQAPDISPTLKPSIEFENSFGNLSFGTLLDGKPSAASSKTKLPKFTILQTSEVSLPSDPSCVEEILRESQHLTPGFTLQKWNDPTTRASTKSVSFKSMLEDDLKLSSDEDDLEPVKTLTTQCTATELYQAVEKAKPRNNPVNPPLATPQPPPAVQASGGSGSSSESESSSESDSDTESSTTDSESNEAPRVATPEPEPPSTNKWQLDKWLNKVTSQNKSFICGQNETPMETISLPPPIIQPMEVQMKVKTNASQVPAEPKERPLLSLIREKARPRPTQKIPETKALKHKLSTTSETVSQRTIGKKQPKKVEKNTSTDEFTWPKPNITSSTPKEKESVELHDPPRGRNKATAHKPAPRKEPRPNIPLAPEKKKYRGPGKIVPKSREFIETDSSTSDSNTDQEETLQIKVLPPCIISGGNTAKSKEICGASLTLSTLMSSSGSNNNLSISNEEPTFSPIPVMQTEILSPLRDHENLKNLWVKIDLDLLSRVPGHSSLHAAPAKPDHKETATKPKRQTAVTAVEKPAPKGKRKHKPIEVAEKIPEKKQRLEEATTICLLPPCISPAPPHKPPNTRENNSSRRANRRKEEKLFPPPLSPLPEDPPRRRNVSGNNGPFGQDKNIAMTGQITSTKPKRTEGKFCATFKGISEGDTPKKASSATITVTNTAIATATVTATAIVTTTVTATATATATTTTTTTTISTITSTITTGLMDSSHLEMTSWAALPLLSSSSTNVRRPKLTFDDSVHNADYYMQEAKKLKHKADALFEKFGKAVNYADAALSFTECGNAMERDPLEAKSPYTMYSETVELLRYAMRLKNFASPLASDGDKKLAVLCYRCLSLLYLRMFKLKKDHAMKYSRSLMEYFKQNASKVAQIPSPWVSNGKNTPSPVSLNNVSPINAMGNCNNGPVTIPQRIHHMAASHVNITSNVLRGYEHWDMADKLTRENKEFFGDLDTLMGPLTQHSSMTNLVRYVRQGLCWLRIDAHLL

SEQ ID NO: 6841 - protein, 695 aa, Homo sapiens
MLPGLALLLLAAWTARALEVPTDGNAGLLAEPQIAMFCGRLNMHMNVQNGKWDSDPSGTKTCIDTKEGILQYCQEVYPELQITNVVEANQPVTIQNWCKRGRKQCKTHPHFVIPYRCLVGEFVSDALLVPDKCKFLHQERMDVCETHLHWHTVAKETCSEKSTNLHDYGMLLPCGIDKFRGVEFVCCPLAEESDNVDSADAEEDDSDVWWGGADTDYADGSEDKVVEVAEEEEVAEVEEEEADDDEDDEDGDEVEEEAEEPYEEATERTTSIATTTTTTTESVEEVVRVPTTAASTPDAVDKYLETPGDENEHAHFQKAKERLEAKHRERMSQVMREWEEAERQAKNLPKADKKAVIQHFQEKVESLEQEAANERQQLVETHMARVEAMLNDRRRLALENYITALQAVPPRPRHVFNMLKKYVRAEQKDRQHTLKHFEHVRMVDPKKAAQIRSQVMTHLRVIYERMNQSLSLLYNVPAVAEEIQDEVDELLQKEQNYSDDVLANMISEPRISYGNDALMPSLTETKTTVELLPVNGEFSLDDLQPWHSFGADSVPANTENEVEPVDARPAADRGLTTRPGSGLTNIKTEEISEVKMDAEFRHDSGYEVHHQKLVFFAEDVGSNKGAIIGLMVGGVVIATVIVITLVMLKKKQYTSIHHGVVEVDAAVTPEERHLSKMQQNGYENPTYKFFEQMQN

SEQ ID NO: 6842 - protein, 395 aa, Homo sapiens
MAAEASESGPALHELMREAEISLLECKVCFEKFGHRQQRRPRNLSCGHVVCLACVAALAHPRTLALECPFCRRACRGCDTSDCLPVLHLIELLGSALRQSPAAHRAAPSAPGALTCHHTFGGWGTLVNPTGLALCPKTGRVVVVHDGRRRVKIFDSGGGCAHQFGEKGDAAQDIRYPVDVTITNDCHVVVTDAGDRSIKVFDFFGQIKLVIGGQFSLPWGVETTPQNGIVVTDAEAGSLHLLDVDFAEGVLRRTERLQAHLCNPRGVAVSWLTGAIAVLEHPLALGTGVCSTRVKVFSSSMQLVGQVDTFGLSLYFPSKITASAVTFDHQGNVIVADTSGPAILCLGKPEEFPVPKPMVTHGLSHPVALTFTKENSLLVLDTASHSIKVYKVDWG

SEQ ID NO: 6843 - protein, 563 aa, Homo sapiens
MSSNLLPTLNSGGKVKDGSTKEDRPYKIFFRDLFLVKENEMAAKETEKFMNRNMKVYQKTTFSSRMKSHSYLSQLAFYPKRSGRSFEKFGPGPAPIPRLIEGSDTKRTVHEFINDQRDRFLLEYALSTKRNTIKKFEKDIAMRERQLKKAEKKLQDDALAFEEFLRENDQRSVDALKMAAQETINKLQMTAELKKASMEVQAVKSEIAKTEFLLREYMKYGFFLLQMSPKHWQIQQALKRAQASKSKANIILPKILAKLSLHSSNKEGILEESGRTAVLSEDASQGRDSQGKPSRSLTRTPEKKKSNLAESFGSEDSLEFLLDDEMDVDLEPALYFKEPEELLQVLRELEEQNLTLFQYSQDVDENLEEVNKREKVIQDKTNSNIEFLLEQEKMLKANCVREEEKAAELQLKSKLFSFGEFNSDAQEILIDSLSKKITQVYKVCIGDAEDDGLNPIQKLVKVESRLVELCDLIESIPKENVEAIERMKQKEWRQKFRDEKMKEKQRHQQERLKAALEKAVAQPKKKLGRRLVFHSKPPSGNKQQLPLVNETKTKSQEEEYFFT

SEQ ID NO: 6844 - protein, 798 aa, Homo sapiens
MEASGKLICRQRQVLFSFLLLGLSLAGAAEPRSYSVVEETEGSSFVTNLAKDLGLEQREFSRRGVRVVSRGNKLHLQLNQETADLLLNEKLDREDLCGHTEPCVLRFQVLLESPFEFFQAELQVIDINDHSPVFLDKQMLVKVSESSPPGTTFPLKNAEDLDVGQNNIENYIISPNSYFRVLTRKRSDGRKYPELVLDKALDREEEAELRLTLTALDGGSPPRSGTAQVYIEVLDVNDNAPEFEQPFYRVQISEDSPVGFLVVKVSATDVDTGVNGEISYSLFQASEEIGKTFKINPLTGEIELKKQLDFEKLQSYEVNIEARDAGTFSGKCTVLIQVIDVNDHAPEVTMSAFTSPIPENAPETVVALFSVSDLDSGENGKISCSIQEDLPFLLKSAENFYTLLTERPLDRESRAEYNITITVTDLGTPMLITQLNMTVLIADVNDNAPAFTQTSYTLFVRENNSPALHIRSVSATDRDSGTNAQVTYSLLPPQDPHLPLTSLVSINADNGHLFALRSLDYEALQGFQFRVGASDHGSPALSSEALVRVVVLDANDNSPFVLYPLQNGSAPCTELVPRAAEPGYLVTKVVAVDGDSGQNAWLSYQLLKATELGLFGVWAHNGEVRTARLLSERDAAKHRLVVLVKDNGEPPRSATATLHVLLVDGFSQPYLPLPEAAPTQAQADLLTVYLVVALASVSSLFLFSVLLFVAVRLCRRSRAASVGRCLVPEGPLPGHLVDMSGTRTLSQSYQYEVCLAGGSGTNEFKFLKPIIPNFPPQCPGKEIQGNSTFPNNFGFNIQ

SEQ ID NO: 6845 - protein, 575 aa, Homo sapiens
MNGPALQPSSPSSAPSASPAAAPRGWSEFCELHAVAAARELARQYWLFAREHPQHAPLRAELVSLQFTDLFQRYFCREVRDGRAPGRDYRDTGRGPPAKAEASPEPGPGPAAPGLPKARSSEELAPPRPPGPCSFQHFRRSLRHIFRRRSAGELPAAHTAAAPGTPGEAAETPARPGLAKKFLPWSLAREPPPEALKEAVLRYSLADEASMDSGARWQRGRLALRRAPGPDGPDRVLELFDPPKSSRPKLQAACSSIQEVRWCTRLEMPDNLYTFVLKVKDRTDIIFEVGDEQQLNSWMAELSECTGRGLESTEAEMHIPSALEPSTSSSPRGSTDSLNQGASPGGLLDPACQKTDHFLSCYPWFHGPISRVKAAQLVQLQGPDAHGVFLVRQSETRRGEYVLTFNFQGIAKHLRLSLTERGQCRVQHLHFPSVVDMLHHFQRSPIPLECGAACDVRLSSYVVVVSQPPGSCNTVLFPFSLPHWDSESLPHWGSELGLPHLSSSGCPRGLSPEGLPGRSSPPEQIFHLVPSPEELANSLQHLEHEPVNRARDSDYEMDSSSRSHLRAIDNQYTPL

SEQ ID NO: 6846 - protein, 318 aa, Homo sapiens
MDKQNSQMNASHPETNLPVGYPPQYPPTAFQGPPGYSGYPGPQVSYPPPPAGHSGPGPAGFPVPNQPVYNQPVYNQPVGAAGVPWMPAPQPPLNCPPGLEYLSQIDQILIHQQIELLEVLTGFETNNKYEIKNSFGQRVYFAAEDTDCCTRNCCGPSRPFTLRIIDNMGQEVITLERPLRCSSCCCPCCLQEIEIQAPPGVPIGYVIQTWHPCLPKFTIQNEKREDVLKISGPCVVCSCCGDVDFEIKSLDEQCVVGKISKHWTGILREAFTDADNFGIQFPLDLDVKMKAVMIGACFLIDFMFFESTGSQEQKSGVW

SEQ ID NO: 6847 - protein, 809 aa, Homo sapiens
MEAEGSSAPARAGSGEGSDSAGGATLKAPKHLWRHEQHHQYPLRQPQFRLLHPHHHLPPPPPPSPQPQPQCPLQPPPPPPLPPPPPPPGAARGRYASSGATGRVRHRGYSDTERYLYCRAMDRTSYAVETGHRPGLKKSRMSWPSSFQGLRRFDVDNGTSAGRSPLDPMTSPGSGLILQANFVHSQRRESFLYRSDSDYDLSPKSMSRNSSIASDIHGDDLIVTPFAQVLASLRTVRNNFAALTNLQDRAPSKRSPMCNQPSINKATITEEAYQKLASETLEELDWCLDQLETLQTRHSVSEMASNKFKRMLNRELTHLSEMSRSGNQVSEFISNTFLDKQHEVEIPSPTQKEKEKKKRPMSQISGVKKLMHSSSLTNSSIPRFGVKTEQEDVLAKELEDVNKWGLHVFRIAELSGNRPLTVIMHTIFQERDLLKTFKIPVDTLITYLMTLEDHYHADVAYHNNIHAADVVQSTHVLLSTPALEAVFTDLEILAAIFASAIHDVDHPGVSNQFLINTNSELALMYNDSSVLENHHLAVGFKLLQEENCDIFQNLTKKQRQSLRKMVIDIVLATDMSKHMNLLADLKTMVETKKVTSSGVLLLDNYSDRIQVLQNMVHCADLSNPTKPLQLYRQWTDRIMEEFFRQGDRERERGMEISPMCDKHNASVEKSQVGFIDYIVHPLWETWADLVHPDAQDILDTLEDNREWYQSTIPQSPSPAPDDPEEGRQGQTEKFQFELTLEEDGESDTEKDSGSQVEEDTSCSDSKTLCTQDSESTEIPLDEQVEEEAVGEEEESQPEACVIDDRSPDT

SEQ ID NO: 6848 - protein, 552 aa, Homo sapiens
MSNEVETSATNGQPDQQAAPKAPSKKEKKKGPEKTDEYLLARFKGDGVKYKAKLIGIDDVPDARGDKMSQDSMMKLKGMAAAGRSQGQHKQRIWVNISLSGIKIIDEKTGVIEHEHPVNKISFIARDVTDNRAFGYVCGGEGQHQFFAIKTGQQAEPLVVDLKDLFQVIYNVKKKEEEKKKIEEASKAVENGSEALMILDDQTNKLKSGVDQMDLFGDMSTPPDLNSPTSSANDLLASDIFAPPVSEPSGQASPTGQPTALQPNPLDLFKTSAPAPVGPLVGLGGVTVTLPQAGPWNTASLVFNQSPSMAPGAMMGGQPSGFSQPVIFGTSPAVSGWNQPSPFAASTPPPVPVVWGPSASVAPNAWSTTSPLGNPFQSNIFPAPAVSTQPPSMHSSLLVTPPQPPPRAGPPKDISSDAFTALDPLGDKEIKDVKEMFKDFQLRQPPAVPARKGEQTSSGTLSAFASYFNSKVGIPQENADHDDFDANQLLNKINEPPKPAPRQVSLPVTKSTDNAFENPFFKDSFGSSQASVASSQPVSSEMYRDPFGNPFA

SEQ ID NO: 6849 - protein, 1030 aa, Homo sapiens
MRSEALLLYFTLLHFAGAGFPEDSEPISISHGNYTKQYPVFVGHKPGRNTTQRHRLDIQMIMIMNGTLYIAARDHIYTVDIDTSHTEEIYCSKKLTWKSRQADVDTCRMKGKHKDECHNFIKVLLKKNDDALFVCGTNAFNPSCRNYKMDTLEPFGDEFSGMARCPYDAKHANVALFADGKLYSATVTDFLAIDAVIYRSLGESPTLRTVKHDSKWLKEPYFVQAVDYGDYIYFFFREIAVEYNTMGKVVFPRVAQVCKNDMGGSQRVLEKQWTSFLKARLNCSVPGDSHFYFNILQAVTDVIRINGRDVVLATFSTPYNSIPGSAVCAYDMLDIASVFTGRFKEQKSPDSTWTPVPDERVPKPRPGCCAGSSSLERYATSNEFPDDTLNFIKTHPLMDEAVPSIFNRPWFLRTMVRYRLTKIAVDTAAGPYQNHTVVFLGSEKGIILKFLARIGNSGFLNDSLFLEEMSVYNSEKCSYDGVEDKRIMGMQLDRASSSLYVAFSTCVIKVPLGRCERHGKCKKTCIASRDPYCGWIKEGGACSHLSPNSRLTFEQDIERGNTDGLGDCHNSFVALNGHSSSLLPSTTTSDSTAQEGYESRGGMLDWKHLLDSPDSTDPLGAVSSHNHQDKKGVIRESYLKGHDQLVPVTLLAIAVILAFVMGAVFSGITVYCVCDHRRKDVAVVQRKEKELTHSRRGSMSSVTKLSGLFGDTQSKDPKPEAILTPLMHNGKLATPGNTAKMLIKADQHHLDLTALPTPESTPTLQQKRKPSRGSREWERNQNLINACTKDMPPMGSPVIPTDLPLRASPSHIPSVVVLPITQQGYQHEYVDQPKMSEVAQMALEDQAATLEYKTIKEHLSSKSPNHGVNLVENLDSLPPKVPQREASLGPPGASLSQTGLSKRLEMHHSSSYGVDYKRSYPTNSLTRSHQATTLKRNNTNSSNSSHLSRNQSFGRGDNPPPAPQRVDSIQVHSSQPSGQAVTVSRQPSLNAYNSLTRSGLKRTPSLKPDVPPKPSFAPLSTSMKPNDACT

SEQ ID NO: 6850 - protein, 324 aa, Homo sapiens
MPARALLPRRMGHRTLASTPALWASIPCPRSELRLDLVLPSGQSFRWREQSPAHWSGVLADQVWTLTQTEEQLHCTVYRGDKSQASRPTPDELEAVRKYFQLDVTLAQLYHHWGSVDSHFQEVAQKFQGVRLLRQDPIECLFSFICSSNNNIARITGMVERLCQAFGPRLIQLDDVTYHGFPSLQALAGPEVEAHLRKLGLGYRARYVSASARAILEEQGGLAWLQQLRESSYEEAHKALCILPGVGTKVADCICLMALDKPQAVPVDVHMWHIAQRDYSWHPTTSQAKGPSPQTNKELGNFFRSLWGPYAGWAQAVSVPRCPP

SEQ ID NO: 6851 - protein, 263 aa, Homo sapiens
MAETLFWTPLLVVLLAGLGDTEAQQTTLHPLVGRVFVHTLDHETFLSLPEHVAVPPAVHITYHAHLQGHPDLPRWLRYTQRSPHHPGFLYGSATPEDRGLQVIEVTAYNRDSFDTTRQRLVLEIGDPEGPLLPYQAEFLVRSHDAEEVLPSTPASRFLSALGGLWEPGELQLLNVTSALDRGGRVPLPIEGRKEGLKRDLATSDIQMVHHCTIHGNTEELRQMAASREVPRPLSTLPMFNVHTGERLPPRVDSAQVPLILDQH

SEQ ID NO: 6852 - protein, 1247 aa, Homo sapiens
MAQSLRLHFAARRSNTYPLSETSGDDLDSHVHMCFKRPTRISTSNVVQMKLTPRQTALAPLIKENVQSQERSSVPSSENVNKKSSCLQISLQPTRYSGYLQSSNVLADSDDASFTCILKDGIYSSAVVDNELNAVNDGHLVSSPAICSGSLSNFSTSDNGSYSSNGSDFGSCASITSGGSYTNSVISDSSSYTFPPSDDTFLGGNLPSDSTSNRSVPNRNTTPCEIFSRSTSTDPFVQDDLEHGLEIMKLPVSRNTKIPLKRYSSLVIFPRSPSTTRPTSPTSLCTLLSKGSYQTSHQFIISPSEIAHNEDGTSAKGFLSTAVNGLRLSKTICTPGEVRDIRPLHRKGSLQKKIVLSNNTPRQTVCEKSSEGYSCVSVHFTQRKAATLDCETTNGDCKPEMSEIKLNSDSEYIKLMHRTSACLPSSQNVDCQININGELERPHSQMNKNHGILRRSISLGGAYPNISCLSSLKHNCSKGGPSQLLIKFASGNEGKVDNLSRDSNRDCTNELSNSCKPGWVVLDQPDAACHLQQQQEPSPLPPGWEERQDILGRTYYVNHESRRTQWKRPTPQDNLTDAENGNIQLQAQRAFTTRRQISEETESVDNRESSENWEIIREDEATMYSNQAFPSPPPSSNLDVPTHLAEELNARLTIFGNSAVSQPASSSNHSSRRGSLQAYTFEEQPTLPVLLPTSSGLPPGWEEKQDERGRSYYVDHNSRTTTWTKPTVQATVETSQLTSSQSSAGPQSQASTSDSGQQVTQPSEIEQGFLPKGWEVRHAPNGRPFFIDHNTKTTTWEDPRLKIPAHLRGKTSLDTSNDLGPLPPGWEERTHTDGRIFYINHNIKRTQWEDPRLENVAITGPAVPYSRDYKRKYEFFRRKLKKQNDIPNKFEMKLRRATVLEDSYRRIMGVKRADFLKARLWIEFDGEKGLDYGGVAREWFFLISKEMFNPYYGLFEYSATDNYTLQINPNSGLCNEDHLSYFKFIGRVAGMAVYHGKLLDGFFIRPFYKMMLHKPITLHDMESVDSEYYNSLRWILENDPTELDLRFIIDEELFGQTHQHELKNGGSEIVVTNKNKKEYIYLVIQWRFVNRIQKQMAAFKEGFFELIPQDLIKIFDENELELLMCGLGDVDVNDWREHTKYKNGYSANHQVIQWFWKAVLMMDSEKRIRLLQFVTGTSRVPMNGFAELYGSNGPQSFTVEQWGTPEKLPRAHTCFNRLDLPPYESFEELWDKLQMAIENTQGFDGVD

SEQ ID NO: 6853 - protein, 614 aa, Homo sapiens
MSPADRCRSANTIEPATTSSLALFLLLQRDQSSRTRGLPEEKEEVTMDTSENRPENDVPEPPMPIADQVSNDDRPEGSVEDEEKKESSLPKSFKRKISVVSATKGVPAGNSDTEGGQPGRKRRWGASTATTQKKPSISITTESLKSLIPDIKPLAGQEAVVDLHADDSRISEDETERNGDDGTHDKGLKICRTVTQVVPAEGQENGQREEEEEEKEPEAEPPVPPQVSVEVALPPPAEHEVKKVTLGDTLTRRSISQQKSGVSITIDDPVRTAQVPSPPRGKISNIVHISNLVRPFTLGQLKELLGRTGTLVEEAFWIDKIKSHCFVTYSTVEEAVATRTALHGVKWPQSNPKFLCADYAEQDELDYHRGLLVDRPSETKTEEQGIPRPLHPPPPPPVQPPQHPRAEQREQERAVREQWAEREREMERRERTRSEREWDRDKVREGPRSRSRSRDRRRKERAKSKEKKSEKKEKAQEEPPAKLLDDLFRKTKAAPCIYWLPLTDSQIVQKEAERAERAKEREKRRKEQEEEEQKEREKEAERERNRQLEREKRREHSRERDRERERERERDRGDRDRDRERDRERGRERDRRDTKRHSRSRSRSTPVRDRGGRR

SEQ ID NO: 6854 - protein, 370 aa, Homo sapiens
MREKANLAVTLCNDKEEIMAQATFLDYPNWNVAKQDDWVSVFRELDSDIPCTPLNTLFMHLFVAVDEYSVGCCKEILRTVYKAVPELHFIFLIVPSYMSLGSTLITVFDQVGNIPCLTYEEDFAVHICHRHSHYPQLHVRKARVEDHDDLMPIFMRYDTILKETYGEYFLAELIEAQDEENHAVVCEVEGTAVGFMSVCSRVNMQLLHECFDLGPFHGLCFPHPDDVLESPQDLSVRRSQDAELRSSSQGSQKIVEELQEPVSPDTMENIQGNIAREAASEEALTAVQSGNVSEPEDIEKLSDISTGYAQYHHVSSRSLASLVLPEEPVHFRPIYRGASAAFCIQLFCIDEKYEARSLDFMNFVFSLFSV

SEQ ID NO: 6855 - protein, 625 aa, Homo sapiens
MEEEGGGRSCGTTRELQKLKQQAMEYYRENDVPRRLEELLNSTFYLQPADVYGHLANCFSKLAKPPTICKIVGKDVLDGLGLPTLQVDIFCTIQNFPKNVCSVVISTHFEVHENALPELAKAEEAERASAVSTAVQWVNSTITHELQGMAPSDQAEVDHLLRIFFASKVQEDKGRKELEKSLEYSTVPTPLPPVPPPPPPPPPTKKKGQKPGRKDTITEKPIAPAEPVEPVLSGSMAIGAVSLAVAKACAMLLNKPLYLNIALLKHNQEQPTTLSMPLLMVSLVSCGKSSSGKLNLMKEVICIPHPELTTKQGVEMLMEMQKHINKIIEMPSPPKAETKKGHDGSKRGQQQITGKMSHLGCLTINCDSIEQPLLLIQEICANLGLELGTNLHLAINCAGHELMDYNKGKYEVIMGTYKNAAEMVDLYVDLINKYPSIIALIDPFRKEDSEQWDSIYHALGSRCYIIAGTASKSISKLLEQGNISIPKSNGLIIKHTNQTTMSDLVEITNLIDSKKHITVFGSTEGESSDDSLVDLAVGLGVRFIKLGGLSRGERVTKYNRLLTIEEELVQNGTLGFKEEHTFFYFNEEAEKAAEALEAAAAREPLVPTFPTQGVEESAETGASSG

SEQ ID NO: 6856 - protein, 312 aa, Homo sapiens
MEAGNQTGFLEFILLGLSEDPELQPFIFGLFLSMYLVTVLGNLLIILAISSDSHLHTPMYFFLSNLSWVDICFSTCIVPKMLVNIQTENKAISYMDCLTQVYFSMFFPILDTLLLTVMAYDRFVAVCHPLHYMIIMNPHLCGLLVFVTWLIGVMTSLLHISLMMHLIFCKDFEIPHFFCELTYILQLACSDTFLNSTLIYFMTGVLGVFPLLGIIFSYSRIASSIRKMSSSGGKQKALSTCGSHLSVVSLFYGTGIGVHFTSAVTHSSQKISVASVMYTVVTPMLNPFIYSLRNKDVKGALGSLLSRAASCL

SEQ ID NO: 6857 - protein, 212 aa, Homo sapiens
MASRYDRAITVFSPDGHLFQVEYAQEAVKKGSTAVGIRGLTADARVVINRARVECQSHKLTVEDPVTVEYITRFIATLKQKYTQSNGRRPFGISALIVGFDDDGISRLYQTDPSGTYHAWKANAIGRSAKTVREFLEKNYTEDAIASDSEAIKLAIKALLEVVQSGGKNIELAIIRRNQPLKMFSAKEVELYVTEIEKEKEEAEKKKSKKSV

SEQ ID NO: 6858 - protein, 233 aa, Homo sapiens [sequence omitted]

SEQ ID NO: 6859 - protein, 470 aa, Homo sapiens
MEDIQTNAELKSTQEQSVPAESAAVLNDYSLTKSHEMENVDSGEGPANEDEDIGDDSMKVKDEYSERDENVLKSEPMGNAEEPEIPYSYSREYNEYENIKLERHVVSFDSSRPTSGKMNCDVCGLSCISFNVLMVHKRSHTGERPFQCNQCGASFTQKGNLLRHIKLHTGEKPFKCHLCNYACQRRDALTGHLRTHSASAEARHIKAEMGSERALVLDRLASNVAKRKSSMPQKFIGEKRHCFDVNYNSSYMYEKESELIQTRMMDQAINNAISYLGAEALRPLVQTPPAPTSEMVPVISSMYPIALTRAEMSNGAPQELEKKSIHLPEKSVPSERGLSPNNSGHDSTDTDSNHEERQNHIYQQNHMVLSRARNGMPLLKEVPRSYELLKPPPICPRDSVKVINKEGEVMDVYRCDHCRVLFLDYVMFTIHMGCHGFRDPFECNMCGYRSHDRYEFSSHIARGEHRALLK

SEQ ID NO: 6860 - protein, 1313 aa, Homo sapiens
MESGGGNAPAGALGAASESPQCPPPPGVEGAAGPAEPDGAAEGAAGGSGEGESGGGPRRALRAVYVRSESSQGGAAGGPEAGARQCLLRACEAEGAHLTSVPFGELDFGETAVLDAFYDADVAVVDMSDVSRQPSLFYHLGVRESFDMANNVILYHDTDADTALSLKDMVTQKNTASSGNYYFIPYIVTPCADYFCCESDAQRRASEYMQPNWDNILGPLCMPLVDRFISLLKDIHVTSCVYYKETLLNDIRKAREKYQGEELAKELARIKLRMDNTEVLTSDIIINLLLSYRDIQDYDAMVKLVETLEMLPTCDLADQHNIKFHYAFALNRRNSTGDREKALQIMLQVLQSCDHPGPDMFCLCGRIYKDIFLDSDCKDDTSRDSAIEWYRKGFELQSSLYSGINLAVLLIVAGQQFETSLELRKIGVRLNSLLGRKGSLEKMNNYWDVGQFFSVSMLAHDVGKAVQAAERLFKLKPPVWYLRSLVQNLLLIRRFKKTIIEHSPRQERLNFWLDIIFEATNEVTNGLRFPVLVIEPTKVYQPSYVSINNEAEERTVSLWHVSPTEMKQMHEWNFTASSIKGISLSKFDERCCFLYVHDNSDDFQIYFSTEEQCSRFFSLVKEMITNTAGSTVELEGETDGDTLEYEYDHDANGERVVLGKGTYGIVYAGRDLSNQVRIAIKEIPERDSRYSQPLHEEIALHKYLKHRNIVQYLGSVSENGYIKIFMEQVPGGSLSALLRSKWGPMKEPTIKFYTKQILEGLKYLHENQIVHRDIKGDNVLVNTYSGVVKISDFGTSKRLAGVNPCTETFTGTLQYMAPEIIDQGPRGYGAPADIWSLGCTIIEMATSKPPFHELGEPQAAMFKVGMFKIHPEIPEALSAEARAFILSCFEPDPHKRATTAELLREGFLRQVNKGKKNRIAFKPSEGPRGVVLALPTQGEPMATSSSEHGSVSPDSDAQPDALFERTRAPRHHLGHLLSVPDESSALEDRGLASSPEDRDQGLFLLRKDSERRAILYKILWEEQNQVASNLQECVAQSSEELHLSVGHIKQIIGILRDFIRSPEHRVMATTISKLKVDLDFDSSSISQIHLVLFGFQDAVNKILRNHLIRPHWMFAMDNIIRRAVQAAVTILIPELRAHFEPTCETEGVDKDMDEAEEGYPPATGPGQEAQPHQQHLSLQLGELRQETNRLLEHLVEKEREYQNLLRQTLEQKTQELYHLQLKLKSNCITENPAGPYGQRTDKELIDWLRLQGADAKTIEKIVEEGYTLSDILNEITKEDLRYLRLRGGLLCRLWSAVSQYRRAQEASETKDKA

SEQ ID NO: 6861 - protein, 166 aa, Homo sapiens
MSSKDFFACGHSGHWARGCPRGGAGGRRGGGHGRGSQCGSTTLSYTCYCCGESGRNAKNCVLLGNICYNCGRSGHIAKDCKDPKRERRQHCYTCGRLGHLARDCDRQKEQKCYSCGKLGHIQKDCAQVKCYRCGEIGHVAINCSKARPGQLLPLRQIPTSSQGMSQ

SEQ ID NO: 6862 - protein, 222 aa, Homo sapiens
TNQNSSSDSEAERRPPPRSESFRDKSRESLEEAAKRQDGGLFKGPPYPGYPFIMIPDLTSPYLPNGSLSPTARTLHFQSGSTHYSAYKTIEHQIAVQYLQMKWPLLDVQAGSLQSRQALKDARSPSPAHIVSPLPCCTQGHDCQHFYPPSDFTVSTQVFRDMKRSHSLQKVGEPWCIESNKVPVVQHPHHVHPLTPLITYSNEHFTPGNPPPHLPADVDPKT

SEQ ID NO: 6863 - protein, 865 aa, Homo sapiens
MGCAPSIHVSQSGVIYCRDSDESSSPRQTTSVSQGPAAPLPGLFVQTDAADAIPPSRASGPPSVARVRRARTELGSGSSAGSAAPAATTSRGRRRHCCSSAEAETQTCYTSVKVLLIFAKEDSQSDGFWWACDRAGYRCNIARTPESALECFLDKHHEIIVIDHRQTQNFDAEAVCRSIRATNPSEHTVILAVVSRVSDDHEEASVLPLLHAGFNRRFMENSSIIACYNELIQIEHGEVRSQFKLRACNSVFTALDHCHEAIEITSDDHVIQYVNPAFERMMGYHKGELLGKELADLPKSDKNRADLLDTINTCIKKGKEWQGVYYARRKSGDSIQQHVKITPVIGQGGKIRHFVSLKKLCCTTDNNKQIHKIHRDSGDNSQTEPHSFRYKNRRKESIDVKSISSRGSDAPSLQNRRYPSMARIHSMTIEAPITKVINIINAAQENSPVTVAEALDRVLEILRTTELYSPQLGTKDEDPHTSDLVGGLMTDGLRRLSGNEYVFTKNVHQSHSHLAMPITINDVPPCISQLLDNEESWDFNIFELEAITHKRPLVYLGLKVFSRFGVCEFLNCSETTLRAWFQVIEANYHSSNAYHNSTHAADVLHATAFFLGKERVKGSLDQLDEVAALIAATVHDVDHPGRTNSFLCNAGSELAVLYNDTAVLESHHTALAFQLTVKDTKCNIFKNIDRNHYRTLRQAIIDMVLATEMTKHFEHVNKFVNSINKPMAAEIEGSDCECNPAGKNFPENQILIKRMMIKCADVANPCRPLDLCIEWAGRISEEYFAQTDEEKRQGLPVVMPVFDRNTCSIPKSQISFIDYFITDMFDAWDAFAHLPALMQHLADNYKHWKTLDDLKCKSLRLPSDS

SEQ ID NO: 6864 - protein, 264 aa, Homo sapiens [sequence omitted]

SEQ ID NO: 6865 - protein, 546 aa, Homo sapiens
MAWPKLPAPWLLLCTWLPAGCLSLLVTVQHTERYVTLFASIILKCDYTTSAQLQDVVVTWRFKSFCKDPIFDYYSASYQAALSLGQDPSNDCNDNQREVRIVAQRRGQNEPVLGVDYRQRKITIQNRADLVINEVMWWDHGVYYCTIEAPGDTSGDPDKEVKLIVLHWLTVIFIILGALLLLLLIGVCWCQCCPQYCCCYIRCPCCPAHCCCPEEALARHRYMKQAQALGPQMMGKPLYWGADRSSQVSSYPMHPLLQRDLSLPSSLPQMPMTQTTNQPPIANGVLEYLEKELRNLNLAQPLPPDLKGRFGHPCSMLSSLGSEVVERRIIHLPPLIRDLSSSRRTSDSLHQQWLTPIPSRPWDLREGRSHHHYPDFHQELQDRGPKSWALERRELDPSWSGRHRSSRLNGSPIHWSDRDSLSDVPSSSEARWRPSHPPFRSRCQERPRRPSPRESTQRHGRRRRHRSYSPPLPSGLSSWSSEEDKERQPQSWRAHRRGSHSPHWPEEKPPSYRSLDITPGKNSRKKGSVERRSEKDSSHSGRSVVI

SEQ ID NO: 6866 - protein, 112 aa, Homo sapiens
MGLETEKADVQLFMDDDSYSHHSGLEYADPEKFADSDQDRDPHRLNSHLKDFNAFCKDLPNGSAFSADNMEECDRCYHCSIVYERRTMLLFCQPATEPGLNTWTPGLEIGIL

SEQ ID NO: 6867 - protein, 851 aa, Homo sapiens
MGNRGMEDLIPLVNRLQDAFSAIGQNADLDLPQIAVVGGQSAGKSSVLENFVGRDFLPRGSGIVTRRPLVLQLVNATTEYAEFLHCKGKKFTDFEEVRLEIEAETDRVTGTNKGISPVPINLRVYSPHVLNLTLVDLPGMTKVPVGDQPPDIEFQIRDMLMQFVTKENCLILAVSPANSDLANSDALKVAKEVDPQGQRTIGVITKLDLMDEGTDARDVLENKLLPLRRGYIGVVNRSQKDIDGKKDITAALAAERKFFLSHPSYRHLADRMGTPYLQKVLNQQLTNHIRDTLPGLRNKLQSQLLSIEKEVEEYKNFRPDDPARKTKALLQMVQQFAVDFEKRIEGSGDQIDTYELSGGARINRIFHERFPFELVKMEFDEKELRREISYAIKNIHGIRTGLFTPDMAFETIVKKQVKKIREPCLKCVDMVISELISTVRQCTKKLQQYPRLREEMERIVTTHIREREGRTKEQVMLLIDIELAYMNTNHEDFIGFANAQQRSNQMNKKKTSGNQDEILVIRKGWLTINNIGIMKGGSKEYWFVLTAENLSWYKDDEEKEKKYMLSVDNLKLRDVEKGFMSSKHIFALFNTEQRNVYKDYRQLELACETQEEVDSWKASFLRAGVYPERVGDKEKASETEENGSDSFMHSMDPQLERQVETIRNLVDSYMAIVNKTVRDLMPKTIMHLMINNTKEFIFSELLANLYSCGDQNTLMEESAEQAQRRDEMLRMYHALKEALSIIGDINTTTVSTPMPPPVDDSWLQVQSVPAGRRSPTSSPTPQRRAPAVPPARPGSRGPAPGPPPAGSALGGAPPVPSRPGASPDPFGPPPQVPSRPNRAPPGVPRITISDP

SEQ ID NO: 6868 - protein, 480 aa, Homo sapiens
MEVAPEQPRWMAHPAVLNAQHPDSHHPGLAHNYMEPAQLLPPDEVDVFFNHLDSQGNPYYANPAHARARVSYSPAHARLTGGQMCRPHLLHSPGLPWLDGGKAALSAAAAHHHNPWTVSPFSKTPLHPSAAGGPGGPLSVYPGAGGGSGGGSGSSVASLTPTAAHSGSHLFGFPPTPPKEVSPDPSTTGAASPASSSAGGSAARGEDKDGVKYQVSLTESMKMESGSPLRPGLATMGTQPATHHPIPTYPSYVPAAAHDYSSGLFHPGGFLGGPASSFTPKQRSKARSCSEGRECVNCGATATPLWRRDGTGHYLCNACGLYHKMNGQNRPLIKPKRRLSAARRAGTCCANCQTTTTTLWRRNANGDPVCNACGLYYKLHNVNRPLTMKKEGIQTRNRKMSNKSKKSKKGAECFEELSKCMQEKSSPFSAAALAGHMAPVGHLPPFSHSGHILPTPTPIHPSSSLSFGHPHPSSMVTAMG

SEQ ID NO: 6869 - protein, 216 aa, Homo sapiens
MAGRGGAARPNGPAAGNKICQFKLVLLGESAVGKSSLVLRFVKGQFHEYQESTIGAAFLTQTVCLDDTTVKFEIWDTAGQERYHSLAPMYYRGAQAAIVVYDITNTDTFARAKNWVKELQRQASPNIVIALAGNKADLASKRAVEFQEAQAYADDNSLLFMETSAKTAMNVNEIFMAIAKKLPKNEPQNATGAPGRNRGVDLQENNPASRSQCCSN

SEQ ID NO: 6870 - protein, 3458 aa, Homo sapiens
MERSGWARQTFLLALLLGATLRARAAAGYYPRFSPFFFLCTHHGELEGDGEQGEVLISLHIAGNPTYYVPGQEYHVTISTSTFFDGLLVTGLYTSTSVQASQSIGGSSAFGFGIMSDHQFGNQFMCSVVASHVSHLPTTNLSFIWIAPPAGTGCVNFMATATHRGQVIFKDALAQQLCEQGAPTDVTVHPHLAEIHSDSIILRDDFDSYHQLQLNPNIWVECNNCETGEQCGAIMHGNAVTFCEPYGPRELITTGLNTTTASVLQFSIGSGSCRFSYSDPSIIVLYAKNNSADWIQLEKIRAPSNVSTIIHILYLPEDAKGENVQFQWKQENLRVGEVYEACWALDNILIINSAHRQVVLEDSLDPVDTGNWLFFPGATVKHSCQSDGNSIYFHGNEGSEFNFATTRDVDLSTEDIQEQWSEEFESQPTGWDVLGAVIGTECGTIESGLSMVFLKDGERKLCTPSMDTTGYGNLRFYFVMGGICDPGNSHENDIILYAKIEGRKEHITLDTLSYSSYKVPSLVSVVINPELQTPATKFCLRQKNHQGHNRNVWAVDFFHVLPVLPSTMSHMIQFSINLGCGTHQPGNSVSLEFSTNHGRSWSLLHTECLPEICAGPHLPHSTVYSSENYSGWNRITIPLPNAALTRNTRIRWRQTGPILGNMWAIDNVYIGPSCLKFCSGRGQCTRHGCKCDPGFSGPACEMASQTFPMFISESFGSSRLSSYHNFYSIRGAEVSFGCGVLASGKALVFNKDGRRQLITSFLDSSQSRFLQFTLRLGSKSVLSTCRAPDQPGEGVLLHYSYDNGITWKLLEHYSYLSYHEPRIISVELPGDAKQFGIQFRWWQPYHSSQREDVWAIDEIIMTSVLFNSISLDFTNLVEVTQSLGFYLGNVQPYCGHDWTLCFTGDSKLASSMRYVETQSMQIGASYMIQFSLVMGCGQKYTPHMDNQVKLEYSTNHGLTWHLVQEECLPSMPSCQEFTSASIYHASEFTQWRRVIVLLPQKTWSSATRFRWSQSYYTAQDEWALDSIYIGQQCPNMCSGHGSCDHGICRCDQGYQGTECHPEAALPSTIMSDFENQNGWESDWQEVIGGEIVKPEQGCGVISSGSSLYFSKAGKRQLVSWDLDTSWVDFVQFYIQIGGESASCNKPDSREEGVLLQYSNNGGIQWHLLAEMYFSDFSKPRFVYLELPAAAKTPCTRFRWWQPVFSGEDYDQWAVDDIIILSEKQKQIIPVINPTLPQNFYEKPAFDYPMNQMSVWLMLANEGMVKNETFCAATPSAMIFGKSDGDRFAVTRDLTLKPGYVLQFKLNIGCANQFSSTAPVLLQYSHDAGMSWFLVKEGCYPASAGKGCEGNSRELSEPTMYHTGDFEEWTRITIVIPRSLASSKTRFRWIQESSSQKNVPPFGLDGVYISEPCPSYCSGHGDCISGVCFCDLGYTAAQGTCVSNVPNHNEMFDRFEGKLSPLWYKITGAQVGTGCGTLNDGKSLYFNGPGKREARTVPLDTRNIRLVQFYIQIGSKTSGITCIKPRTRNEGLIVQYSNDNGILWHLLRELDFMSFLEPQIISIDLPQDAKTPATAFRWWQPQHGKHSAQWALDDVLIGMNDSSQTGFQDKFDGSIDLQANWYRIQGGQVDIDCLSMDTALIFTENIGKPRYAETWDFHVSASTFLQFEMSMGCSKPFSNSHSVQLQYSLNNGKDWHLVTEECVPPTIGCLHYTESSIYTSERFQNWKRITVYLPLSTISPRTRFRWIQANYTVGADSWAIDNVVLASGCPWMCSGRGICDAGRCVCDRGFGGPYCVPVVPLPSILKDDFNGNLHPDLWPEVYGAERGNLNGETIKSGTSLIFKGEGLRMLISRDLDCTNTMYVQFSLRFIAKSTPERSHSILLQFSISGGITWHLMDEFYFPQTTNILFINVPLPYTAQTNATRFRLWQPYNNGKKEEIWIVDDFIIDGNNVNNPVMLLDTFDFGPREDNWFFYPGGNIGLYCPYSSKGAPEEDSAMVFVSNEVGEHSITTRDLNVNENTIIQFEINVGCSTDSSSADPVRLEFSRDFGATWHLLLPLCYHSSSHVSSLCSTEHHPSSTYYAGTMQGWRREVVHFGKLHLCGSVRFRWYQGFYPAGSQPVTWAIDNVYIGPQCEEMCNGQGSCINGTKCICDPGYSGPTCKISTKNPDFLKDDFEGQLESDRFLLMSGGKPSRKCGILSSGNNLFFNEDGLRMLMTRDLDLSHARFVQFFMRLGCGKGVPDPRSQPVLLQYSLNGGLSWSLLQEFLFSNSSNVGRYIALEIPLKARSGSTRLRWWQPSENGHFYSPWVIDQILIGGNISGNTVLEDDFTTLDSRKWLLHPGGTKMPVCGSTGDALVFIEKASTRYVVSTDVAVNEDSFLQIDFAASCSVTDSCYAIELEYSVDLGLSWHPLVRDCLPTNVECSRYHLQRILVSDTFNKWTRITLPLPPYTRSQATRFRWHQPAPFDKQQTWAIDNVYIGDGCIDMCSGHGRCIQGNCVCDEQWGGLYCDDPETSLPTQLKDNFNRAPSSQNWLTVNGGKLSTVCGAVASGMALHFSGGCSRLLVTVDLNLTNAEFIQFYFMYGCLITPNNRNQGVLLEYSVNGGITWNLLMEIFYDQYSKPGFVNILLPPDAKEIATRFRWWQPRHDGLDQNDWAIDNVLISGSADQRTVMLDTFSSAPVPQHERSPADAGPVGRIAFDMFMEDKTSVNEHWLFHDDCTVERFCDSPDGVMLCGSHDGREVYAVTHDLTPTEGWIMQFKISVGCKVSEKIAQNQIHVQYSTDFGVSWNYLVPQCLPADPKCSGSVSQPSVFFPTKGWKRITYPLPESLVGNPVRFRFYQKYSDMQWAIDNFYLGPGCLDNCRGHGDCLREQCICDPGYSGPNCYLTHTLKTFLKERFDSEEIKPDLWMSLEGGSTCTECGILAEDTALYFGGSTVRQAVTQDLDLRGAKFLQYWGRIGSENNMTSCHRPICRKEGVLLDYSTDGGITWTLLHEMDYQKYISVRHDYILLPEDALTNTTRLRWWQPFVISNGIVVSGVERAQWALDNILIGGAEINPSQLVDTFDDEGTSHEENWSFYPNAVRTAGFCGNPSFHLYWPNKKKDKTHNALSSRELIIQPGYMMQFKIVVGCEATSCGDLHSVMLEYTKDARSDSWQLVQTQCLPSSSNSIGCSPFQFHEATIYNSVNSSSWKRITIQLPDHVSSSATQFRWIQKGEETEKQSWAIDHVYIGEACPKLCSGHGYCTTGAICICDESFQGDDCSVFSHDLPSYIKDNFESARVTEANWETIQGGVIGSGCGQLAPYAHGDSLYFNGCQIRQAATKPLDLTRASKIMFVLQIGSMSQTDSCNSDLSGPHAVDKAVLLQYSVNNGITWHVIAQHQPKDFTQAQRVSYNVPLEARMKGVLLRWWQPRHNGTGHDQWALDHVEVVLTRKQNYMMNFSRQHGLRHFYNRRRRSLRRYP

SEQ ID NO: 6871 - protein, 453 aa, Homo sapiens
MALCLELLKQCSSCLVAYKKTPPPVPPRTTSKPFISVTVQSSTESAQDTYLDSQDHKSEVTSQSGLSNSSDSLDSSTRPPSVTRGGVAPAPEAPEPPPKHAALKSEQGTLTSSESHPEAAPKRKLSSIGIQVDCIQPVPKEEPSPATKFQSIGVQVEDDWRSSVPSHSMSSRRDTDSDTQDANDSSCKSSERSLPDCTPHPNSISIDAGPRQAPKIAQIKRNLSYGDNSDPALEASSLPPPDPWLETSSSSPAEPAQPGACRRDGYWFLKLLQAETERLEGWCCQMDKETKENNLSEEVLGKVLSAVGSAQLLMSQKFQQFRGLCEQNLNPDANPRPTAQDLAGFWDLLQLSIEDISMKFDELYHLKANSWQLVETPEKRKEEKKPPPPVPKKPAKSKPAVSRDKASDASDKQRQEARKRLLAAKRAASVRQNSATESADSIEIYVPEAQTRL

SEQ ID NO: 6872 - protein, 347 aa, Homo sapiens
MEQYTANSNSSTEQIVVQAGQIQQQQQGGVTAVQLQTEAQVASASGQQVQTLQVVQGQPLMVQVSGGQLITSTGQPIMVQAVPGGQGQTIMQVPVSGTQGLQQIQLVPPGQIQIQGGQAVQVQGQQGQTQQIIIQQPQTAVTAGQTQTQQQIAVQGQQVAQTAEGQTIVYQPVNADGTILQQVTVPVSGMITIPAASLAGAQIVQTGANTNTTSSGQGTVTVTLPVAGNVVNSGGMVMMVPGAGSVPAIQRIPLPGAEMLEEEPLYVNAKQYHRILKRRQARAKLEAEGKIPKERRKYLHESRHRHAMARKRGEGGRFFSPKEKDSPHMQDPNQADEEAMTQIIRVS

SEQ ID NO: 6873 - protein, 390 aa, Homo sapiens
MLSRKGIIPEEYVLTRLAEDPAKPRYRARQRRARFVSKKGNCNVAHKNIREQGRFLQDVFTTLVDLKWPHTLLIFTMSFLCSWLLFAMAWWLIAFAHGDLAPSEGTAEPCVTSIHSFSSAFLFSIEVQVTIGFGGRMVTEECPLAILILIVQNIVGLMINAIMLGCIFMKTAQAHRRAETLIFSKHAVIALRHGRLCFMLRVGDLRKSMIISATIHMQVVRKTTSPEGEVVPLHQVDIPMENGVGGNSIFLVAPLIIYHVIDANSPLYDLAPSDLHHHQDLEIIVILEGVVETTGITTQARTSYLADEILWGQRFVPIVAEEDGRYSVDYSKFGNTVKVPTPLCTARQLDEDHSLLEALTLASARGPLRKRSVPMAKAKPKFSISPDSLS

SEQ ID NO: 6874 - protein, 402 aa, Homo sapiens
MPPVSRSSYSEDIVGSRRRRRSSSGSPPSPQSRCSSWDGCSRSHSRGREGLRPPWSELDVGALYPFSRSGSRGRLPRFRNYAFASSWSTSYSGYRYHRHCYAEERQSAEDYEKEESHRQRRLKERERIGELGAPEVWGPSPKFPQLDSDEHTPVEDEEEVTHQKSSSSDSNSEEHRKKKTSRSRNKKKRKNKSSKRKHRKYSDSDSNSESDTNSDSDDDKKRVKAKKKKKKKKHKTKKKKNKKTKKESSDSSCKDSEEDLSEATWMEQPNVADTMDLIGPEAPIIHTSQDEKPLKYGHALLPGEGAAMAEYVKAGKRIPRRGEIGLTSEEIGSFECSGYVMSGSRHRRMEAVRLRKENQIYSADEKRALASFNQEERRKRESKILASFREMVHKKTKEKDDK

SEQ ID NO: 6875 - protein, 332 aa, Homo sapiens
MKLGRAVLGLLLLAPSVVQAVEPISLGLALAGVLTGYIYPRLYCLFAECCGQKRSLSREALQKDLDDNLFGQHLAKKIILNAVFGFINNPKPKKPLTLSLHGWTGTGKNFVSKIIAENIYEGGLNSDYVHLFVATLHFPHASNITLYKDQLQLWIRGNVSACARSIFIFDEMDKMHAGLIDAIKPFLDYYDLVDGVSYQKAMFIFLSNAGAERITDVALDFWRSGKQREDIKLKDIEHALSVSVFNNKNSGFWHSSLIDRNLIDYFVPFLPLEYKHLKMCIRVEMQSRGYEIDEDIVSRVAEEMTFFPKEERVFSDKGCKTVFTKLDYYYDD

SEQ ID NO: 6876 - protein, 651 aa, Homo sapiens
MGSWALLWPPLLFTGLLVRPPGTMAQAQYCSVNKDIFEVEENTNVTEPLVDIHVPEGQEVTLGALSTPFAFRIQGNQLFLNVTPDYEEKSLLEAQLLCQSGGTLVTQLRVFVSVLDVNDNAPEFPFKTKEIRVEEDTKVNSTVIPETQLQAEDRDKDDILFYTLQEMTAGASDYFSLVSVNRPALRLDRPLDFYERPNMTFWLLVRDTPGENVEPSHTATATLVLNVVPADLRPPWFLPCTFSDGYVCIQAQYHGAVPTGHILPSPLVLRPGPIYAEDGDRGINQPIIYSIFRGNVNGTFIIHPDSGNLTVARSVPSPMTFLLLVKGQQADLARYSVTQVTVEAVAAAGSPPRFPQRLYRGTVARGAGAGVVVKDAAAPSQPLRIQAQDPEFSDLNSAITYRITNHSHFRMEGEVVLTTTTLAQAGAFYAEVEAHNTVTSGTATTVIEIQVSEQEPPSTGGGPSEDKRFSVVDMAALGGVLGALLLLALLGLAVLVHKHYGPRLKCCCGKAPEPQPQGFDNQAFLPDHKANWAPVPSPTHDPKPAEAPMPAEPAPPGPASPGGAPEPPAAARAGGSPTAVRSILTKERRPEGGYKAVWFGEDIGTEADVVVLNAPTLDVDGASDSGSGDEGEGAGRGGGPYDAPGGDDSYI

SEQ ID NO: 6877 - protein, 1500 aa, Homo sapiens
MDPSMGVNSVTISVEGMTCNSCVWTIEQQIGKVNGVHHIKVSLEEKNATIIYDPKLQTPKTLQEAIDDMGFDAVIHNPDPLPVLTDTLFLTVTASLTLPWDHIQSTLLKTKGVTDIKIYPQKRTVAVTIIPSIVNANQIKELVPELSLDTGTLEKKSGACEDHSMAQAGEVVLKMKVEGMTCHSCTSTIEGKIGKLQGVQRIKVSLDNQEATIVYQPHLISVEEMKKQIEAMGFPAFVKKQPKYLKLGAIDVERLKNTPVKSSEGSQQRSPSYTNDSTATFIIDGMHCKSCVSNIESTLSALQYVSSIVVSLENRSAIVKYNASSVTPESLRKAIEAVSPGLYRVSITSEVESTSNSPSSSSLQKIPLNVVSQPLTQETVINIDGMTCNSCVQSIEGVISKKPGVKSIRVSLANSNGTVEYDPLLTSPETLRGAIEDMGFDATLSDTNEPLVVIAQPSSEMPLLTSTNEFYTKGMTPVQDKEEGKNSSKCYIQVTGMTCASCVANIERNLRREEGIYSILVALMAGKAEVRYNPAVIQPPMIAEFIRELGFGATVIENADEGDGVLELVVRGMTCASCVHKIESSLTKHRGILYCSVALATNKAHIKYDPEIIGPRDIIHTIESLGFEASLVKKDRSASHLDHKREIRQWRRSFLVSLFFCIPVMGLMIYMMVMDHHFATLHHNQNMSKEEMINLHSSMFLERQILPGLSVMNLLSFLLCVPVQFFGGWYFYIQAYKALKHKTANMDVLIVLATTIAFAYSLIILLVAMYERAKVNPITFFDTPPMLFVFIALGRWLEHIAKGKTSEALAKLISLQATEATIVTLDSDNILLSEEQVDVELVQRGDIIKVVPGGKFPVDGRVIEGHSMVDESLITGEAMPVAKKPGSTVIAGSINQNGSLLICATHVGADTTLSQIVKLVEEAQTSKAPIQQFADKLSGYFVPFIVFVSIATLLVWIVIGFLNFEIVETYFPGYNRSISRTETIIRFAFQASITVLCIACPCSLGLATPTAVMVGTGVGAQNGILIKGGEPLEMAHKVKVVVFDKTGTITHGTPVVNQVKVLTESNRISHHKILAIVGTAESNSEHPLGTAITKYCKQELDTETLGTCIDFQVVPGCGISCKVTNIEGLLHKNNWNIEDNNIKNASLVQIDASNEQSSTSSSMIIDAQISNALNAQQYKVLIGNREWMIRNGLVINNDVNDFMTEHERKGRTAVLVAVDDELCGLIAIADTVKPEAELAIHILKSMGLEVVLMTGDNSKTARSIASQVGITKVFAEVLPSHKVAKVKQLQEEGKRVAMVGDGINDSPALAMANVGIAIGTGTDVAIEAADVVLIRNDLLDVVASIDLSRKTVKRIRINFVFALIYNLVGIPIAAGVFMPIGLVLQPWMGSAAMAASSVSVVLSSLFLKLYRKPTYESYELPARSQIGQKSPSEISVHVGIDDTSRNSPKLGLLDRIVNYSRASINSLLSDKRSLNSVVTSEPDKHSLLVGDFREDDDTAL

SEQ ID NO: 6878 - protein, 926 aa, Homo sapiens
MPVRKQDTQRALHLLEEYRSKLSQTEDRQLRSSIERVINIFQSNLFQALIDIQEFYEVTLLDNPKCIDRSKPSEPIQPVNTWEISSLPSSTVTSETLPSSLSPSVEKYRYQDEDTPPQEHISPQITNEVIGPELVHVSEKNLSEIENVHGFVSHSHISPIKPTEAVLPSPPTVPVIPVLPVPAENTVILPTIPQANPPPVLVNTDSLETPTYVNGTDADYEYEEITLERGNSGLGFSIAGGTDNPHIGDDSSIFITKIITGGAAAQDGRLRVNDCILRVNEVDVRDVTHSKAVEALKEAGSIVRLYVKRRKPVSEKIMEIKLIKGPKGLGFSIAGGVGNQHIPGDNSIYVTKIIEGGAAHKDGKLQIGDKLLAVNNVCLEEVTHEEAVTALKNTSDFVYLKVAKPTSMYMNDGYAPPDITNSSSQPVDNHVSPSSFLGQTPASPARYSPVSKAVLGDDEITREPRKVVLHRGSTGLGFNIVGGEDGEGIFISFILAGGPADLSGELRKGDRIISVNSVDLRAASHEQAAAALKNAGQAVTIVAQYRPEEYSRFEAKIHDLREQMMNSSISSGSGSLRTSQKRSLYVRALFDYDKTKDSGLPSQGLNFKFGDILHVINASDDEWWQARQVTPDGESDEVGVIPSKRRVEKKERARLKTVKFNSKTRDKGQSFNDKRKKNLFSRKFPFYKNKDQSEQETSDADQHVTSNASDSESSYRGQEEYVLSYEPVNQQEVNYTRPVIILGPMKDRINDDLISEFPDKFGSCVPHTTRPKRDYEVDGRDYHFVTSREQMEKDIQEHKFIEAGQYNNHLYGTSVQSVREVAEKGKHCILDVSGNAIKRLQIAQLYPISIFIKPKSMENIMEMNKRLTEEQARKTFERAMKLEQEFTEHFTAIVQGDTLEDIYNQVKQIIEEQSGSYIWVPAKEKL

SEQ ID NO: 6879 - protein, 1616 aa, Homo sapiens
MPARTAPARVPTLAVPAISLPDDVRRRLKDLERDSLTEKECVKEKLNLLHEFLQTEIKNQLCDLETKLRKEELSEEGYLAKVKSLLNKDLSLENGAHAYNREVNGRLENGNQARSEARRVGMADANSPPKPLSKPRTPRRSKSDGEAKPEPSPSPRITRKSTRQTTITSHFAKGPAKRKPQEESERAKSDESIKEEDKDQDEKRRRVTSRERVARPLPAEEPERAKSGTRTEKEEERDEKEEKRLRSQTKEPTPKQKLKEEPDREARAGVQADEDEDGDEKDEKKHRSQPKDLAAKRRPEEKEPEKVNPQISDEKDEDEKEEKRRKTTPKEPTEKKMARAKTVMNSKTHPPKCIQCGQYLDDPDLKYGQHPPDAVDEPQMLTNEKLSIFDANESGFESYEALPQHKLTCFSVYCKHGHLCPIDTGLIEKNIELFFSGSAKPIYDDDPSLEGGVNGKNLGPINEWWITGFDGGEKALIGFSTSFAEYILMDPSPEYAPIFGLMQEKIYISKIVVEFLQSNSDSTYEDLINKIETTVPPSGLNLNRFTEDSLLRHAQFVVEQVESYDEAGDSDEQPIFLTPCMRDLIKLAGVTLGQRRAQARRQTIRHSTREKDRGPTKATTTKLVYQIFDTFFAEQIEKDDREDKENAFKRRRCGVCEVCQQPECGKCKACKDMVKFGGSGRSKQACQERRCPNMAMKEADDDEEVDDNIPEMPSPKKMHQGKKKKQNKNRISWVGEAVKTDGKKSYYKKVCIDAETLEVGDCVSVIPDDSSKPLYLARVTALWEDSSNGQMFHAHWFCAGTDTVLGATSDPLELFLVDECEDMQLSYIHSKVKVIYKAPSENWAMEGGMDPESLLEGDDGKTYFYQLWYDQDYARFESPPKTQPTEDNKFKFCVSCARLAEMRQKEIPRVLEQLEDLDSRVLYYSATKNGILYRVGDGVYLPPEAFTFNIKLSSPVKRPRKEPVDEDLYPEHYRKYSDYIKGSNLDAPEPYRIGRIKEIFCPKKSNGRPNETDIKIRVNKFYRPENTHKSTPASYHADINLLYWSDEEAVVDFKAVQGRCTVEYGEDLPECVQVYSMGGPNRFYFLEAYNAKSKSFEDPPNHARSPGNKGKGKGKGKGKPKSQACEPSEPEIEIKLPKLRTLDVFSGCGGLSEGFHQAGISDTLWAIEMWDPAAQAFRLNNPGSTVFTEDCNILLKLVMAGETTNSRGQRLPQKGDVEMLCGGPPCQGFSGMNRFNSRTYSKFKNSLVVSFLSYCDYYRPRFFLLENVRNFVSFKRSMVLKLTLRCLVRMGYQCTFGVLQAGQYGVAQTRRRAIILAAAPGEKLPLFPEPLHVFAPRACQLSVVVDDKKFVSNITRLSSGPFRTITVRDTMSDLPEVRNGASALEISYNGEPQSWFQRQLRGAQYQPILRDHICKDMSALVAARMRHIPLAPGSDWRDLPNIEVRLSDGTMARKLRYTHHDRKNGRSSSGALRGVCSCVEAGKACDPAARQFNTLIPWCLPHTGNRHNHWAGLYGRLEWDGFFSTTVTNPEPMGKQGRVLHPEQHRVVSVRECARSQGFPDTYRLFGNILDKHRQVGNAVPPPLAKAIGLEIKLCMLAKARESASAKIKEEEAAKD

SEQ ID NO: 6880 - protein, 501 aa, Homo sapiens
MVCEGKRSASCPCFFLLTAKFYWILTMMQRTHSQEYAHSIRVDGDIILGGLFPVHAKGERGVPCGELKKEKGIHRLEAMLYAIDQINKDPDLLSNITLGVRILDTCSRDTYALEQSLTFVQALIEKDASDVKCANGDPPIFTKPDKISGVIGAAASSVSIMVANILRLFKIPQISYASTAPELSDNTRYDFFSRVVPPDSYQAQAMVDIVTALGWNYVSTLASEGNYGESGVEAFTQISREIGGVCIAQSQKIPREPRPGEFEKIIKRLLETPNARAVIMFANEDDIRRILEAAKKLNQSGHFLWIGSDSWGSKIAPVYQQEEIAEGAVTILPKRASIDGFDRYFRSRTLANNRRNVWFAEFWEENFGCKLGSHGKRNSHIKKCTGLERIARDSSYEQEGKVQFVIDAVYSMAYALHNMHKDLCPGYIGLCPRMSTIDGKELLGYIRAVNFNGCRRGIQMSLPWPTLFTPSFSSSWAVLALLSLLMKTEMLLDVMISSSIK

SEQ ID NO: 6881 - protein, 640 aa, Homo sapiens
MHVKKYLLKGLHRLQKGPGYTYKELLVWYCDNTNTHGPKRIICEGPKKKAMWFLLTLLFAALVCWQWGIFIRTYLSWEVSVSLSVGFKTMDFPAVTICNASPFKYSKIKHLLKDLDELMEAVLERILAPELSHANATRNLNFSIWNHTPLVLIDERNPHHPMVLDLFGDNHNGLTSSSASEKICNAHGCKMAMRLCSLNRTQCTFRNFTSATQALTEWYILQATNIFAQVPQQELVEMSYPGEQMILACLFGAEPCNYRNFTSIFYPHYGNCYIFNWGMTEKALPSANPGTEFGLKLILDIGQEDYVPFLASTAGVRLMLHEQRSYPFIRDEGIYAMSGTETSIGVLVDKLQRMGEPYSPCTVNGSEVPVQNFYSDYNTTYSIQACLRSCFQDHMIRNCNCGHYLYPLPRGEKYCNNRDFPDWAHCYSDLQMSVAQRETCIGMCKESCNDTQYKMTISMADWPSEASEDWIFHVLSQERDQSTNITLSRKGIVKLNIYFQEFNYRTIEESAANNIVWLLSNLGGQFGFWMGGSVLCLIEFGEIIIDFVWITIIKLVALAKSLRQRRAQASYAGPPPTVAELVEAHTNFGFQPDTAPRSPNTGPYPSEQALPIPGTPPPNYDSLRLQPLDVIESDSEGDAI

SEQ ID NO: 6882 - protein, 643 aa, Homo sapiens
MEKSSSCESLGSQPAAARPPSVDSLSSASTSHSENSVHTKSASVVSSDSISTSADNFSPDLRVLRESNKLAEMEEPPLLPGENIKDMAKDVTYICPFTGAVRGTLTVTNYRLYFKSMERDPPFVLDASLGVINRVEKIGGASSRGENSYGLETVCKDIRNLRFAHKPEGRTRRSIFENLMKYAFPVSNNLPLFAFEYKEVFPENGWKLYDPLLEYRRQGIPNESWRITKINERYELCDTYPALLVVPANIPDEELKRVASFRSRGRIPVLSWIHPESQATITRCSQPMVGVSGKRSKEDEKYLQAIMDSNAQSHKIFIFDARPSVNAVANKAKGGGYESEDAYQNAELVFLDIHNIHVMRESLRKLKEIVYPNIEETHWLSNLESTHWLEHIKLILAGALRIADKVESGKTSVVVHCSDGWDRTAQLTSLAMLMLDGYYRTIRGFEVLVEKEWLSFGHRFQLRVGHGDKNHADADRSPVFLQFIDCVWQMTRQFPTAFEFNEYFLITILDHLYSCLFGTFLCNSEQQRGKENLPKRTVSLWSYINSQLEDFTNPLYGSYSNHVLYPVASMRHLELWVGYYIRWNPRMKPQEPIHNRYKELLAKRAELQKKVEELQREISNRSTSSSERASSPAQCVTPVQTVV

SEQ ID NO: 6883 - protein, 851 aa, Homo sapiens
MHKDEFHLKFFMCVIQSRQLVRTPQRTAGEASTSSMLIPKPPPKTDILKSLDTMDDPDTVGSIPVFKTEWIMTHEEHHAAKTLGIGKAIAVLTSGGDAQGMNAAVRAVVRVGIFTGARVFFVHEGYQGLVDGGDHIKEATWESVSMMLQLGGTVIGSARCKDFREREGRLRAAYNLVKRGITNLCVIGGDGSLTGADTFRSEWSDLLSDLQKAGKITDEEATKSSYLNIVGLVGSIDNDFCGTDMTIGTDSALHRIMEIVDAITTTAQSHQRTFVLEVMGRHCGYLALVTSLSCGADWVFIPECPPDDDWEEHLCRRLSETRTRGSRLNIIIVAEGAIDKNGKPITSEDIKNLVVKRLGYDTRVTVLGHVQRGGTPSAFDRILGSRMGVEAVMALLEGTPDTPACVVSLSGNQAVRLPLMECVQVTKDVTKAMDEKKFDEALKLRGRSFMNNWEVYKLLAHVRPPVSKSGSHTVAVMNVGAPAAGMNAAVRSTVRIGLIQGNRVLVVHDGFEGLAKGQIEEAGWSYVGGWTGQGGSKLGTKRTLPKKSFEQISANITKFNIQGLVIIGGFEAYTGGLELMEGRKQFDELCIPFVVIPATVSNNVPGSDFSVGADTALNTICTTCDRIKQSAAGTKRRVFIIETMGGYCGYLATMAGLAAGADAAYIFEEPFTIRDLQANVEHLVQKMKTTVKRGLVLRNEKCNENYTTDFIFNLYSEEGKGIFDSRKNVLGHMQQGGSPTPFDRNFATKMGAKAMNWMSGKIKESYRNGRIFANTPDSGCVLGMRKRALVFQPVAELKDQTDFEHRIPKEQWWLKLRPILKILAKYEIDLDTSDHAHLEHITRKRSGEAAV

SEQ ID NO: 6884 - protein, 508 aa, Homo sapiens
MELEVRRVRQAFLSGRSRPLRFRLQQLEALRRMVQEREKDILTAIAADLCKSEFNVYSQEVITVLGEIDFMLENLPEWVTAKPVKKNVLTMLDEAYIQPQPLGVVLIIGAWNYPFVLTIQPLIGAIAAGNAVIIKPSELSENTAKILAKLLPQYLDQDLYIVINGGVEETTELLKQRFDHIFYTGNTAVGKIVMEAAAKHLTPVTLELGGKSPCYIDKDCDLDIVCRRITWGKYMNCGQTCIAPDYILCEASLQNQIVWKIKETVKEFYGENIKESPDYERIINLRHFKRILSLLEGQKIAFGGETDEATRYIAPTVLTDVDPKTKVMQEEIFGPILPIVPVKNVDEAINFINEREKPLALYVFSHNHKLIKRMIDETSSGGVTGNDVIMHFTLNSFPFGGVGSSGMGAYHGKHSFDTFSHQRPCLLKSLKREGANKLRYPPNSQSKVDWGKFFLLKRFNKEKLGLLLLTFLGIVAAVLVKKYQAVLRRKALLIFLVVHRLRWSSKQR

SEQ ID NO: 6885 - protein, 591 aa, Homo sapiens
MAVAPLRGALLLWQLLAAGGAALEIGRFDPERGRGAAPCQAVEIPMCRGIGYNLTRMPNLLGHTSQGEAAAELAEFAPLVQYGCHSHLRFFLCSLYAPMCTDQVSTPIPACRPMCEQARLRCAPIMEQFNFGWPDSLDCARLPTRNDPHALCMEAPENATAGPAEPHKGLGMLPVAPRPARPPGDLGPGAGGSGTCENPEKFQYVEKSRSCAPRCGPGVEVFWSRRDKDFALVWMAVWSALCFFSTAFTVLTFLLEPHRFQYPERPIIFLSMCYNVYSLAFLIRAVAGAQSVACDQEAGALYVIQEGLENTGCTLVFLLLYYFGMASSLWWVVLTLTWFLAAGKKWGHEAIEAHGSYFHMAAWGLPALKTIVILTLRKVAGDELTGLCYVASTDAAALTGFVLVPLSGYLVLGSSFLLTGFVALFHIRKIMKTGGTNTEKLEKLMVKIGVFSILYTVPATCVIVCYVYERLNMDFWRLRATEQPCAAAAGPGGRRDCSLPGGSVPTVAVFMLKIFMSLVVGITSGVWVWSSKTFQTWQSLCYRKIAAGRARAKACRAPGSYGRGTHCHYKAPTVVLHMTKTDPSLENPTHL

SEQ ID NO: 6886 - protein, 977 aa, Homo sapiens
MERQKRKADIEKGLQFIQSTLPLKQEEYEAFLLKLVQNLFAEGNDLFREKDYKQALVQYMEGLNVADYAASDQVALPRELLCKLHVNRAACYFTMGLYEKALEDSEKALGLDSESIRALFRKARALNELGRHKEAYECSSRCSLALPHDESVTQLGQELAQKLGLRVRKAYKRPQELETFSLLSNGTAAGVADQGTSNGLGSIDDIETDCYVDPRGSPALLPSTPTMPLFPHVLDLLAPLDSSRTLPSTDSLDDFSDGDVFGPELDTLLDSLSLVQGGLSGSGVPSELPQLIPVFPGGTPLLPPVVGGSIPVSSPLPPASFGLVMDPSKKLAASVLDALDPPGPTLDPLDLLPYSETRLDALDSFGSTRGSLDKPDSFMEETNSQDHRPPSGAQKPAPSPEPCMPNTALLIKNPLAATHEFKQACQLCYPKTGPRAGDYTYREGLEHKCKRDILLGRLRSSEDQTWKRIRPRPTKTSFVGSYYLCKDMINKQDCKYGDNCTFAYHQEEIDVWTEERKGTLNRDLLFDPLGGVKRGSLTIAKLLKEHQGIFTFLCEICFDSKPRIISKGTKDSPSVCSNLAAKHSFYNNKCLVHIVRSTSLKYSKIRQFQEHFQFDVCRHEVRYGCLREDSCHFAHSFIELKVWLLQQYSGMTHEDIVQESKKYWQQMEAHAGKASSSMGAPRTHGPSTFDLQMKFVCGQCWRNGQVVEPDKDLKYCSAKARHCWTKERRVLLVMSKAKRKWVSVRPLPSIRNFPQQYDLCIHAQNGRKCQYVGNCSFAHSPEERDMWTFMKENKILDMQQTYDMWLKKHNPGKPGEGTPISSREGEKQIQMPTDYADIMMGYHCWLCGKNSNSKKQWQQHIQSEKHKEKVFTSDSDASGWAFRFPMGEFRLCDRLQKGKACPDGDKCRCAHGQEELNEWLDRREVLKQKLAKARKDMLLCPRDDDFGKYNFLLQEDGDLAGATPEAPAAAATATTGE

SEQ ID NO: 6887 - protein, 3667 aa, Homo sapiens
MWSWFLCWKPVQLDRQTASGFIYTCGGTLKGLNGTIESPGFPYGYPNGANCTWVIIAEERNRIQIVFQSFALEEEYDYLSLYDGHPHPTNFRTRLTGFHLPPPVTSTKSVFSLRLTSDFAVSAHGFKVYYEELQSSSCGNPGVPPKGVLYGTRFDVGDKIRYSCVTGYILDGHPQLTCIANSVNTASWDFPVPICRAEDACGGTMRGSSGIISSPSFPNEYHNNADCTWTIVAEPGDTISLIFTDFQMEEKYDYLEIEGSEPPTIWLSGMNIPPPIISNKNWLRLHFVTDSNHRYRGFSAPYQGSSTLTHTTSTGELEEHNRTTTGAIAVASTPADVTVSSVTAVTIHRLSEEQRVQVTSLRNSGLDPNTSKDGLSPHPADTQSTRRRPRHAEQIERTKELAVVTHRVKKAIDFKSRGFKLFPGKDNSNKFSILNEGGIKTASNLCPDPGEPENGKRIGSDFSLGSTVQFSCDEDYVLQGAKSITCQRIAEVFAAWSDHRPVCKVKTCGSNLQGPSGTFTSPNFPFQYDSNAQCVWVITAVNTNKVIQINFEEFDLEIGYDTLTIGDGGEVGDPRTVLQVLTGSFVPDLIVSMSSQMWLHLQTDESVGSVGFKVNYKEIEKESCGDPGTPLYGIREGDGFSNRDVLRFECQFGFELIGEKSIVCQENNQWSANIPICIFPCLSNFTAPMGTVLSPDYPEGYGNNLNCIWTIISDPGSRIHLSFNDFDLESQFDFLAVKDGDSPESPILGTFTGAEVPSHLTSNSHILRLEFQADHSMSGRGFNITYNTFGHNECPDPGIPINARRFGDNFQLGSSISVICEEGFIKTQGTETITCILMDGKVMWSGLIPKCGAPCGGHFSAPSGVILSPGWPGYYKDSLNCEWVIEAEPGHSIKITFERFQTELNYDVLEVHDGPNLLSPLLGSYNGTQVPQFLFSSSNFIYLLFTTDNSRSNNGFKIHYESVTVNTYSCLDPGIPVHGRRYGHDFSIGSTVSFSCDSGYRLSHEEPLLCEKNHWWSHPLPTCDALCGGDVRGPSGTILSPGYPEFYPNSLNCTWTVDVTHGKGVQFNFHTFHLEDHHDYLLITENGSFTQPLARLTGSDLPPTINAGLYGNFRAQLRFISDFSISYEGFNITFSEYNLEPCEDPGIPQYGSRIGFNFGIGDTLTFSCSSGYRLEGTSEIICLGGGRRVWSAPLPRCVAECGASATNNEGILLSPNYPLNYENNHECIYSIQVQAGKGINISARTFHLAQGDVLKIYDGKDKTTHLLGAFTGASMRGLTLSSTSNQLWLEFNSDTEGTDEGFQLVYTSFELSHCEDPGIPQFGYKISDQGHFAGSTIIYGCNPGYTLHGSSLLKCMTGERRAWDYPLPSCIAECGGRFKGESSGRILSPGYPFPYDNNLRCMWMIEVDPGNIVSLQFLAFDTEASHDILRVWDGPPENDMLLKEISGSLIPEGIHSTLNIVTIQFDTDFYISKSGFAIQFSSSVATACRDPGVPMNGTRNGDGREPGDTVVFQCDPGYELQGEERITCIQVENRYFWQPSPPVCIAPCGGNLTGSSGFILSPNFPHPYPHSRDCDWTITVNADYVISLAFISFSIEPNYDFLYIYDGPDSNSPLIGSFQDSKLPERIESSSNTMHLAFRSDGSVSYTGFHLEYKAKLRESCFDPGNIMNGTRLGMDYKLGSTVTYYCDAGYVLQGYSTLTCIMGDDGRPGWNRALPSCHAPCGSRSTGSEGTVLSPNYPKNYSVGHNCVYSIAVPKEFVVFGQFVFFQTSLHDVVEVYDGPTQQSSLLSSLSGSHSGESLPLSSGNQITIRFTSVGPITAKGFHFVYQAVPRTSSTQCSSVPEPRFGRRIGNEFAVGSSVLFDCNPGYILHGSIAIRCETVPNSLAQWNDSLPTCIVPCGGILTKRKGTILSPGYPEPYDNNLNCVWKITVPEGAGIQVQVVSFATEHNWDSLDFYDGGDNNAPRLGSYSGTTIPHLLNSTSNNLYLNFQSDISVSAAGFHLEYTAIGLDSCPEPQTPSSGIKIGDRYMVGDVVSFQCDQGYSLQGHSHITCMPGPVRRWNYPIPICLAQCGGAMSDFSGVILSPGFPGNYPSSLDCTWTINLPIGFGVHLQFVNFSTETIHDYLEVRSGSSETSTVIGRLSGPQIPSSLFSTTHETSLYFHSDYSQNKQGFHIVYQAYQLQSCPDPRPFRNGFVIGNDFTVGQTISFECFPGYTLIGNSALTCLHGVSRNWNHPLPRCEALCGGNITAMNGTIYSPGYPDEYPNFQDCFWLVRVPPGNGIYINFTVLQTEPIYDFITVWDGPDQNSPQIGQFSGNTALESVYSTSNQILIKFHSDFTTSGFFVLSYHAYQLRVCQPPPPVPNAEILTEDDEFEIGDIIRYQCLPGFTLVGNAILTCRLGERLQMDGAPPVCQVLCPANELRLDSTGVILSPGYPDSYPNLQMCAWSISVEKGYNITMFVEFFQTEKEFDVLQVYDGPNIQSPVLISLSGDYSSAFNITSNGHEVFLQWSADHGNNKKGFRIRYIAFYCSTPESPPHGYIISQTGGQLNSVVRWACDRGFRLVGKSSAVCRKSSYGYHAWDAPVPACQAISCGIPKAPTNGGILTTDYLVGTRVTYFCNDGYRLSSKELTTAVCQSDGTWSNHNKTPRCVVVTCPSINSFILEHGRWRIVNGSHYEYKTKVVFSCDPGYHGLGPASIECLPNGTWSWRNERPYCQIISCGELPTPPNGNKIGTQTSYGSTAIFTCDLGFMLVGSAVRECLSSGLWSESETRCLAGHCGIPELIVNGQVIGENYGYRDTVVYQCNPGFRLIGSSVRICQQDHNWSGQLPSCVPVSCGHPGSPIYGRTSGNGFNFNDVVTFSCNIGYLMQGPTKAQCQANRQWSHPPPMCKVVNCSDPGIPANSKRESKIEHGNFTYGTVVFYDCNPGYFLFGSSVLICQPNGQWDKPLPECIMIDCGHPGVPPNAVLSGEKYTFGSTVHYSCTGKRSLLGQSSRTCQLNGHWSGSQPHCSGDATGTCGDPGTPGHGSRQESNFRTKSTVRYACDTGYILHGSEERTCLANGSWTGRQPECKAVQCGNPGTTANGKVFRIDGTTFSSSVIYSCMEGYILSGPSVRQCTANGTWSGTLPNCTIISCGDPGIPANGLRYGDDYVVGQNVSYMCQPGYTMELNGSRIRTCTINGTWSGVMPTCRAVTCPTPPQISNGRLEGTNFDWGFSISYICSPGYELSFPAVLTCVGNGTWSGEVPQCLPKFCGDPGIPAQGKREGKSFIYQSEVSFSCNFPFILVGSSTRICQADGTWSGSSPHCIEPTQTSCENPGVPRHGSQNNTFGFQVGSVVQFHCKKGHLLQGSTTRTCLPDLTWSGIQPECIPHSCKQPETPAHANVVGMDLPSHGYTLIYTCQPGFFLAGGTEHRVCRSDNTWTGKVPICEAGSKILVKDPRPALGTPSPKLSVPDDVFAQNYIWKGSYNFKGRKQPMTLTVTSFNASTGRVNATLSNSNMELLLSGVYKSQEARLMLRIYLIKVPAHASVKKMKEENWAMDGFVSAEPDGATYVFQGFIQGKDYGQFGLQRLGLNMSEGSNSSNQPHGTNSSSVAIAILVPFFALIFAGFGFYLYKQRTAPKTQYTGCSVHENNNGQAAFENPMYDTNAKSVEGKAVRFDPNLNTVCTMV

SEQ ID NO: 6888 - protein, 846 aa, Homo sapiens
MKMADRSGKIIPGQVYIEVEYDYEYEAKDRKIVIKQGERYILVKKTNDDWWQVKPDENSKAFYVPAQYVKEVTRKALMPPVKQVAGLPNNSTKIMQSLHLQRSTENVNKLPELSSFGKPSSSVQGTGLIRDANQNFGPSYNQGQTVNLSLDLTHNNGKFNNDSHSPKVSSQNRTRSFGHFPGPEFLDVEKTSFSQEQSCDSAGEGSERIHQDSESGDELSSSSTEQIRATTPPNQGRPDSPVYANLQELKISQSALPPLPGSPAIQINGEWETHKDSSGRCYYYNRGTQERTWKPPRWTRDASISKGDFQNPGDQELLSSEENYYSTSYSQSDSQCGSPPRGWSEELDERGHTLYTSDYTNEKWLKHVDDQGRQYYYSADGSRSEWELPKYNASSQQQREIIKSRSLDRRLQEPIVLTKWRHSTIVLDTNDKESPTASKPCFPENESSPSSPKHQDTASSPKDQEKYGLLNVTKIAENGKKVRKNWLSSWAVLQGSSLLFTKTQGSSTSWFGSNQSKPEFTVDLKGATIEMASKDKSSKKNVFELKTRQGTELLIQSDNDTVINDWFKVLSSTINNQAVETDEGIEEEIPDSPGIEKHDKEKEQKDPKKLRSFKVSSIDSSEQKKTKKNLKKFLTRRPTLQAVREKGYIKDQVFGSNLANLCQRENGTVPKFVKLCIEHVEEHGLDIDGIYRVSGNLAVIQKLRFAVNHDEKLDLNDSKWEDIHVITGALKMFFRELPEPLFTFNHFNDFVNAIKQEPRQRVAAVKDLIRQLPKPNQDTMQILFRHLRRVIENGEKNRMTYQSIAIVFGPTLLKPEKETGNIAVHTVYQNQIVELILLELSSIFGR

SEQ ID NO: 6889 - protein, 1029 aa, Homo sapiens
MTRENVAHNALRQEGLVKGKDDTWKWGTSFQGSSSSVWETSHLHFRQLRYHETSGPQEALSRLRELCRRWLRPEARTKAQILELLVLEQFLSILPGEIRTWVQLHHPGSGEEAVALVEELQKDLDGPAIQVPVLVKDQDTLQKVVSAPGTTLPPVLPGSHIAAEICPHPPTDLVAFNLQDPQHDSPAPEASALSQEENPRNQLMALMLLTAQPQELVMFEEVSVCFTSEEWACLGPIQRALYWDVMLENYGNVTSLEWETMTENEEVTSKPSSSQRADSHKGTSKRLQGSVPQVLDFEEECEWQVLASQWGNETDERADTVKKVSLCERDKKKRTPPEKQGQKWKELGDSLTFGSAISESLIGTEGKKFYKCDMCCKHFNKISHLINHRRIHTGEKPHKCKECGKGFIQRSSLLMHLRNHSGEKPYKCNECGKAFSQSAYLLNHQRIHTGEKPYKCKECGKGFYRHSGLIIHLRRHSGERPYKCNECGKVFSQNAYLIDHQRLHKGEEPYKCNKCQKAFILKKSLILHQRIHSGEKPYKCDECGKTFAQTTYLIDHQRLHSAENPYKCKECGKVFIRSKSLLLHQRVHTEKKTFGCKKCGKIFSSKSNFIDHKRMHSREKPYKCTECGKAFTQSAYLFDHQRLHNGEKPYECNECGKVFILKKSLILHQRFHTGENLYECKDCGKVFGSNRNLIDHERLHNGEKPYECRECGKTFIMSKSFMVHQKLHTQEKAYKCEDCGKAFSYNSSLLVHRRIHTGEKPFECSECGRAFSSNRNLIEHKRIHSGEKPYECDECGKCFILKKSLIGHQRIHTREKSYKCNDCGKVFSYRSNLIAHQRIHTGEKPYACSECGKGFTYNRNLIEHQRIHSGEKTYECHVCRKVLTSSRNLMVHQRIHTGEKPYKCNECGKDFSQNKNLVVHQRMHTGEKPYECDKCRKSFTSKRNLVGHQRIHTGEKPYGCNDCSKVFRQRKNLTVHQKIHTDEKPCECDVSEKEFSQTSNLHLQQKIHTIEEFSWLQNTNESKIEIQKI

SEQ ID NO: 6890 - protein, 595 aa, Homo sapiens
MVGVPGAAAFQLGPEKRVPAMPGSPVEVKIQSRSSPPTMPPLPPINPGGPRPVSFTPTALSNGINHSPPTLNGAPSPPQRFSNGPASSTSSALTNQQLPATCGARQLSKLKRFLTTLQQFGNDISPEIGEKVRTLVLALVNSTVTIEEFHCKLQEATNFPLRPFVIPFLKANLPLLQRELLHCARAAKQTPSQYLAQHEHLLLNTSIASPADSSELLMEVHGNGKRPSPERREENSFDRDTIAPEPPAKRVCTISPAPRHSPALTVPLMNPGGQFHPTPPPLQHYTLEDIATSHLYREPNKMLEHREVRDRHHSLGLNGGYQDELVDHRLTEREWADEWKHLDHALNCIMEMVEKTRRSMAVLRRCQESDREELNYWKRRYNENTELRKTGTELVSRQHSPGSADSLSNDSQREFNSRPGTGYVPVEFWKKTEEAVNKVKIQAMSEVQKAVAEAEQKAFEVIATERARMEQTIADVKRQAAEDAFLVINEQEESTENCWNCGRKASETCSGCNIARYCGSFCQHKDWERHHRLCGQNLHGQSPHGQGRPLLPVGRGSSARSADCSVPSPALDKTSATTSRSSTPASVTAIDTNGL

SEQ ID NO: 6891 - protein, 1857 aa, Homo sapiens
MEQLTTLPRPGDPGAMEPWALPTWHSWTPGRGGEPSSAAPSIADTPPAALQLQELRSEESSKPKGDGSSRPVGGTDPEGAEACLPSLGQQASSSGPACQRPEDEEVEAFLKAKLNMSFGDRPNLELLRALGELRQRCAILKEENQMLRKSSFPETEEKVRRLKRKNAELAVIAKRLEERARKLQETNLRVVSAPLPRPGTSLELCRKALARQRARDLSETASALLAKDKQIAALQRECRELQARLTLVGKEGPQWLHVRDFDRLLRESQREVLRLQRQIALRNQRETLPLPPSWPPGPALQARAGAPAPGAPGEATPQEDADNLPVILGEPEKEQRVQQLESELSKKRKKCESLEQEARKKQRRCEELELQLRQAQNENARLVEENSRLSGRATEKEQVEWENAELRGQLLGVTQERDSALRKSQGLQSKLESLEQVLKHMREVAQRRQQLEVEHEQARLSLREKQEEVRRLQQAQAEAQREHEGAVQLLESTLDSMQARVRELEEQCRSQTEQFSLLAQELQAFRLHPGPLDLLTSALDCGSLGDCPPPPCCCSIPQPCRGSGPKDLDLPPGSPGRCTPKSSEPAPATLTGVPRRTAKKAESLSNSSHSESIHNSPKSCPTPEVDTASEVEELEADSVSLLPAAPEGSRGGARIQVFLARYSYNPFEGPNENPEAELPLTAGEYIYIYGNMDEDGFFEGELMDGRRGLVPSNFVERVSDDDLLTSLPPELADLSHSSGPELSFLSVGGGGSSSGGQSSVGRSQPRPEEEDAGDELSLSPSPEGLGEPPAVPYPRRLVVLKQLAHSVVLAWEPPPEQVELHGFHICVNGELRQALGPGAPPKAVLENLDLWAGPLHISVQALTSRGSSDPLRCCLAVGARAGVVPSQLRVHRLTATSAEITWVPGNSNLAHAIYLNGEECPPASPSTYWATFCHLRPGTPYQAQVEAQLPPQGPWEPGWERLEQRAATLQFTTLPAGPPDAPLDVQIEPGPSPGILIISWLPVTIDAAGTSNGVRVTGYAIYADGQKIMEVASPTAGSVLVELSQLQLLQVCREVVVRTMSPHGESADSIPAPITPALAPASLPARVSCPSPHPSPEARAPLASASPGPGDPSSPLQHPAPLGTQEPPGAPPASPSREMAKGSHEDPPAPCSQEEAGAAVLGTSEERTASTSTLGEKDPGPAAPSLAKQEAEWTAGEACPASSSTQGARAQQAPNTEMCQGGDPGSGLRPRAEKEDTAELGVHLVNSLVDHGRNSDLSDIQEEEEEEEEEEEEELGSRTCSFQKQVAGNSIRENGAKSQPDPFCETDSDEEILEQILELPLQQFCSKKLFSIPEEEEEEEEDEEEEKSGAGCSSRDPGPPEPALLGLGCDSGQPRRPGQCPLSPESSRAGDCLEDMPGLVGGSSRRRGGGSPEKPPSRRRPPDPREHCSRLLSNNGPQASGRLGPTRERGGLPVIEGPRTGLEASGRGRLGPSRRCSRGRALEPGLASCLSPKCLEISIEYDSEDEQEAGSGGISITSSCYPGDGEAWGTATVGRPRGPPKANSGPKPYPRLPAWEKGEPERRGRSATGRAKEPLSRATETGEARGQDGSGRRGPQKRGVRVLRPSTAELVPARSPSETLAYQHLPVRIFVALFDYDPVSMSPNPDAGEEELPFREGQILKVFGDKDADGFYQGEGGGRTGYIPCNMVAEVAVDSPAGRQQLLQRGYLSPDILLEGSGNGPFVYSTAHTTGPPPKPRRSKKAESEGPAQPCPGPPKLVPSADLKAPHSMVAAFDYNPQESSPNMDVEAELPFRAGDVITVFGGMDDDGFYYGELNGQRGLVPSNFLEGPGPEAGGLDREPRTPQAESQRTRRRRVQC

SEQ ID NO: 6892 - protein, 511 aa, Homo sapiens
MGVLKFKHIFFRSFVKSSGVSQIVFTFLLIPCCLTLNFRAPPVIPNVPFLWAWNAPSEFCLGKFDEPLDMSLFSFIGSPRINATGQGVTIFYVDRLGYYPYIDSITGVTVNGGIPQKISLQDHLDKAKKDITFYMPVDNLGMAVIDWEEWRPTWARNWKPKDVYKNRSIELVQQQNVQLSLTEATEKAKQEFEKAGKDFLVETIKLGKLLRPNHLWGYYLFPDCYNHHYKKPGYNGSCFNVEIKRNDDLSWLWNESTALYPSIYLNTQQSPVAATLYVRNRVREAIRVSKIPDAKSPLPVFAYTRIVFTDQVLKFLSQDELVYTFGETVALGASGIVIWGTLSIMRSMKSCLLLDNYMETILNPYIINVTLAAKMCSQVLCQEQGVCIRKNWNSSDYLHLNPDNFAIQLEKGGKFTVRGKPTLEDLEQFSEKFYCSCYSTLSCKEKADVKDTDAVDVCIADGVCIDAFLKPPMETEEPQIFYNASPSTLSATMFIWRLEVWDQGISRIGFF

SEQ ID NO: 6893 - protein, 308 aa, Homo sapiens
MRPWTGSWRWIMLILFAWGTLLFYIGGHLVRDNDHPDHSSRELSKILAKLERLKQQNEDLRRMAESLRIPEGPIDQGPAIGRVRVLEEQLVKAKEQIENYKKQTRNGLGKDHEILRRRIENGAKELWFFLQSELKKLKNLEGNELQRHADEFLLDLGHHERSIMTDLYYLSQTDGAGDWREKEAKDLTELVQRRITYLQNPKDCSKAKKLVCNINKGCGYGCQLHHVVYCFMIAYGTQRTLILESQNWRYATGGWETVFRPVSETCTDRSGISTGHWSGTPIMNLLVITLFPGQLDCTIDTQKIHFVE

SEQ ID NO: 6894 - protein, 266 aa, Homo sapiens
MNWAFLQGLLSGVNKYSTVLSRIWLSVVFIFRVLVYVVAAEEVWDDEQKDFVCNTKQPGCPNVCYDEFFPVSHVRLWALQLILVTCPSLLVVMHVAYREERERKHHLKHGPNAPSLYDNLSKKRGGLWWTYLLSLIFKAAVDAGFLYIFHRLYKDYDMPRVVACSVEPCPHTVDCYISRPTEKKVFTYFMVTTAAICILLNLSEVFYLVGKRCMEIFGPRHRRPRCRECLPDTCPPYVLSQGGHPEDGNSVLMKAGSAPVDAGGYP

SEQ ID NO: 6895 - protein, 764 aa, Homo sapiens
MIEPFGNQYIVARPVYSTNAFEENHKKTGRHHKTFLDHLKVCCSCSPQKAKRIVLSLFPIASWLPAYRLKEWLLSDIVSGISTGIVAVLQGLAFALLVDIPPVYGLYASFFPAIIYLFFGTSRHISVGPFPILSMMVGLAVSGAVSKAVPDRNATTLGLPNNSNNSSLLDDERVRVAAAASVTVLSGIIQLAFGILRIGFVVIYLSESLISGFTTAAAVHVLVSQLKFIFQLTVPSHTDPVSIFKVLYSVFSQIEKTNIADLVTALIVLLVVSIVKEINQRFKDKLPVPIPIEFIMTVIAAGVSYGCDFKNRFKVAVVGDMNPGFQPPITPDVETFQNTVGDCFGIAMVAFAVAFSVASVYSLKYDYPLDGNQELIALGLGNIVCGVFRGFAGSTALSRSAVQESTGGKTQIAGLIGAIIVLIVVLAIGFLLAPLQKSVLAALALGNLKGMLMQFAEIGRLWRKDKYDCLIWIMTFIFTIVLGLGLGLAASVAFQLLTIVFRTQFPKCSTLANIGRTNIYKNKKDYYDMYEPEGVKIFRCPSPIYFANIGFFRRKLIDAVGFSPLRILRKRNKALRKIRKLQKQGLLQVTPKGFICTVDTIKDSDEELDNNQIEVLDQPINTTDLPFHIDWNDDLPLNIEVPKISLHSLILDFSAVSFLDVSSVRGLKSILQEFIRIKVDVYIVGTDDDFIEKLNRYEFFDGEVKSSIFFLTIHDAVLHILMKKDYSTSKFNPSQEKDGKIDFTINTNGGLRNRVYEVPVETKF

SEQ ID NO: 6896 - protein, 709 aa, Homo sapiens
MTSGSVFFYILIFGKYFSHGGGQDVKCSLGYFPCGNITKCLPQLLHCNGVDDCGNQADEDNCGDNNGWSLQFDKYFASYYKMTSQYPFEAETPECLVGSVPVQCLCQGLELDCDETNLRAVPSVSSNVTAMSLQWNLIRKLPPDCFKNYHDLQKLYLQNNKITSISIYAFRGLNSLTKLYLSHNRITFLKPGVFEDLHRLEWLIIEDNHLSRISPPTFYGLNSLILLVLMNNVLTRLPDKPLCQHMPRLHWLDLEGNHIHNLRNLTFISCSNLTVLVMRKNKINHLNENTFAPLQKLDEFSLEGIEISNIQQRMFRPLMNLSHIYFKKFQYCGYAPHVRSCKPNTDGISSLENLLASIIQRVFVWVVSAVTCFGNIFVICMRPYIRSENKLYAMSIISLCCADCLMGIYLFVIGGFDLKFRGEYNKHAQLWMESTHCQLVGSLAILSTEVSVLLLTFLTLEKYICIVYPFRCVRPGKCRTITVLILIWITGFIVAFIPLSNKEFFKNYYGTNGVCFPLHSEDTESIGAQIYSVAIFLGINLAAFIIIVFSYGSMFYSVHQSAITATEIRNQVKKEMILAKRFFFIVFTDALCWIPIFVVKFLSLLQVEIPGTITSWVVIFILPINSALNPILYTLTTRPFKEMIHRFWYNYRQRKSMDSKGQKTYAPSFIWVEMWPLQEMPPELMKPDLFTYPCEMSLISQSTRLNSYS

SEQ ID NO: 6897 - protein, 1043 aa, Homo sapiens
MPVRGDRGFPPRRELSGWLRAPGMEELIWEQYTVTLQKDSKRGFGIAVSGGRDNPHFENGETSIVISDVLPGGPADGLLQENDRVVMVNGTPMEDVLHSFAVQQLRKSGKVAAIVVKRPRKVQVAALQASPPLDQDDRAFEVMDEFDGRSFRSGYSERSRLNSHGGRSRSWEDSPERGRPHERARSRERDLSRDRSRGRSLERGLDQDHARTRDRSRGRSLERGLDHDFGPSRDRDRDRSRGRSIDQDYERAYHRAYDPDYERAYSPEYRRGARHDARSRGPRSRSREHPHSRSPSPEPRGRPGPIGVLLMKSRANEEYGLRLGSQIFVKEMTRTGLATKDGNLHEGDIILKINGTVTENMSLTDARKLIEKSRGKLQLVVLRDSQQTLINIPSLNDSDSEIEDISEIESNRSFSPEERRHQYSDYDYHSSSEKLKERPSSREDTPSRLSRMGATPTPFKSTGDIAGTVVPETNKEPRYQEDPPAPQPKAAPRTFLRPSPEDEAIYGPNTKMVRFKKGDSVGLRLAGGNDVGIFVAGIQEGTSAEQEGLQEGDQILKVNTQDFRGLVREDAVLYLLEIPKGEMVTILAQSRADVYRDILACGRGDSFFIRSHFECEKETPQSLAFTRGEVFRVVDTLYDGKLGNWLAVRIGNELEKGLIPNKSRAEQMASVQNAQRDNAGDRADFWRMRGQRSGVKKNLRKSREDLTAVVSVSTKFPAYERVLLREAGFKRPVVLFGPIADIAMEKLANELPDWFQTAKTEPKDAGSEKSTGVVRLNTVRQIIEQDKHALLDVTPKAVDLLNYTQWFPIVIFFNPDSRQGVKTMRQRLNPTSNKSSRKLFDQANKLKKTCAHLFTATINLNSANDSWFGSLKDTIQHQQGEAVWVSEGKMEGMDDDPEDRMSYLTAMGADYLSCDSRLISDFEDTDGEGGAYTDNELDEPAEEPLVSSITRSSEPVQHEEIEIAQKHPDIYAVPIKTHKPDPGTPQHTSSRPPEPQKAPSRPYQDTRGSYGSDAEEEEYRQQLSEHSKRGYYGQSARYRDTEL

SEQ ID NO: 6898 - protein, 571 aa, Homo sapiens
MAEEGAILKVTKDLRAAVSAILQGYGDGQGPVTDTSAELHRLCGCLELLLQFDQKEQKSFLGPRKDYWDFLCTALRRQRGNMEPIHFVRSQDKLKTPLGKGRAFIRFCLARGQLAEALQLCLLNSELTREWYGPRSPLLCPERQEDILDSLYALNGVAFELDLQQPDLDGAWPMFSESRCSSSTQTQGRRPRKNKDAPKKIPAAYGGPENVQIEDSHTSQAICLQDAPSGQQLAGLPRSQQQRHLPFFLEKKGESSRKHRYPQSMWEPEGKELQLDQEERAPWIEIFLGNSTPSTQGQGKGAMGTQKEVIGMEAEVTGVLLVAEGQRTTEGTHKKEAEWSHVQRLLMPSPRGAVEGAVSGSRQGSGGSSILGEPWVLQGHATKEDSTVENPQVQTEVTLVARREEQAEVSLQDEIKSLRLGLRKAEEQAQRQEQLLREQEGELQALREQLSRCQEERAELQAQLEQKQQEAERRDAMYQEELGGQRDLVQAMKRRVLELIQEKDRLWQRLQHLSSMAPECCVACSKIFGRFSRRYPCRLCGGLLCHACSMDYKKRDRCCPPCAQGREAQVT

SEQ ID NO: 6899 - protein, 353 aa, Homo sapiens
MQGAQEASASEMLPLLLPLLWAGALAQERRFQLEGPESLTVQEGLCVLVPCRLPTTLPASYYGYGYWFLEGADVPVATNDPDEEVQEETRGRFHLLWDPRRKNCSLSIRDARRRDNAAYFFRLKSKWMKYGYTSSKLSVRVMALTHRPNISIPGTLESGHPSNLTCSVPWVCEQGTPPIFSWMSAAPTSLGPRTTQSSVLTITPRPQDHSTNLTCQVTFPGAGVTMERTIQLNVSYAPQKVAISIFQGNSAAFKILQNTSSLPVLEGQALRLLCDADGNPPAHLSWFQGFPALNATPISNTGVLELPQVGSAEEGDFTCRAQHPLGSLQISLSLFVHWSSAPVPDRHSFRPPC

SEQ ID NO: 6900 - protein, 1721 aa, Homo sapiens
MLSATPLYGNVHSWMNSERVRMCGASEDRKILVNDGDASKARLELREENPLNHNVVDASTAHRIDGLAALSMDRTGLIREGLRVPGNIVYSSLCGLGSEKGREAATSTLGGLGFSSERNPEMQFKPNTPETVEASAVSGKPPNGFSAIYKTPPGIQKSAVATAEALGLDRPASDKQSPLNINGASYLRLPWVNPYMEGATPAIYPFLDSPNKYSLNMYKALLPQQSYSLAQPLYSPVCTNGERFLYLPPPHYVGPHIPSSLASPMRLSTPSASPAIPPLVHCADKSLPWKMGVSPGNPVDSHAYPHIQNSKQPRVPSAKAVTSGLPGDTALLLPPSPRPSPRVHLPTQPAADTYSEFHKHYARISTSPSVALSKPYMTVSSEFPAARLSNGKYPKAPEGGEGAQPVPGHARKTAVQDRKDGSSPPLLEKQTVTKDVTDKPLDLSSKVVDVDASKADHMKKMAPTVLVHSRAGSGLVLSGSEIPKETLSPPGNGCAIYRSEIISTAPSSWVVPGPSPNEENNGKSMSLKNKALDWAIPQQRSSSCPRMGGTDAVITNVSGSVSSAGRPASASPAPNANADGTKTSRSSVETTPSVIQHVGQPPATPAKHSSSTSSKGAKASNPEPSFKANENGLPPSSIFLSPNEAFRSPPIPYPRSYLPYPAPEGIAVSPLSLHGKGPVYPHPVLLPNGSLFPGHLAPKPGLPYGLPTGRPEFVTYQDALGLGMVHPMLIPHTPIEITKEEKPERRSRSHERARYEDPTLRNRFSEILETSSTKLHPDVPTDKNLKPNPNWNQGKTVVKSDKLVYVDLLREEPDAKTDTNVSKPSFAAESVGQSAEPPKPSVEPALQQHRDFIALREELGRISDFHETYTFKQPVFTVSKDSVLAGTNKENLGLPVSTPFLEPPLGSDGPAVTFGKTQEDPKPFCVGSAPPSVDVTPTYTKDGADEAESNDGKVLKPKPSKLAKRIANSAGYVGDRFKCVTTELYADSSQLSREQRALQMEGLQEDSILCLPAAYCERAMMRFSELEMKEREGGHPATKDSEMCKFSPADWERLKGNQDKKPKSVTLEEAIAEQNESERCEYSVGNKHRDPFEAPEDKDLPVEKYFVERQPVSEPPADQVASDMPHSPTLRVDRKRKVSGDSSHTETTAEEVPEDPLLKAKRRRVSKGLHPKKQRHLLHLRERWEQQVSAADGKPGRQSRKEVTQATQPEAIPQGTNITEEKPGRKRAEAKGNRSWSEESLKPSDNEQGLPVFSGSPPMKSLSSTSAGGKKQAQPSCAPASRPPAKQQKIKENQKTDVLCADEEEDCQAASLLQKYTDNSEKPSGKRLCKTKHLIPQESRRGLPLTGEYYVENADGKVTVRRFRKRPEPSSDYDLSPAKQEPKPFDRLQQLLPASQSTQLPCSSSPQETTQSRPMPPEARRLIVNKNAGETLLQRAARLGYEEVVLYCLENKICDVNHRDNAGYCALHEACARGWLNIVRHLLEYGADVNCSAQDGTRPLHDAVENDHLEIVRLLLSYGADPTLATYSGRTIMKMTHSELMEKFLTDYLNDLQGRNDDDASGTWDFYGSSVCEPDDESGYDVLANPPGPEDQDDDDDAYSDVFEFEFSETPLLPCYNIQVSVAQGPRNWLLLSDVLKKLKMSSRIFRCNFPNVEIVTIAEAEFYRQVSASLLFSCSKDLEAFNPESKELLDLVEFTNEIQTLLGSSVEWLHPSDLASDNYW

SEQ ID NO: 6901 - protein, 945 aa, Homo sapiens
IMLLTDPEIESSLLISSDEGATYQKYRLNFYIQSLLFHPKQEDWILAYSQDQKLYSSAEFGRRWQLIQEGVVPNRFYWSVMGSNKEPDLVHLEARTVDGHSHYLTCRMQNCTEANRNQPFPGYIDPDSLIVQDHYVFVQLTSGGRPHYYVSYRRNAFAQMKLPKYALPKDMHVISTDENQVFAAVQEWNQNDTYNLYISDTRGVYFTLALENVQSSRGPEGNIMIDLYEVAGIKGMFLANKKIDNQVKTFITYNKGRDWRLLQAPDTDLRGDPVHCLLPYCSLHLHLKVSENPYTSGIIASKDTAPSIIVASGNIGSELSDTDISMFVSSDAGNTWRQIFEEEHSVLYLDQGGVLVAMKHTSLPIRHLWLSFDEGRSWSKYSFTSIPLFVDGVLGEPGEETLIMTVFGHFSHRSEWQLVKVDYKSIFDRRCAEEDYRPWQLHSQGEACIMGAKRIYKKRKSERKCMQGKYAGAMESEPCVCTEADFDCDYGYERHSNGQCLPAFWFNPSSLSKDCSLGQSYLNSTGYRKVVSNNCTDGVREQYTAKPQKCPGKAPRGLRIVTADGKLTAEQGHNVTLMVQLEEGDVQRTLIQVDFGDGIAVSYVNLSSMEDGIKHVYQNVGIFRVTVQVDNSLGSDSAVLYLHVTCPLEHVHLSLPFVTTKNKEVNATAVLWPSQVGTLTYVWWYGNNTEPLITLEGSISFRFTSEGMNTITVQVSAGNAILQDTKTIAVYEEFRSLRLSFSPNLDDYNPDIPEWRRDIGRVIKKSLVEATGVPGQHILVAVLPGLPTTAELFVLPYQDPAGENKRSTDDLEQISELLIHTLNQNSVHFELKPGVRVLVHAAHLTAAPLVDLTPTHSGSAMLMLLSVVFVGLAVFVIYKFKRKIPGINVYAQMQNEKEQEMISPVSHSESRPNVPQTELRRPGQLIDEKVESQLIGRYRSTLQSL

SEQ ID NO: 6902 - protein, 728 aa, Homo sapiens
MEGEGVRNFKELRAKFQNLDAPPLPGPIKFPAGVSPKGDIGGTQSTQILANGKPLSSNHKQRTPYCSSSESQPLQPQKIKLAQKSEIPKCSNSPGPLGKSTVCSATSSQKASLLLEVTQSNVEIITKEKVMVANSFRNKLWNWEKVSSQKSEMSSALLLANYGSKAIHLEGQKGMGLTPEEPRKKLETKGAQTLPSQKHVVAPKILHNVSEDPSFVISQHIRKSWENPPPERSPASSPCQPIYECELASQAPEKQPDVRHHHLPKTKPLPSIDSLGPPPPKPSRPPIVNLQAFQRQPAAVPKTQGEVTVEEGSLSPERLFNAEFEEPHNYEATISYLRHSGNSINLCTAKEIADPTYEVGIEELQKPGKNFPYPEPSAKHEDKKMKEKQPCELKPKNTEKEPYSNHVFKVDACEGTPEKIQMTNVHTGRRNMLAGKQEAMIDIIQTNPCPEGPKLARHSQGHCGHLEVLESTKETPDLGVSKTSSISEEIYDDVEYSRKEVPKLNYSSSLASSSEENRELYEDVYKTKNNYPKIDLDGKEALKRLQQFFKKEKDRFKIKKTKSKENLSAFSILLPDLELKSQEVIIYDDVDLSEKESKDEDKLKMWKPKFLTPKEKKEKNGAEESESFSPRNFFKTKKQNLEKNRMKREEKLFRERFKYDKEIIVINTAVACSNNSRNGIFDLPISPGEELEVIDTTEQNLVICRNSKGKYGYVLIEHLDFKHQSWSP

SEQ ID NO: 6903 - protein, 705 aa, Homo sapiens
MRPSGTAGAALLALLAALCPASRALEEKKVCQGTSNKLTQLGTFEDHFLSLQRMFNNCEVVLGNLEITYVQRNYDLSFLKTIQEVAGYVLIALNTVERIPLENLQIIRGNMYYENSYALAVLSNYDANKTGLKELPMRNLQEILHGAVRFSNNPALCNVESIQWRDIVSSDFLSNMSMDFQNHLGSCQKCDPSCPNGSCWGAGEENCQKLTKIICAQQCSGRCRGKSPSDCCHNQCAAGCTGPRESDCLVCRKFRDEATCKDTCPPLMLYNPTTYQMDVNPEGKYSFGATCVKKCPRNYVVTDHGSCVRACGADSYEMEEDGVRKCKKCEGPCRKVCNGIGIGEFKDSLSINATNIKHFKNCTSISGDLHILPVAFRGDSFTHTPPLDPQELDILKTVKEITGFLLIQAWPENRTDLHAFENLEIIRGRTKQHGQFSLAVVSLNITSLGLRSLKEISDGDVIISGNKNLCYANTINWKKLFGTSGQKTKIISNRGENSCKATGQVCHALCSPEGCWGPEPRDCVSCRNVSRGRECVDKCNLLEGEPREFVENSECIQCHPECLPQAMNITCTGRGPDNCIQCAHYIDGPHCVKTCPAGVMGENNTLVWKYADAGHVCHLCHPNCTYGPGNESLKAMLFCLFKLSSCNQSNDGSVSHQSGSPAAQESCLGWIPSLLPSEFQLGWGGCSHLHAWPSASVIITASSCH

SEQ ID NO: 6904 - protein, 574 aa, Homo sapiens
MPPQLQETRMNRSIPVEVDESEPYPSQLLKPIPEYSPEEESEPPAPNIRNMAPNSLSAPTMLHNSSGDFSQAHSTLKLANHQRPVSRQVTCLRTQVLEDSEDSFCRRHPGLGKAFPSGCSAVSEPASESVVGALPAEHQFSFMEKRNQWLVSQLSAASPDTGHDSDKSDQSLPNASADSLGGSQEMVQRPQPHRNRAGLDLPTIDTGYDSQPQDVLGIRQLERPLPLTSVCYPQDLPRPLRSREFPQFEPQRYPACAQMLPPNLSPHAPWNYHYHCPGSPDHQVPYGHDYPRAAYQQVIQPALPGQPLPGASVRGLHPVQKVILNYPSPWDHEERPAQRDCSFPGLPRHQDQPHHQPPNRAGAPGESLECPAELRPQVPQPPSPAAVPRPPSNPPARGTLKTSNLPEELRKVFITYSMDTAMEVVKFVNFLLVNGFQTAIDIFEDRIRGIDIIKWMERYLRDKTVMIIVAISPKYKQDVEGAESQLDEDEHGLHTKYIHRMMQIEFIKQGSMNFRFIPVLFPNAKKEHVPTWLQNTHVYSWPKNKKNILLRLLREEEYVAPPRGPLPTLQVVPL

SEQ ID NO: 6905 - protein, 789 aa, Homo sapiens
METLLGGLLAFGMAFAVVDACPKYCVCQNLSESLGTLCPSKGLLFVPPDIDRRTVELRLGGNFIIHISRQDFANMTGLVDLTLSRNTISHIQPFSFLDLESLRSLHLDSNRLPSLGEDTLRGLVNLQHLIVNNNQLGGIADEAFEDFLLTLEDLDLSYNNLHGLPWDSVRRMVNLHQLSLDHNLLDHIAEGTFADLQKLARLDLTSNRLQKLPPDPIFARSQASALTATPFAPPLSFSFGGNPLHCNCELLWLRRLERDDDLETCGSPGGLKGRYFWHVREEEFVCEPPLITQHTHKLLVLEGQAATLKCKAIGDPSPLIHWVAPDDRLVGNSSRTAVYDNGTLDIFITTSQDSGAFTCIAANAAGEATAMVEVSIVQLPHLSNSTSRTAPPKSRLSDITGSSKTSRGGGGSGGGEPPKSPPERAVLVSEVTTTSALVKWSVSKSAPRVKMYQLQYNCSDDEVLIYRMIPASNKAFVVNNLVSGTGYDLCVLAMWDDTATTLTATNIVGCAQFFTKADYPQCQSMHSQILGGTMILVIGGIIVATLLVFIVILMVRYKVCNHEAPSKMAAAVSNVYSQTNGAQPPPPSSAPAGAPPQGPPKVVVRNELLDFTASLARASDSSSSSSLGSGEAAGLGRAPWRIPPSAPRPKPSLDRLMGAFASLDLKSQRKEELLDSRTPAGRGAGTSARGHHSDREPLLGPPAARARSLLPLPLEGKAKRSHSFDMGDFAAAAAGGVVPGGYSPPRKVSNIWTKRSLSVNGMLLPFEESDLVGARGTFGSSEWVMESTV

SEQ ID NO: 6906 - protein, 1693 aa, Homo sapiens
MADLEVYKNLSPEKVERCMSVMQSGTQMIKLKRGTKGLVRLFYLDEHRTRLRWRPSRKSEKAKILIDSIYKVTEGRQSEIFHRQAEGNFDPSCCFTIYHGNHMESLDLITSNPEEARTWITGLKYLMAGISDEDSLAKRQRTHDQWVKQTFEEADKNGDGLLNIEEIHQLMHKLNVNLPRRKVRQMFQEADTDENQGTLTFEEFCVFYKMMSLRRDLYLLLLSYSDKKDHLTVEELAQFLKVEQKMNNVTTDYCLDIIKKFEVSEENKVKNVLGIEGFTNFMRSPACDIFNPLHHEVYQDMDQPLCNYYIASSHNTYLTGDQLLSQSKVDMYARVLQEGCRCVEVDCWDGPDGEPVVHHGYTLTSKILFRDVVETINKHAFVKNEFPVILSIENHCSIQQQRKIAQYLKGIFGDKLDLSSVDTGECKQLPSPQSLKGKILVKGKKLPYHLGDDAEEGEVSDEDSADEIEDECKFKLHYSNGTTEHQVESFIRKKLESLLKESQIRDKEDPDSFTVRALLKATHEGLNAHLKQSPDVKESGKKSHGRSLMTNFGKHKKTTKSRSKSYSTDDEEDTQQSTGKEGGQLYRLGRRRKTMKLCRELSDLVVYTNSVAAQDIVDDGTTGNVLSFSETRAHQVVQQKSEQFMIYNQKQLTRIYPSAYRIDSSNFNPLPYWNAGCQLVALNYQSEGRMMQLNRAKFKANGNCGYVLKPQQMCKGTFNPFSGDPLPANPKKQLILKVISGQQLPKPPDSMFGDRGEIIDPFVEVEIIGLPVDCCKDQTRVVDDNGFNPVWEETLTFTVHMPEIALVRFLVWDHDPIGRDFVGQRTVTFSSLVPGYRHVYLEGLTEASIFVHITINEIYGKWSPLILNPSYTILHFLGATKNRQLQGLKGLFNKNPRHSSSENNSHYVRKRSIGDRILRRTASAPAKGRKKSKMGFQEMVEIKDSVSEATRDQDGVLRRTTRSLQARPVSMPVDRNLLGALSLPVSETAKDIEGKENSLAEDKDGRRKGKASIKDPHFLNFNKKLSSSSSALLHKDTSQGDTIVSTAHMSVTGEQLGMSSPRGGRTTSNATSNCQENPCPSKSLSPKQHLAPDPVVNPTQDLHGVKIKEKGNPEDFVEGKSILSGSVLSHSNLEIKNLEGNRGKGRAATSFSLSDVSMLCSDIPDLHSTAILQESVISHLIDNVTLTNENEPGSSISALIGQFDETNNQALTVVSHLHNTSVMSGHCPLPSLGLKMPIKHGFCKGKSKSSFLCSSPELIALSSSETTKHATNTVYETTCTPISKTKPDDDLSSKAKTAALESNLPGSPNTSRGWLPKSPTKGEDWETLKSCSPASSPDLTLEDVIADPTLCFNSGESSLVEIDGESENLSLTTCEYRREGTSQLASPLKLKYNQGVVEHFQRGLRNGYCKETLRPSVPEIFNNIQDVKTQSISYLAYQGAGFVHNHFSDSDAKMFQTCVPQQSSAQDMHVPVPKQLAHLPLPALKLPSPCKSKSLGDLTSEDIACNFESKYQCISKSFVTTGIRDKKGVTVKTKSLEPIDALTEQLRKLVSFDQEDNCQVLYSKQDANQLPRALVRKLSSRSQSRVRNIASRAKEKQEANKQKVPNPSNGAGVVLRNKPSAPTPAVNRHSTGSYIAGYLKNTKGGGLEGRGIPEGACTALHYGHVDQFCSDNSVLQTEPSSDDKPEIYFLLRL

SEQ ID NO: 6907 - protein, 403 aa, Homo sapiens
MSHRKFSAPRHGSLGFLPRKRSSRHRGKVKSFPKDDPSKPVHLTAFLGYKAGMTHIVREVDRPGSKVNKKEVVEAVTIVETPPMVVVGIVGYVETPRGLRTFKTVFAEHISDECKRRFYKNWHKSKKKAFTKYCKKWQDEDGKKQLEKDFSSMKKYCQVIRVIAHTQMRLLPLRQKKAHLMEIQVNGGTVAEKLDWARERLEQQVPVNQVFGQDEMIDVIGVTKGKGYKGVTSRWHTKKLPRKTHRGLRKVACIGAWHPARVAFSVARAGQKGYHHRTEINKKIYKIGQGYLIKDGKLIKNNASTDYDLSDKSINPLGGFVHYGEVTNDFVMLKGCVVGTKKRVLTLRKSLLVQTKRRALEKIDLKFIDTTSKFGHGRFQTMEEKKAFMGPLKKDRIAKEEGA

SEQ ID NO: 6908 - protein, 160 aa, Homo sapiens [sequence omitted]

SEQ ID NO: 6909 - protein, 357 aa, Homo sapiens
MGRQLAGCGDAGKKASFKMSTVHEILCKLSLEGDHSTPPSAYGSVKAYTNFDAERDALNIETAIKTKGVDEVTIVNILTNRSNAQRQDIAFAYQRRTKKELASALKSALSGHLETVILGLLKTPAQYDASELKASMKGLGTDEDSLIEIICSRTNQELQEINRVYKEMYKTDLEKDIISDTSGDFRKLMVALAKGRRAEDGSVIDYELIDQDARDLYDAGVKRKGTDVPKWISIMTERSVPHLQKVFDRYKSYSPYDMLESIRKEVKGDLENAFLNLVQCIQNKPLYFADRLYDSMKGKGTRDKVLIRIMVSRSEVDMLKIRSEFKRKYGKSLYYYIQQDTKGDYQKALLYLCGGDD

SEQ ID NO: 6910 - protein, 2096 aa, Homo sapiens
MCSTPGMPAPGASLALRVSFVDVHPDVIPVQLWGLVGERRGEYLRLSREIQEAAATRGQWALGSASASPGELCLVQVGLLWHRCRVVSRQAQESRVFLLDEGRTITAGAGSLAPGRREFFNLPSEVLGCVLAGLVPAGCGAGSGEPPQHWPADAVDFLSNLQGKEVHGCVLDVLLLHRLVLLEVPDVFQQMRELGLARRVPDSLFRSLLERYLTAATASVGSGVPVLSRVPLKQKQPGLDYFYPQLQLGVTEAVVITQVCHPHRIHCQLRSVSQEIHRLSESMAQVYRGSTGTGDENSTSATWEEREESPDKPGSPCASCGLDGHWYRALLLETFRPQRCAQVLHVDYGRKELVSCSSLRYLLPEYFRMPVVTYPCALYGLWDGGRGWSRSQVGDLKTLILGKAVNAKIEFYCSFEHVYYVSLYGEDGINLNRVFGVQSCCLADRVLQSQATEEEEPETSQSQSPAEEVDEEISLPALRSIRLKMNAFYDAQVEFVKNPSEFWIRLRKHNVTFSKLMRRMCGFYSSASKLDGVVLKPEPDDLCCVKWKENGYYRAIVTKLDDKSVDVFLVDRGNSENVDWYDVRMLLPQFRQLPILAVKCTLADIWPLGKTWSQEAVSFFKKTVLHKELVIHILDKQDHQYVIEILDESRTGEENISKVIAQAGYAKYQEFETKENILVNAHSPGHVSNHFTTESNKIPFAKTGEGEQKAKRENKTTSVSKALSDTTVVTNGSTELVVQEKVKRASVYFPLMQNCLEIKPGSSSKGELEVGSTVEVRVSYVENPGYFWCQLTRNIQGLKTLMSDIQYYCKNTAAPHQRNTLACLAKRTVNRQWSRALISGIQSVEHVNVTFVDYGDREMVSVKNIYSISEEFLKVKAQAFRCSLYNLIQPVGQNPFVWDVKAIQAFNEFIDNAWQKNLELKCTIFALASINEELFNIVDLLTPFQSACHFLVEKRLARPVKLQKPLESSVQLHSYFYSTHDMKIGSEELVYITHIDDPWTFYCQLARNANILEQLSCSITQLSKVLLNLKTSPLNPGTLCLAKYTDGNWYRGIVIEKEPKKVFFVDFGNIYVVTSDDLLPIPSDAYDVLLLPMQAVRCSLSDIPDHIPEEVVVWFQETILDKSLKALVVAKDPDGTLIIELYGDNIQISASINKKLGLLSYKDRIRKKESEVLCSTTETLEEKNENMKLPCTEYLSKSVGYKLPNKEILEESYKPQINSSYKELKLLQSLTKTNLVTQYQDSVGNKNSQVFPLTTEKKEEISAETPLKTARVEATLSERKIGDSCDKDLPLKFCEFPQKTIMPGFKTTVYVSHINDLSDFYVQLIEDEAEISHLSERLNSVKTRPEYYVGPPLQRGDMICAVFPEDNLWYRAVIKEQQPNDLLSVQFIDYGNVSVVHTNKIGRLDLVNAILPGLCIHCSLQGFEVPDNKNSKKMMHYFSQRTSEAAIRCEFVKFQDRWEVILADEHGIIADDMISRYALSEKSQVELSTQVIKSASSKSVNKSDIDTSVFLNWYNPEKKMIRAYATVIDGPEYFWCQFADTEKLQCLEVEVQTAGEQVADRRNCIPCPYIGDPCIVRYREDGHYYRALITNICEDYLVSVRLVDFGNIEDCVDPKALWAIPSELLSVPMQAFPCCLSGFNISEGLCSQEGNDYFYEIITEDVLEITILEIRRDVCDIPLAIVDLKSKGKSINEKMEKYSKTGIKSALPYENIDSEIKQTLGSYNLDVGLKKLSNKAVQNKIYMEQQTDELAEITEKDVNIIGTKPSNFRDPKTDNICEGFENPCKDKIDTEELEGELECHLVDKAEFDDKYLITGFNTLLPHANETKEILELNSLEVPLSPDDESKEFLELESIELQNSLVVDEEKGELSPVPPNVPLSQECVTKGAMELFTLQLPLSCEAEKQPELELPTAQLPLDDKMDPLSLGVSQKAQESMCTEDMRKSSCVESFDDQRRMSLHLHGADCDPKTQNEMNICEEEFVEYKNRDAISALMPLFSEEESSDGSKHNNGLPDHISAQLQNTYTLKAFTVGSKCVVWSSLRNTWSKCEILETAEEGTRVLNLSNGMEEIVNPENVWNGIPKLDKSPPEKRGLEVMEI

SEQ ID NO: 6911 - protein, 295 aa, Homo sapiens [sequence omitted]

SEQ ID NO: 6912 - protein, 128 aa, Homo sapiens [sequence omitted]

SEQ ID NO: 6913 - protein, 654 aa, Homo sapiens
MAFRDVAVDFTQDEWRLLSPAQRTLYREVMLENYSNLVSLGISFSKPELITQLEQGKETWREEKKCSPATCPADPEPELYLDPFCPPGFSSQKFPMQHVLCNHPPWIFTCLCAEGNIQPGDPGPGDQEKQQQASEGRPWSDQAEGPEGEGAMPLFGRTKKRTLGAFSRPPQRQPVSSRNGLRGVELEASPAQSGNPEETDKLLKRIEVLGFGTVNCGECGLSFSKMTNLLSHQRIHSGEKPYVCGVCEKGFSLKKSLARHQKAHSGEKPIVCRECGRGFNRKSTLIIHERTHSGEKPYMCSECGRGFSQKSNLIIHQRTHSGEKPYVCRECGKGFSQKSAVVRHQRTHLEEKTIVCSDCGLGFSDRSNLISHQRTHSGEKPYACKECGRCFRQRTTLVNHQRTHSKEKPYVCGVCGHSFSQNSTLISHRRTHTGEKPYVCGVCGRGFSLKSHLNRHQNIHSGEKPIVCKDCGRGFSQQSNLIRHQRTHSGEKPMVCGECGRGFSQKSNLVAHQRTHSGERPYVCRECGRGFSHQAGLIRHKRKHSREKPYMCRQCGLGFGNKSALITHKRAHSEEKPCVCRECGQGFLQKSHLTLHQMTHTGEKPYVCKTCGRGFSLKSHLSRHRKTTSVHHRLPVQPDPEPCAGQPSDSLYSL

SEQ ID NO: 6914 - protein, 1150 aa, Homo sapiens
MHPPETTTKMASVRFMVTPTKIDDIPGLSDTSPDLSSRSSSRVRFSSRESVPETSRSEPMSEMSGATTSLATVALDPPSDRTSHPQDVIEDLSQNSITGEHSQLLDDGHKKARNAYLNNSNYEEGDEYFDKNLALFEEEMDTRPKVSSLLNRMANYTNLTQGAKEHEEAENITEGKKKPTKTPQMGTFMGVYLPCLQNIFGVILFLRLTWVVGTAGVLQAFAIVLICCCCTMLTAISMSAIATNGVVPAGGSYFMISRALGPEFGGAVGLCFYLGTTFAAAMYILGAIEIFLVYIVPRAAIFHSDDALKESAAMLNNMRVYGTAFLVLMVLVVFIGVRYVNKFASLFLACVIVSILAIYAGAIKSSFAPPHFPVCMLGNRTLSSRHIDVCSKTKEINNMTVPSKLWGFFCNSSQFFNATCDEYFVHNNVTSIQGIPGLASGIITENLWSNYLPKGEIIEKPSAKSSDVLGSLNHEYVLVDITTSFTLLVGIFFPSVTGIMAGSNRSGDLKDAQKSIPIGTILAILTTSFVYLSNVVLFGACIEGVVLRDKFGDAVKGNLVVGTLSWPSPWVIVIGSFFSTCGAGLQSLTGAPRLLQAIAKDNIIPFLRVFGHSKANGEPTWALLLTAAIAELGILIASLDLVAPILSMFFLMCYLFVNLACALQTLLRTPNWRPRFRYYHWALSFMGMSICLALMFISSWYYAIVAMVIAGMIYKYIEYQGAEKEWGDGIRGLSLSAARFALLRLEEGPPHTKNWRPQLLVLLKLDEDLHVKHPRLLTFASQLKAGKGLTIVGSVIVGNFLENYGEALAAEQTIKHLMEAEKVKGFCQLVVAAKLREGISHLIQSCGLGGMKHNTVVMGWPNGWRQSEDARAWKTFIGTVRVTTAAHLALLVAKNISFFPSNVEQFSEGNIDVWWIVHDGGMLMLLPFLLKQHKVWRKCSIRIFTVAQLEDNSIQMKKDLATFLYHLRIEAEVEVVEMHDSDISAYTYERTLMMEQRSQMLRHMRLSKTERDREAQLVKDRNSMLRLTSIGSDEDEETETYQEKVHMTWTKDKYMASRGQKAKSMEGFQDLLNMRPDQSNVRRMHTAVKLNEVIVNKSHEAKLVLLNMPGPPRNPEGDENYMEFLEVLTEGLERVLLVRGGGSEVITIYS

SEQ ID NO: 6915 - protein, 783 aa, Homo sapiens
MPGKLRSDAGLESDTAMKKGETLRKQTEEKEKKEKPKSDKTEEIAEEEETVFPKAKQVKKKAEPSEVDMNSPKSKKAKKKEEPSQNDISPKTKSLRKKKEPIEKKVVSSKTKKVTKNEEPSEEEIDAPKPKKMKKEKEMNGETREKSPKLKNGFPHPEPDCNPSEAASEESNSEIEQEIPVEQKEGAFSNFPISEETIKLLKGRGVTFLFPIQAKTFHHVYSGKDLIAQARTGTGKTFSFAIPLIEKLHGELQDRKRGRAPQVLVLAPTRELANQVSKDFSDITKKLSVACFYGGTPYGGQFERMRNGIDILVGTPGRIKDHIQNGKLDLTKLKHVVLDEVDQMLDMGFADQVEEILSVAYKKDSEDNPQTLLFSATCPHWVFNVAKKYMKSTYEQVDLIGKKTQKTAITVEHLAIKCHWTQRAAVIGDVIRVYSGHQGRTIIFCETKKEAQELSQNSAIKQDAQSLHGDIPQKQREITLKGFRNGSFGVLVATNVAARGLDIPEVDLVIQSSPPKDVESYIHRSGRTGRAGRTGVCICFYQHKEEYQLVQVEQKAGIKFKRIGVPSATEIIKASSKDAIRLLDSVPPTAISHFKQSAEKLIEEKGAVEALAAALAHISGATSVDQRSLINSNVGFVTMILQCSIEMPNISYAWKELKEQLGEEIDSKVKGMVFLKGKLGVCFDVPTASVTEIQEKWHDSRRWQLSVATEQPELEGPREGYGGFRGQREGSRGFRGQRDGNRRFRGQREGSRGPRGQRSGGGNKSNRSQNKGQKRSFSKAFGQ

SEQ ID NO: 6916 - protein, 2954 aa, Homo sapiens
SFRNDGLKASDVLPILKEKVAFVSGGRDKRGGPILTFPARSNHDRIRQEDLRKLVTYLASVPSEDVCKRGFTVIIDMRGSKWDLIKPLLKTLQEAFPAEIHVALIIKPDNFWQKQKTNFGSSKFIFETSMVSVEGLTKLVDPSQLTEEFDGSLDYNHEEWIELRLSLEEFFNSAVHLLSRLEDLQEMLARKEFPVDVEGSRRLIDEHTQLKKKVLKAPVEELDREGQRLLQCIRCSDGFSGRNCIPGSADFQSLVPKITSLLDKLHSTRQHLHQMWHVRKLKLDQCFQLRLFEQDAEKMFDWISHNKELFLQSHTEIGVSYQYALDLQTQHNHFAMNSMNAYVNINRIMSVASRLSEAGHYASQQIKQISTQLDQEWKSFAAALDERSTILAMSAVFHQKAEQFLSGVDAWCKMCSEGGLPSEMQDLELAIHHHQTLYEQVTQAYTEVSQDGKALLDVLQRPLSPGNSESLTATANYSKAVHQVLDVVHEVLHHQRRLESIWQHRKVRLHQRLQLCVFQQDVQQVLDWIENHGEAFLSKHTGVGKSLHRARALQKRHDDFEEVAQNTYTNADKLLEAAEQLAQTGECDPEEIYKAARHLEVRIQDFVRRVEQRKLLLDMSVSFHTHTKELWTWMEDLQKEMLEDVCADSVDAVQELIKQFQQQQTATLDATLNVIKEGEDLIQQLRSAPPSLGEPSEARDSAVSNNKTPHSSSISHIESVLQQLDDAQVQMEELFHERKIKLDIFLQLRIFEQYTIEVTAELDAWNEDLLRQMNDFNTEDLTLAEQRLQRHTERKLAMNNMTFEVIQQGQDLHQYITEVQASGIELICEKDIDLAAQVQELLEFLHEKQHELELNAEQTHKRLEQCLQLRHLQAEVKQVLGWIRNGESMLNASLVNASSLSEAEQLQREHEQFQLAIEKTHQSALQVQQKAEVLLQAGHYDADAIRECAEKVALHWQQLMLKMEDRLKLVNASVAFYKTSEQVCSVLESLEQEYRRDEDWCGGRDKLGPAAEIDHVIPLISKHLEQKEAFLKACTLARRNAEVFLKYIHRNNVSMPSVASHTRGPEQQVKAILSELLQRENRVLHFWTLKKRRLDQCQQYVVFERSAKQALDWIQETGEFYLSTHTSTGETTEETQELLKEYGEFRVPAKQTKEKVKLLIQLADSFVEKGHIHATEIRKWVTTVDKHYRDFSLRMGKYRYSLEKALGVNTEDNKDLELDIIPASLSDREVKLRDANHEVNEEKRKSARKKEFIMAELLQTEKAYVRDLHECLETYLWEMTSGVEEIPPGILNKEHIIFGNIQEIYDFHNNIFLKELEKYEQLPEDVGHCFVTWADKFQMYVTYCKNKPDSNQLILEHAGTFFDEIQQRHGLANSISSYLIKPVQRITKYQLLLKELLTCCEEGKGELKDGLEVMLSVPKKANDAMHVSMLEGFDENLDVQGELILQDAFQVWDPKSLIRKGRERHLFLFEISLVFSKEIKDSSGHTKYVYKNKLLTSELGVTEHVEGDPCKFALWSGRTPSSDNKTVLKASNIETKQEWIKNIREVIQERIIHLKGALKEPLQLPKTPAKQRNNSKRDGVEDIDSQGDGSSQPDTISIASRTSQNTVDSDKLSGGCELTVVLQDFSAGHSSELTIQVGQTVELLERPSERPGWCLVRTTERSPPLEGLVPSSALCISHSRSSVEMDCFFPLVKDAYSHSSSENGGKSESVANLQAQPSLNSIHSSPGPKRSTNTLKKWLTSPVRRLNSGKADGNIKKQKKVRDGRKSFDLGSPKPGDETTPQGDSADEKSKKGWGEDEPDEESHTPLPPPMKIFDNDPTQDEMSSSLLAARQASTEVPTAADLVNAIEKLVKNKLSLEGSSYRGSLKDPAGCLNEGMAPPTPPKNPEEEQKAKALRGRMFVLNELVQTEKDYVKDLGIVVEGFMKRIEEKGVPEDMRGKDKIVFGNIHQIYDWHKDFFLAELEKCIQEQDRLAQLFIKHERKLHIYVWYCQNKPRSEYIVAEYDAYFEEVKQEINQRLTLSDFLIKPIQRITKYQLLLKDFLRYSEKAGLECSDIEKAVELMCLVPKRCNDMMNLGRLQGFEGTLTAQGKLLQQDTFYVIELDAGMQSRTKERRVFLFEQIVIFSELLRKGSLTPGYMFKRSIKMNYLVLEENVDNDPCKFALMNRETSERVVLQAANADIQQAWVQDINQVLETQRDFLNALQSPIEYQRKERSTAVMRSQPARLPQASPRPYSSVPAGSEKPPKGSSYNPPLPPLKISTSNGSPGFEYHQPGDKFEASKQNDLGGCNGTSSMAVIKDYYALKENEICVSQGEVVQVLAVNQQNMCLVYQPASDHSPAAEGWVPGSILAPLTKATAAESSDGSIKKSCSWHTLRMRKRAEVENTGKNEATGPRKPKDILGNKVSVKETNSSEESECDDLDPNTSMEILNPNFIQEVAPEFLVPLVDVTCLLGDTVILQCKVCGRPKPTITWKGPDQNILDTDNSSATYTVSSCDSGEITLKICNLMPQDSGIYTCIATNDHGTTSTSATVKVQGVPAAPNRPIAQERSCTSVILRWLPPSSTGNCTISGYTVEYREEGSQIWQQSVASTLDTYLVIEDLSPGCPYQFRVSASNPWGISLPSEPSEFVRLPEYDAAADGATISWKENFDSAYTELNEIGRGRFSIVKKCIHKATRKDVAVKFVSKKMKKKEQAAHEAALLQHLQHPQYITLHDTYESPTSYILILELMDDGRLLDYLMNHDELMEEKVAFYIRDIMEALQYLHNCRVAHLDIKPENLLIDLRIPVPRVKLIDLEDAVQISGHFHIHHLLGNPEFAAPEVIQGIPVSLGTDIWSIGVLTYVMLSGVSPFLDESKEETCINVCRVDFSFPHEYFCGVSNAARDFINVILQEDFRRRPTAATCLQHPWLQPHNGSYSKIPLDTSRLACFIERRKHQNDVRPIPNVKSYIVNRVNQGT

SEQ ID NO: 6917 - protein, 639 aa, Homo sapiens
MLPGLALLLLAAWTARALEVYPELQITNVVEANQPVTIQNWCKRGRKQCKTHPHFVIPYRCLVGEFVSDALLVPDKCKFLHQERMDVCETHLHWHTVAKETCSEKSTNLHDYGMLLPCGIDKFRGVEFVCCPLAEESDNVDSADAEEDDSDVWWGGADTDYADGSEDKVVEVAEEEEVAEVEEEEADDDEDDEDGDEVEEEAEEPYEEATERTTSIATTTTTTTESVEEVVRVPTTAASTPDAVDKYLETPGDENEHAHFQKAKERLEAKHRERMSQVMREWEEAERQAKNLPKADKKAVIQHFQEKVESLEQEAANERQQLVETHMARVEAMLNDRRRLALENYITALQAVPPRPRHVFNMLKKYVRAEQKDRQHTLKHFEHVRMVDPKKAAQIRSQVMTHLRVIYERMNQSLSLLYNVPAVAEEIQDEVDELLQKEQNYSDDVLANMISEPRISYGNDALMPSLTETKTTVELLPVNGEFSLDDLQPWHSFGADSVPANTENEVEPVDARPAADRGLTTRPGSGLTNIKTEEISEVKMDAEFRHDSGYEVHHQKLVFFAEDVGSNKGAIIGLMVGGVVIATVIVITLVMLKKKQYTSIHHGVVEVDAAVTPEERHLSKMQQNGYENPTYKFFEQMQN

SEQ ID NO: 6918 - protein, 442 aa, Homo sapiens
MAAAALRDPAQQGYVTFEDVAVYFSQEEWRLLDDAQRLLYRNVMLENFTLLASLGLASSKTHEITQLESWEEPFMPAWEVVTSAIPRGCWHGAEAEEAPEQIASVGLLSSNIQQHQKQHCGEKPLKRQEGRVPVLRSCKVHLSEKSLQSREVGKALLISSGVLKHQVTHTGEKSHRSSKSREAFHAGKRHYKCSECGKAFGQKYLLVQHQRLHAGKKTYECSECGKLFRDMSNLFIHQIVHTGERPYGCSNCGKSFSRNAHLIEHQRVHTGEKPFTCSECGKAFRHNSTLVQHHKIHTGVRPYECSECGKLFSFNSSLMKHQRIHTGERPYKCSECGKFYSHKSNLIKHWRVHTGERPYKCSDCGKFFTQCSSLMQHQKVHTGEKPFKCNECGRFFRENSSLVKHQRVHTGAKPYECRECGKFFRHNSSLFKHRRIHTGEMQ

SEQ ID NO: 6919 - protein, 403 aa, Homo sapiens
MALRSAQGDGPTSGHWDGGAEKADFNAKRKKKVAEIHQALNSDPTDVAALRRMAISEGGLLTDEIRRKVWPKLLNVNANDPPPISGKNLRQMSKDYQQVLLDVRRSLRRFPPGMPEEQREGLQEELIDIILLILERNPQLHYYQGYHDIVVTFLLVVGERLATSLVEKLSTHHLRDFMDPTMDNTKHILNYLMPIIDQVNPELHDFMQSAEVGTIFALSWLITWFGHVLSDFRHVVRLYDFFLACHPLMPIYFAAVIVLYREQEVLDCDCDMASVHHLLSQIPQDLPYETLISRAGDLFVQFPPSELAREAAAQQQAERTAASTFKDFELASAQQRPDMVLRQRFRGLLRPEDRTKDVLTKPRTNRFVKLAVMGLTVALGAAALAVVKSALEWAPKFQLQLFP

SEQ ID NO: 6920 - protein, 1455 aa, Homo sapiens
MSKSLKKKSHWTSKVHESVIGRNPEGQLGFELKGGAENGQFPYLGEVKPGKVAYESGSKLVSEELLLEVNETPVAGLTIRDVLAVIKHCKDPLRLKCVKQGGIVDKDLRHYLNLRFQKGSVDHELQQIIRDNLYLRTVPCTTRPHKEGEVPGVDYIFITVEDFMELEKSGALLESGTYEDNYYGTPKPPAEPAPLLLNVTDQILPGATPSAEGKRKRNKSVSNMEKASIEPPEEEEEERPVVNGNGVVVTPESSEHEDKSAGASGEMPSQPYPAPVYSQPEELKEQMDDTKPTKPEDNEEPDPLPDNWEMAYTEKGEVYFIDHNTKTTSWLDPRLAKKAKPPEECKENELPYGWEKIDDPIYGTYYVDHINRRTQFENPVLEAKRKLQQHNMPHTELGTKPLQAPGFREKPLFTRDASQLKGTFLSTTLKKSNMGFGFTIIGGDEPDEFLQVKSVIPDGPAAQDGKMETGDVIVYINEVCVLGHTHADVVKLFQSVPIGQSVNLVLCRGYPLPFDPEDPANSMVPPLAIMERPPPVMVNGRHNYETYLEYISRTSQSVPDITDRPPHSLHSMPTDGQLDGTYPPPVHDDNVSMASSGATQAELMTLTIVKGAQGFGFTIADSPTGQRVKQILDIQGCPGLCEGDLIVEINQQNVQNLSHTEVVDILKDCPIGSETSLIIHRGGFFSPWKTPKPIMDRWENQGSPQTSLSAPAIPQNLPFPPALHRSSFPDSTEAFDPRKPDPYELYEKSRAIYESRQQVPPRTSFRMDSSGPDYKELDVHLRRMESGFGFRILGGDEPGQPILIGAVIAMGSADRDGRLHPGDELVYVDGIPVAGKTHRYVIDLMHHAARNGQVNLTVRRKVLCGGEPCPENGRSPGSVSTHHSSPRSDYATYTNSNHAAPSSNASPPEGFASHSLQTSDVVIHRKENEGFGFVIISSLNRPESGSTITVPHKIGRIIDGSPADRCAKLKVGDRILAVNGQSIINMPHADIVKLIKDAGLSVTLRIIPQEELNSPTSAPSSEKQSPMAQQSPLAQQSPLAQPSPATPNSPIAQPAPPQPLQLQGHENSYRSEVKARQDVKPDIRQPPFTDYRQPPLDYRQPPGGDYQQPPPLDYRQPPLLDYRQHSPDTRQYPLSDYRQPQDFDYFTVDMEKGAKGFGFSIRGGREYKMDLYVLRLAEDGPAIRNGRMRVGDQIIEINGESTRDMTHARAIELIKSGGRRVRLLLKRGTGQVPEYDEPAPWSSPAAAAPGLPEVGVSLDDGLAPFSPSHPAPPSDPSHQISPGPTWDIKREHDVRKPKELSACGQKKQRLGEQRERSASPQRAARPRLEEAPGGQGRPEAGRPASEARAPGLAAADAADAARAGGKEAPRAAAGSELCRREGPGAAPAFAGPGGGGSGALEAEGRAGARAGPRPGPRPPGGAPARKAAVAPGPWKVPGSDKLPSVLKPGASAASR

SEQ ID NO: 6921 - protein, 548 aa, Homo sapiens
MAAPPARADADPSPTSPPTARDTPGRQAEKSETACEDRSNAESLDRLLPPVGTGRSPRKRTTSQCKSEPPLLRTSKRTIYTAGRPPWYNEHGTQSKEAFAIGLGGGSASGKTTVARMIIEALDVPWVVLLSMDSFYKVLTEQQQEQAAHNNFNFDHPDAFDFDLIISTLKKLKQGKSVKVPIYDFTTHSRKKDWKTLYGANVIIFEGIMAFADKTLLELLDMKIFVDTDSDIRLVRRLRRDISERGRDIEGVIKQYNKFVKPSFDQYIQPTMRLADIVVPRGSGNTVAIDLIVQHVHSQLEERELSVRAALASAHQCHPLPRTLSVLKSTPQVRGMHTIIRDKETSRDEFIFYSKRLMRLLIEHALSFLPFQDCVVQTPQGQDYAGKCYAGKQITGVSILRAGETMEPALRAVCKDVRIGTILIQTNQLTGEPELHYLRLPKDISDDHVILMDCTVSTGAAAMMAVRVLLDHDVPEDKIFLLSLLMAEMGVHSVAYAFPRVRIITTAVDKRVNDLFRIIPGIGNFGDRYFGTDAVPDGSDEEEVAYTG

SEQ ID NO: 6922 - protein, 217 aa, Homo sapiens
MYSLNQEIKAFSRNNLRKQCTRVTTLTGKKIIETWKDARIHVVEEVEPSSGGGCGYVQDLSSDLQVGVIKPWLLLGSQDAAHDLDTLKKNKVTHILNVAYGVENAFLSDFTYKSISILDLPETNILSYFPECFEFIEEAKRKDGVVLVHCNAGVSRAAAIVIGFLMNSEQTSFTSAFSLVKNARPSICPNSGFMEQLRTYQEGKESNKCDRIQENSS

SEQ ID NO: 6923 - protein, 184 aa, Homo sapiens
MWVTKLLPALLLQHVLLHLLLLPIAIPYAEGQRKRRNTIHEFKKSAKTTLIKIDPALKIKTKKVNTADQCANRCTRNKGLPFTCKAFVFDKARKQCLWFPFNSMSSGVKKEFGHEFDLYENKDYIRNCIIGKGRSYKGTVSITKSGIKCQPWSSMIPHEHSGGDDCLVESTFYSIPFWGHNSAR

SEQ ID NO: 6924 - protein, 543 aa, Homo sapiens
MVVATYTCDQCGAETYQPIQSPTFMPLIMCPSQECQTNRSGGRLYLQTRGSRFIKFQEMKMQEHSDQVPVGNIPRSITVLVEGENTRIAQPGDHVSVTGIFLPILRTGFRQVVQGLLSETYLEAHRIVKMNKSEDDESGAGELTREELRQIAEEDFYEKLAASIAPEIYGHEDVKKALLLLLVGGVDQSPRGMKIRGNINICLMGDPGVAKSQLLSYIDRLAPRSQYTTGRGSSGVGLTAAVLRDSVSGELTLEGGALVLADQGVCCIDEFDKMAEADRTAIHEVMEQQTISIAKAGILTTLNARCSILAAANPAYGRYNPRRSLEQNIQLPAALLSRFDLLWLIQDRPDRDNDLRLAQHITYVHQHSRQPPSQFEPLDMKLMRRYIAMCREKQPMVPESLADYITAAYVEMRREAWASKDATYTSARTLLAILRLSTALARLRMVDVVEKEDVNEAIRLMEMSKDSLLGDKGQTARTQRPADVIFATVRELVSGGRSVRFSEAEQRCVSRGFTPAQFQAALDEYEELNVWQVNASRTRITFV

SEQ ID NO: 6925 - protein, 719 aa, Homo sapiens
MGEKNGDAKTFWMELEDDGKVDFIFEQVQNVLQSLKQKIKDGSATNKEYIQAMILVNEATIINSSTSIKGASQKEVNAQSSDPMPVTQKEQENKSNAFPSTSCENSFPEDCTFLTTENKEILSLEDKVVDFREKDSSSNLSYQSHDCSGACLMKMPLNLKGENPLQLPIKCHFQRRHAKTNSHSSALHVSYKTPCGRSLRNVEEVFRYLLETECNFLFTDNFSFNTYVQLARNYPKQKEVVSDVDISNGVESVPISFCNEIDSRKLPQFKYRKTVWPRAYNLTNFSSMFTDSCDCSEGCIDITKCACLQLTARNAKTSPLSSDKITTGYKYKRLQRQIPTGIYECSLLCKCNRQLCQNRVVQHGPQVRLQVFKTEQKGWGVRCLDDIDRGTFVCIYSGRLLSRANTEKSYGIDENGRDENTMKNIFSKKRKLEVACSDCEVEVLPLGLETHPRTAKTEKCPPKFSNNPKELTVETKYDNISRIQYHSVIRDPESKTAIFQHNGKKMEFVSSESVTPEDNDGFKPPREHLNSKTKGAQKDSSSNHVDEFEDNLLIESDVIDITKYREETPPRSRCNQATTLDNQNIKKAIEVQIQKPQEGRSTACQRQQVFCDEELLSETKNTSSDSLTKFNKGNVFLLDATKEGNVGRFLNHSCCPNLLVQNVFVETHNRNFPLVAFFTNRYVKARTELTWDYGYEAGTVPEKEIFCQCGVNKCRKKIL

SEQ ID NO: 6926 - protein, 597 aa, Homo sapiens
MSLVSEEFPEEVPPRAEEITIPADVTPERVPTHIVDYSEAEQSDEQLHQEISQANVICIVYAVNNKHSIDKVTSRWIPLINERTDKDSRLPLILVGNKSDLVEYSSMETILPIMNQYTEIETCVECSAKNLKNISELFYYAQKAVLHPTGPLYCPEEKEMKPACIKALTRIFKISDQDNDGTLNDAELNFFQRICFNTPLAPQALEDVKNVVRKHISDGVADSGLTLKGFLFLHTLFIQRGRHETTWTVLRRFGYDDDLDLTPEYLFPLLKIPPDCTTELNHHAYLFLQSTFDKHDLDRDCALSPDELKDLFKVFPYIPWGPDVNNTVCTNERGWITYQGFLSQWTLTTYLDVQRCLEYLGYLGYSILTEQESQASAVTVTRDKKIDLQKKQTQRNVFRCNVIGVKNCGKSGVLQALLGRNLMRQKKIREDHKSYYAINTVYVYGQEKYLLLHDISESEFLTEAEIICDVVCLVYDVSNPKSFEYCARIFKQHFMDSRIPCLIVAAKSDLHEVKQEYSISPTDFCRKHKMPPPQAFTCNTADAPSKDIFVKLTTMAMYPHVTQADLKSSTFWLRASFGATVFAVLGFAMYKALLKQR

SEQ ID NO: 6927 - protein, 1026 aa, Homo sapiens
MNLFNLDRFRFEKRNKIEEAPEATPQPSQPGPSSPISLSAEEENAEGEVSRANTPDSDITEKTEDSSVPETPDNERKASISYFKNQRGIQYIDLSSDSEDVVSPNCSNTVQEKTFNKDTVIIVSEPSEDEESQGLPTMARRNDDISELEDLSELEDLKDAKLQTLKELFPQRSDNDLLKLIESTSTMDGAIAAALLMFGDAGGGPRKRKLSSSSEPYEEDEFNDDQSIKKTRLDHGEESNESAESSSNWEKQESIVLKLQKEFPNFDKQELREVLKEHEWMYTEALESLKVFAEDQDMQYVSQSEVPNGKEVSSRSQNYPKNATKTKLKQKFSMKAQNGFNKKRKKNVFNPKRVVEDSEYDSGSDVGSSLDEDYSSGEEVMEDGYKGKILHFLQDASIGELTLIPQCSQKKAQKITELRPFNSWEALFTKMSKTNGLSEDLIWHCKTLIQERDVVIRLMNKCEDISNKLTKQVTMLTGNGGGWNIEQPSILNQSLSLKPYQKVGLNWLALVHKHGLNGILADEMGLGKTIQAIAFLAYLYQEGNNGPHLIVVPASTIDNWLREVNLWCPTLKVLCYYGSQEERKQIRFNIHSRYEDYNVIVTTYNCAISSSDDRSLFRRLKLNYAIFDEGHMLKNMGSIRYQHLMTINANNRLLLTGTPVQNNLLELMSLLNFVMPHMFSSSTSEIRRMFSSKTKSADEQSIYEKERIAHAKQIIKPFILRRVKEEVLKQLPPKKDRIELCAMSEKQEQLYLGLFNRLKKSINNLEKNTEMCNVMMQLRKMANHPLLHRQYYTAEKLKEMSQLMLKEPTHCEANPDLIFEDMEVMTDFELHVLCKQYRHINNFQLDMDLILDSGKFRVLGCILSELKQKGDRVVLFSQFTMMLDILEVLLKHHQHRYLRLDGKTQISERIHLIDEFNTDMDIFVFLLSTKAGGLGINLTSANVVILHDIDCNPYNDKQAEDRCHRVGQTKEVLVIKLISQGTIEESMLKINQQKLKLEQDMTTVDEGDEGSMPADIATLLKTSMGL

SEQ ID NO: 6928 - protein, 527 aa, Homo sapiens
MGSSEVSIIPGLQKEEKAAVERRRLHVLKALKKLRIEADEAPVVAVLGSGGGLRAHIACLGVLSEMKEQGLLDAVTYLAGVSGSTWAISSLYTNDGDMEALEADLKHRFTRQEWDLAKSLQKTIQAARSENYSLTDFWAYMVISKQTRELPESHLSNMKKPVEEGTLPYPIFAAIDNDLQPSWQEARAPETWFEFTPHHAGFSALGAFVSITHFGSKFKKGRLVRTHPERDLTFLRGLWGSALGNTEVIREYIFDQLRNLTLKGLWRRAVANAKSIGHLIFARLLRLQESSQGEHPPPEDEGGEPEHTWLTEMLENWTRTSLEKQEQPHEDPERKGSLSNLMDFVKKTGICASKWEWGTTHNFLYKHGGIRDKIMSSRKHLHLVDAGLAINTPFPLVLPPTREVHLILSFDFSAGDPFETIRATTDYCRRHKIPFPQVEEAELDLWSKAPASCYILKGETGPVVMHFPLFNIDACGGDIEAWSDTYDTFKLADTYTLDVVVLLLALAKKNVRENKKKILRELMNVAG

SEQ ID NO: 6929 - protein, 1031 aa, Homo sapiens
MGRESRHYRKRSASRGRSGSRSRSRSPSDKRSKRGDDRRSRSRDRDRRRERSRSRDKRRSRSRDRKRLRRSRSRERDRSRERRRSRSRDRRRSRSRSRGRRSRSSSPGNKSKKTENRSRSKEKTDGGESSKEKKKDKDDKEDEKEKDAGNFDQNKLEEEMRKRKERVEKWREEQRKKAMENIGELKKEIEEMKQGKKWSLEDDDDDEDDPAEAEKEGNEMEGEELDPLDAYMEEVKEEVKKFNMRSVKGGGGNEKKSGPTVTKVVTVVTTKKAVVDSDKKKGELMENDQDAMEYSSEEEEVDLQTALTGYQTKQRKLLEPVDHGKIEYEPFRKNFYVEVPELAKMSQEEVNVFRLEMEGITVKGKGCPKPIKSWVQCGISMKILNSLKKHGYEKPTPIQTQAIPAIMSGRDLIGIAKTGSGKTIAFLLPMFRHIMDQRSLEEGEGPIAVIMTPTRELALQITKECKKFSKTLGLRVVCVYGGTGISEQIAELKRGAEIIVCTPGRMIDMLAANSGRVTNLRRVTYVVLDEADRMFDMGFEPQVMRIVDNVRPDRQTVMFSATFPRAMEALARRILSKPIEVQVGGRSVVCSDVEQQVIVIEEEKKFLKLLELLGHYQESGSVIIFVDKQEHADGLLKDLMRASYPCMSLHGGIDQYDRDSIINDFKNGTCKLLVATSVAARGLDVKHLILVVNYSCPNHYEDYVHRAGRTGRAGNKGYAYTFITEDQARYAGDIIKALELSGTAVPPDLEKLWSDFKDQQKAEGKIIKKSSGFSGKGFKFDETEQALANERKKLQKAALGLQDSDDEDAAVDIDEQIESMFNSKKRVKDMAAPGTSSVPAPTAGNAEKLEIAKRLALRINAQKNLGIESQDVMQQATNAILRGGTILAPTVSAKTIAEQLAEKINAKLNYVPLEKQEEERQDGGQNESFKRYEEELEINDFPQTARWKVTSKEALQRISEYSEAAITIRGTYFPPGKEPKEGERKIYLAIESANELAVQKAKAEITRLIKEELIRLQNSYQPTNKGRYKVL

SEQ ID NO: 6930 - protein, 738 aa, Homo sapiens
MSGSCAAPGPGSGSSPAACRFAHYFVLCGIDADSGLEPDELAVLYQWLEADRHGKSQGAANTTSGENFDQSPLRRTFKSKVLAHYPQNIEWNPFDQDAVNMLCMPKGLSFRTQTDNKDPQFHSFIITREDGSRTYGFVLTFYEEVTSKQICTAMQTLYQMHNAEHYSSVYASSSCSMDSLASSLDEGDTTSLLKLQRYNSYDISRDTLYVSKSICLITPLPFMQACKKFLIQLYKAVTSQQPPPLPLESYIHNILYEVPLPPPGRSLKFYGVYEPVICQRPGPSELPLSDYPLREAFELLGLENLVQVFTCVLLEMQILLYSQDYQRLMTVAEGITTLLFPFQWQHVYVPILPASLLHFLDAPVPYLMGLQSKEGTDRSKLELPQEANLCFVDIDNHFIELPEEFPQFPNKVDFIQELSEVLVQFGIPPEGSLHCSESTSKLKNMVLKDLVNDKKNGNVCTNNISMYELLKGNETIARLQALAKRTGVAVEKMDLSASLGEKDKDLKLHCEEAELRDYQLNVQLREVFANRFTQMFADYEAFVIQTAQDMESWLTNREQMQNFDKASFLSDQPEPYLPFLSRFIETQMFATFIDNKIMSQWEEKDPLLRVFDTRIDKIRLYNVRAPTLRTSIYQKCSTLKEAAQSIEQRLMKMDHTAIHPHLLDMKIGQGKYEQGFFPKLQSDVLATGPTSNNRWVSRSATAQRRKERLRQHSEHVGLDNDLREVCGLPSWGASQQAP

SEQ ID NO: 6931 - protein, 955 aa, Homo sapiens
MPAVSKGDGMRGLAVFISDIRNCKSKEAEIKRINKELANIRSKFKGDKALDGYSKKKYVCKLLFIFLLGHDIDFGHMEAVNLLSSNKYTEKQIGYLFISVLVNSNSELIRLINNAIKNDLASRNPTFMCLALHCIANVGSREMGEAFAADIPRILVAGDSMDSVKQSAALCLLRLYKASPDLVPMGEWTARVVHLLNDQHMGVVTAAVSLITCLCKKNPDDFKTCVSLAVSRLSRIVSSASTDLQDYTYYFVPAPWLSVKLLRLLQCYPPPEDAAVKGRLVECLETVLNKAQEPPKSKKVQHSNAKNAILFETISLIIHYDSEPNLLVRACNQLGQFLQHRETNLRYLALESMCTLASSEFSHEAVKTHIDTVINALKTERDVSVRQRAADLLYAMCDRSNAKQIVSEMLRYLETADYAIREEIVLKVAILAEKYAVDYSWYVDTILNLIRIAGDYVSEEVWYRVLQIVTNRDDVQGYAAKTVFEALQAPACHENMVKVGGYILGEFGNLIAGDPRSSPPVQFSLLHSKFHLCSVATRALLLSTYIKFINLFPETKATIQGVLRAGSQLRNADVELQQRAVEYLTLSSVASTDVLATVLEEMPPFPERESSILAKLKRKKGPGAGSALDDGRRDPSSNDINGGMEPTPSTVSTPSPSADLLGLRAAPPPAAPPASAGAGNLLVDVFDGPAAQPSLGPTPEEAFLSPGPEDIGPPIPEADELLNKFVCKNNGVLFENQLLQIGVKSEFRQNLGRMYLFYGNKTSVQFQNFSPTVVHPGDLQTQLAVQTKRVAAQVDGGAQVQQVLNIECLRDFLTPPLLSVRFRYGGAPQALTLKLPVTINKFFQPTEMAAQDFFQRWKQLSLPQQEAQKIFKANHPMDAEVTKAKLLGFGSALLDNVDPNPENFVGAGIIQTKALQVGCLLRLEPNAQAQMYRLTLRTSKEPVSRHLCELLAQQF

SEQ ID NO: 6932 - protein, 386 aa, Homo sapiens
MFPEPPTPGPPSPDTPPDSSRISHGPVPPWALATIVLVSGLLIFSCCFCLYRKSCRRRTGKKSQAQAQVHLQEVKGLGQSYIDKVQPEVEELEPAPSGPGQQVADKHELGRLQYSLDYDFQSGQLLVGILQAMGLAALDLGGSSDPYVRVYLLPDKRRRYETKVHRQTLNPHFGETFAFKVPYVELGGRVLVMAVYDFDRFSRNDAIGEVRVPMSSVDLGRPVQAWRELQAAPREEQEKLGDICFSLRYVPTAGKLTVIVLEAKNLKKMDVGGLSDPYVKVHLLQGGKKVRKKKTTIKKNTLNPYYNEAFSFEVPCDQVQKVQVELTVLDYDKLGKNEAIGRVAVGAAAGGAGLRHWADMLANPRRPIAQWHSLRPPDRVRLLPAP

SEQ ID NO: 6933 - protein, 469 aa, Homo sapiens
MSRQLTHFPRGERLGFSGCSAVLSGGIGSSSASFRARVKGSASFGSKSLSCLGGSRSLALSAAARRGGGRLGGFVGTAFGSAGLGPKCPSVCPPGGIPQVTVNKSLLAPLNVEMDPEIQRVRAQEREQIKALNNKFASFIDKVRFLEQQNQVLETKWNLLQQLDLNNCRKNLEPIYEGYISNLQKQLEMLSGDGVRLDSELRNMQDLVEDYKKRYEVEINRRTAAENEFVVLKKDVDAAYMNKVELQAKVDSLTDEIKFFKCLYEGEITQIQSHISDTSIVLSMDNNRDLDLDSIIAEVRAQYEEIALKSKAEAETLYQTKCADLETAIADAEQRGDCALKDARAKLDELEGALHQAKEELARMLREYQELVSLKLALDMEIATYRKLLESEECRMSGEYPNSVSISVISSTNAGAGGAGFSMGFGASSSYSYKTAAADVKTKGSCGSELKDPLAKTSGSSCATKKASR

SEQ ID NO: 6934 - protein, 115 aa, Homo sapiens
MLGLLGSTALVGWITGAAVAVLLLLLLLATCLFHGRQDCDVERNRTAAGGNRVRRAQPWPFRRRGHLGIFHHHRHPGHVSHVPNVGLHHHHHPRHTPHHLHHHHHPHRHHPRHAR

SEQ ID NO: 6935 - protein, 1117 aa, Homo sapiens
MGDQQLYKTNHVAHGSENLFYQQPPLGVHSGLNHNYGNAVTGGGMDAPQASPISPHFPQDTRDGLGLPVGSKNLGQMDTSRQGGWGSHAGPGNHVQLRGNLANSNMMWGAPAQAEPTDGYQYTYSQASEIRTQKLTSGVLHKLDSFTQVFANQNLRIQVNNMAQVLHTQSAVMDGAPDSALRQLLSQKPMEPPAPAIPSRYQQVPQQPHPGFTGGLSKPALQVGQHPTQGHLYYDYQQPLAQVPVQGGQPLQAPQMLSQHMQQMQQHQYYPPQQQQQAGQQRISMQEIQTQPQQIRPSQPQPPPQQQQPQQLQLQQRQGSMQIPQYYQPQPMMQHLQEQQQQQMHLQPPSYHRDPHQYTPEQAHTVQLIPLGSMSQYYYQEPQQPYSHPLYQQSHLSQHQQREDSQLKTYSSDRQAQAMLSSHGDLGPPDTGMGDPASSDLTRVSSTLPHRPLLSPSGIHLNNMGPQHQQLSPSAMWPQMHLPDGRAQPGSPESSGQPKGAFGEQFDAKNKLTCSICLKEFKNLPALNGHMRSHGGMRASPNLKQEIPRKHQPSVPKAEEPLKTVQEKKKFRHRPEPLFIPPPPSYNPNPAASYSGATLYQSQLRSPRVLGDHLLLDPTHELPPYTPPPMLSPVRQGSGLFSNVLISGHGPGAHPQLPLTPLTPTPRVLLCRSNSIDGSNVTVTPGPGEQTVDVEPRINIGLRFQAEIPELQDISALAQDTHKATLVWKPWPELENHDLQQRVENLLNLCCSSALPGGGTNSEFALHSLFEAKGDVMVALEMLLLRKPVRLKCHPLANYHYAGSDKWTSLERKLFNKALATYSKDFIFVQKMVKSKTVAQCVEYYYTWKKIMRLGRKHRTRLAEIIDDCVTSEEEEELEEEEEEDPEEDRKSTKEEESEVPKSPEPPPVPVLAPTEGPPLQALGQPSGSFICEMPNCGAVFSSRQALNGHARIHGGTNQVTKARGAIPSGKQKPGGTQSGYCSVKSSPSHSTTSGETDPTTIFPCKECGKVFFKIKSRNAHMKTHRQQEEQQRQKAQKAAFAAEMAATIERTTGPVGAPGLLPLDQLSLIKPIKDVDILDDDVVQQLGGVMEEAEVVDTDLLLDDQDSVLLQGDAEL

SEQ ID NO: 6936 - protein, 592 aa, Homo sapiens
MEKARPLWANSLQFVFACISYAVGLGNVWRFPYLCQMYGGGSFLVPYIIMLIVEGMPLLYLELAVGQRMRQGSIGAWRTISPYLSGVGVASVVVSFFLSMYYNVINAWAFWYLFHSFQDPLPWSVCPLNGNHTGYDEECEKASSTQYFWYRKTLNISPSLQENGGVQWEPALCLLLAWLVVYLCILRGTESTGKVVYFTASLPYCVLIIYLIRGLTLHGATNGLMYMFTPKIEQLANPKAWINAATQIFFSLGLGFGSLIAFASYNEPSNNCQKHAIIVSLINSFTSIFASIVTFSIYGFKATFNYENCLKKVSLLLTNTFDLEDGFLTASNLEQVKGYLASAYPSKYSEMFPQIKNCSLESELDTAVQGTGLAFIVYTEAIKNMEVSQLWSVLYFFMLLMLGIGSMLGNTAAILTPLTDSKIISSHLPKEAISGLVCLVNCAIGMVFTMEAGNYWFDIFNDYAATLSLLLIVLVETIAVCYVYGLRRFESDLKAMTGRAVSWYWKVMWAGVSPLLIVSLFVFYLSDYILTGTLKYQAWDASQGQLVTKDYPAYALAVIGLLVASSTMCIPLAALGTFVQRRLKRGDADPVA

SEQ ID NO: 6937 - protein, 907 aa, Homo sapiens
MVTFKDVAVVFTEEELGLLDSVQRKLYRDVMLENFRNLLLVAHQPFKPDLISQLEREEKLLMVETETPRDGCSGRKNQQKMESIQEVTVSYFSPKELSSRQTWQQSAGGLIRCQDFLKVFQGKNSQLQEQGNSLGQVWAGIPVQISEDKNYIFTHIGNGSNYIKSQGYPSWRAHHSWRKMYLKESHNYQCRCQQISMKNHFCKCDSVSWLSHHNDKLEVHRKENYSCHDCGEDIMKVSLLNQESIQTEEKPYPCTGYRKAFSNDSSSEVHQQFHLEGKPYTYSSCGKGCNYSSLLHIHQNIEREDDIENSHLKSYQRVHTEEKPCKCGEYGENFNHCSPLNTYELIHTGEMSYRHNIYEKAFSHSLDLNSIFRVHTRDEPHEYEENENVFNQSSCLQVHQKIHTEEKLYTDIEYGKSFICSSNLDIQHRVHMEENSYNSEECGNGFSLASHFQDLQIVHTKEQPYKRYVCSNSFSHNLYLQGHPKIHIGEKPRKEHGNGFNWSSKLKDHQRVHTGQKPYKCNICGKGFNHRSVLNVHQRVHTGEKPYKCEECDKGFSRSSYLQAHQRVHTGEKPYKCEECGKGFSRNSYLQGHQRVHTGEKPYKCEECGKGFSRSSHLQGHQRVHTGEKPFKCEECGKGFSWSFNLQIHQRVHTGEKPYKCEECGKGFSKASTLLAHQRVHTGEKPYQCDECGKSFSQRSYLQSHQSVHSGERPYICEVCGKGFSQRAYLQGHQRVHTRVKPYKCEMCGKGFSQSSRLEAHRRVHTGGKPYKCEVCTKGFSESSRLQAHQRVHVEGRPYKCEQCGKGFSGYSSLQAHHRVHTGEKPYKCEVCGKGFSQRSNLQAHQRVHTGEKPYKCDACGKGFRWSSGLLIHQRVHSSDKFYKSEDYGKDYPSSENLHRNEDSVLF

SEQ ID NO: 6938 - protein, 1071 aa, Homo sapiens
MISAQTLTGRVLVVLVFALSIGALVIYFIDSSNPIESCQNFYKDFTLQIDMAFNVFFLLYFGLRFIAANDKLWFWLEVNSVVDFFTVPPVFVSVYLNRSWLGLRFLRALRLIQFSEILQFLNILKTSNSIKLVNLLSIFISTWLTAAGFIHLVENSGDPWENFQNNQALTYWECVYLLMVTMSTVGYGDVYAKTTLGRLFMVFFILGGLAMFASYVPEIIELIGNRKKYGGSYSAVSGRKHIVVCGHITLESVSNFLKDFLHKDRDDVNVEIVFLHNISPNLELEALFKRHFTQVEFYQGSVLNPHDLARVKIESADACLILANKYCADPDAEDASNIMRVISIKNYHPKIRIITQMLQYHNKAHLLNIPSWNWKEGDDAICLAELKLGFIAQSCLAQGLSTMLANLFSMRSFIKIEEDTWQKYYLEGVSNEMYTEYLSSAFVGLSFPTVCELCFVKLKLLMIAIEYKSANRESRILINPGNHLKIQEGTLGFFIASDAKEVKRAFFYCKACHDDITDPKRIKKCGCKRRWEEHCSLWRLESKGNVRRLNYCRGQQTFSVKVKVAARSRYSKDPFEFKKETPNSRLVTEPVEDEQPSTLSPKKKQRNGGMRNSPNTSPKLMRHDPLLIPGNDQIDNMDSNVKKYDSTGMFHWCAPKEIEKVILTRSEAAMTVLSGHVVVCIFGDVSSALIGLRNLVMPLRASNFHYHELKHIVFVGSIEYLKREWETLHNFPKVSILPGTPLSRADLRAVNINLCDMCVILSANQNNIDDTSLQDKECILASLNIKSMQFDDSIGVLQANSQGFTPPGMDRSSPDNSPVHGMLRQPSITTGVNIPIITELVNDTNVQFLDQDDDDDPDTELYLTQPFACGTAFAVSVLDSLMSATYFNDNILTLIRTLVTGGATPELEALIAEENALRGGYSTPQTLANRDRCRVAQLALLDGPFADLGDGGCYGDLFCKALKTYNMLCFGIYRLRDAHLSTPSQCTKRYVITNPPYEFELVPTDLIFCLMQFDHNAGQSRASLSHSSHSSQSSSKKSSSVHSIPSTANRQNRPKSRESRDKQKYVQEERL

SEQ ID NO: 6939 - protein, 746 aa, Homo sapiens
MDHAEENEILAATQRYYVERPIFSHPVLQERLHTKDKVPDSIADKLKQAFTCTPKKIRNIIYMFLPITKWLPAYKFKEYVLGDLVSGISTGVLQLPQGLAFAMLAAVPPIFGLYSSFYPVIMYCFLGTSRHISIGPFAVISLMIGGVAVRLVPDDIVIPGGVNATNGTEARDALRVKVAMSVTLLSGIIQFCLGVCRFGFVAIYLTEPLVRGFTTAAAVHVFTSMLKYLFGVKTKRYSGIFSVVYSTVAVLQNVKNLNVCSLGVGLMVFGLLLGGKEFNERFKEKLPAPIPLEFFAVVMGTGISAGFNLKESYNVDVVGTLPLGLLPPANPDTSLFHLVYVDAIAIAIVGFSVTISMAKTLANKHGYQVDGNQELIALGLCNSIGSLFQTFSISCSLSRSLVQEGTGGKTQLAGCLASLMILLVILATGFLFESLPQAVLSAIVIVNLKGMFMQFSDLPFFWRTSKIELTIWLTTFVSSLFLGLDYGLITAVIIALLTVIYRTQSPSYKVLGKLPETDVYIDIDAYEEVKEIPGIKIFQINAPIYYANSDLYSNALKRKTGVNPAVIMGARRKAMRKYAKEVGNANMANATVVKATQDAEVDGEDATKPEEEDGEVKYPPIVIKSTFPEEMQRFMPPGDNVHTVILDFTQVNFIDSVGVKTLAGIVKEYGDVGIYVYLAGCSAQVVNDLTRNRFFENPALWELLFHSIHDAVLGSQLREALAEQEASAPPSQEDLEPNATPATPEA

SEQ ID NO: 6940 - protein, 395 aa, Homo sapiens
MGCLGNSKTEDQRNEEKAQREANKKIEKQLQKDKQVYRATHRLLLLGAGESGKSTIVKQMRILHVNGFNGEGGEEDPQAARSNSDGSEKATKVQDIKNNLKEAIETIVAAMSNLVPPVELANPENQFRVDYILSVMNVPDFDFPPEFYEHAKALWEDEGVRACYERSNEYQLIDCAQYFLDKIDVIKQADYVPSDQDLLRCRVLTSGIFETKFQVDKVNFHMFDVGGQRDERRKWIQCFNDVTAIIFVVASSSYNMVIREDNQTNRLQEALNLFKSIWNNRWLRTISVILFLNKQDLLAEKVLAGKSKIEDYFPEFARYTTPEDATPEPGEDPRVTRAKYFIRDEFLRISTASGDGRHYCYPHFTCAVDTENIRRVFNDCRDIIQRMHLRQYELL

SEQ ID NO: 6941 - protein, 1164 aa, Homo sapiens
MALFPAFAGLSEAPDGGSSRKELDWLSNPSFCVGSITSLSQQTEAAPAHVSEGLPLTRSHLKSESSDESDTNKKLKQTSRKKKKEKKKKRKHQHHKKTKRKHGPSSSSRSETDTDSEKDKPSRGVGGSKKESEEPNQGNNAAADTGHRFVWLEDIQAVTGETFRTDKKPDPANWEYKSLYRGDIARYKRKGDSCLGINPKKQCISWEGTSTEKKHSRKQVERYFTKKSVGLMNIDGVAISSKTEPPSSEPISFIPVKDLEDAAPVTTWLNPLGIYDQSTTHWLQGQGPPEQESKQPDAQPDSESAALKAKVEEFNRRVRENPRDTQLWMAFVAFQDEVMKSPGLYAIEEGEQEKRKRSLKLILEKKLAILERAIESNQSSVDLKLAKLKLCTEFWEPSTLVKEWQKLIFLHPNNTALWQKYLLFCQSQFSTFSISKIHSLYGKCLSTLSAVKDGSILSHPALPGTEEAMFALFLQQCHFLRQAGHSEKAISLFQAMVDFTFFKPDSVKDLPTKGQVEFFEPFWDSGEPRAGEKGARGWKAWMHQQERGGWVVINPDEDDDEPEEDDQEIKDKTLPRWQIWLAAERSRDQRHWRPWRPDKTKKQTEEDCEDPERQVLFDDIGQSLIRLSSHDLQFQLVEAFLQFLGVPSGFTPPASCLYLAMDENSIFDNGLYDEKPLTFFNPLFSGASCVGRMDRLGYPRWTRGQNREGEEFIRNVFHLVMPLFSGKEKSQLCFSWLQYEIAKVIWCLHTKNKKRLKSQGKNCKKLAKNLLKEPENCNNFCLWKQYAHLEWLLGNTEDARKVFDTALGMAGSRELKDSDLCELSLLYAELEVELSPEVRRAATARAVHILTKLTESSPYGPYTGQVLAVHILKARKAYEHALQDCLGDSCVSNPAPTDSCSRLISLAKCFMLFQYLTIGIDAAVQIYEQVFAKLNSSVFPEGSGEGDSASSQSWTSVLEAITLMHTSLLRFHMKVSVYPLAPLREALSQALKLYPGNQVLWRSYVQIQNKSHSASKTRRFFDTITRSAKPLEPWLFAIEAEKLRKRLVETVQRLDGREIHATIPETGLMHRIQALFENAMRSDSGSQCPLLWRMYLNFLVSLGNKERSKGVFYKALQNCPWAKVLYLDAVEYFPDEMQEILDLMTEKELRVRLPLEELELLLED

SEQ ID NO: 6942 - protein, 408 aa, Homo sapiens
MNTTDNGVNCLCAICGDRATGKHYGASSCDGCKGFFRRSIRKSHVYSCRFSRQCVVDKDKRNQCRYCRLRKCFRAGMKKEAVQNERDRISTRRSTFDGSNIPSINTLAQAEVRSRQISVSSPGSSTDINVKKIASIGDVCESMKQQLLVLVEWAKYIPAFCELPLDDQVALLRAHAGEHLLLGATKRSMMYKDILLLGNNYVIHRNSCEVEISRVANRVLDELVRPFQEIQIDDNEYACLKAIVFFDPDAKGLSDPVKIKNMRFQVQIGLEDYINDRQYDSRGRFGELLLLLPTLQSITWQMIEQIQFVKLFGMVKIDNLLQEMLLGGASNDGSHLHHPMHPHLSQDPLTGQTILLGPMSTLVHADQISTPETPLPSPPQGSGQEQYKIAANQASVISHQHLSKQKQL

SEQ ID NO: 6943 - protein, 1644 aa, Homo sapiens
MFWCGTCFVTNNMKGSEVSLEKKKKIKMPVKRLREVVSQNHGDHLVLLKDELPCVPPALSANKRLPVGTGTSLNGTSRGSSDLTSARNCYQPLLENPMVSESDFSKDVAVQVLPLDKIEENNKQKANDIFISQYTMGQKDALRTVLKQNVSLCLTGWSDHSGVITTHCSLYLLRLMRSSHLSLPSSWDYRAQSMPVFKEVKVHLLEDAGIEKDAVTQETRISPSGIDSATTVAAATAAAIATAAPLIKVQSDLEAKVNSVTELLSKLQETDKHLQRVTEQQTSIQRKQEKLHCHDHEKQMNVFMEQHIRHLEKLQQQQIDIQTHFISAALKTSSFQPVSMPSSRAVEKYSVKPEHPNLGSCNPSLYNTFASKQAPLKEVEDTSFDKQKSPLETPAPRRFAPVPVSRDDELSKRENLLEEKENMEVSCHRGNVRLLEQILNNNDSLTRKSESSNTTSLTRSKIGWTPEKTNRFPSCEELETTKVTMQKSDDVLHDLGQKEKETNSMVQPKESLSMLKLPDLPQNSVKLQTTNTTRSVLKDAEKILRGVQNNKKVLEENLEAIIRAKDGAAMYSLINALSTNREMSEKIRIRKTVDEWIKTISAEIQDELSRTDYEQKRFDQKNQRTKKGQNMTKDIRTNTQDKTVNKSVIPRKHSQKQIEEHFRNLPMRGMPASSLQKERKEGLLKATTVIQDEDYMLQVYGKPVYQGHRSTLKKGPYLRFNSPSPKSRPQRPKVIERVKGTKVKSIRTQTDFYATKPKKMDSKMKHSVPVLPHGDQQYLFSPSREMPTFSGTLEGHLIPMAILLGQTQSNSDTMPPAGVIVSKPHPVTVTTSIPPSSRKVETGVKKPNIAIVEMKSEKKDPPQLTVQVLPSVDIDSISNSSADVLSPLSSPKEASLPPVQTWIKTPEIMKVDEEEVKFPGTNFDEIIDVIQEEEKCDEIPDSEPILEFNRSVKADSTKYNGPPFPPVASTFQPTADILDKVIERKETLENSLIQWVEQEIMSRIISGLFPVQQQIAPSISVSVSETSEPLTSDIVEGTSSGALQLFVDAGVPVNSNVIKHFVNEALAETIAVMLGDREAKKQGPVATGVSGDASTNETYLPARVCTPLPTPQPTPPCSPSSPAKECVLVKTPDSSPCDSDHDMAFPVKEICAEKGDDMPAIMLVNTPTVTPTTTPPPAAAVFTPTLSDISIDKLKVSSPELPKPWGDGDLPLEEENPNSPQEELHPRAIVMSVAKDEEPESMDFPAQPPPPEPVPFMPFPAGTKAPSPSQMPGSDSSTLESTLSVTVTETETLDKPISEGEILFSCGQKLAPKILEDIGLYLTNLNDSLSSTLHDAVEMEDDPPSEGQVIRMSHKKFHADAILSFAKQNQESAVSQQAVYHSEDLENSVGELSEGQRPQLTAAAENILMGHSLYMQPPVTNTQSLDQQCDPKPLSRQFDTVSGSIYEDSCASHGPMSLGELELEPNSKLVLPTTLLTAQENDVNLPVAAEDFSQYQLKQNQDVKQVEHKPSQSYLRVRNKSDIAPSQQQVSPGDMDRTQIELNPYLTCVFSGLGVHVKKVSCIGKLGLWRFVIQIISSPRWESSATLRFTDAPCQDVSDAAVSEPRGLLSVSESQHNAGGHGVFGGRYLLNGKRQPAQCLCHWF

SEQ ID NO: 6944 - protein, 1045 aa, Homo sapiens
MLTVQVKTSSAIELPDSLAFLWIIPMWYCEGKELENSPDIHIVQAGNLHSLTIAEAFEEDTGRYSCFASNIYGTDSTSAEIYIEGVSSSDSEGDPNKEEMNRIQKPNEVSSPPTTSAVIPPAVPQAQHLVAQPRVATIQQCQSPTNYLQGLDGKPIIAAPVFTKMLQNLSASEGQLVVFECRVKGAPSPKVEWYREGTLIEDSPDFRILQKKPRSMAEPEEICTLVIAEVFAEDSGCFTCTASNKYGTVSSIAQLHVRGNEDLSNNGSLHSANSTTNLAAIEPQPSPPHSEPPSVEQPPKPKLEGVLVNHNEPRSSSRIGLRVHFNLPEDDKGSEASSEAGVVTTRQTRPDSFQERFNGQATKTPEPSSPVKEPPPVLAKPKLDSTQLQQLHNQVLLEQHQLQNPPPSSPKEFPFSMTVLNSNAPPAVTTSSKQVKAPSSQTFSLARPKYFFPSTNTTAATVAPSSSPVFTLSSTPQTIQRTVSKESLLVSHPSVQTKSPGGLSIQNEPLPPGPTEPTPPPFTFSIPSGNQFQPRCVSPIPVSPTSRIQNPVAFLSSVLPSLPAIPPTNAMGLPRSAPSMPSQGLAKKNTKSPQPVNDDNIRETKNAVIRDLGKKITFSDVRPNQQEYKISSFEQRLMNEIEFRLERTPVDESDDEIQHDEIPTGKCIAPIFDKRLKHFRVTEGSPVTFTCKIVGIPVPKVYWFKDGKQISKRNEHCKMRREGDGTCSLHIESTTSDDDGNYTIMAANPQGRISCSGHLMVQSLPIRSRLTSAGQSHRGRSRVQERDKEPLQERFFRPHFLQAPGDMVAHEGRLCRLDCKVSGLPPPELTWLLNGQPVLPDASHKMLVRETGVHSLLIDPLTQRDAGTYKCIATNKTGQNSFSLELSVVAKEVKKAPVILEKLQNCGVPEGHPVRLECRVIGMPPPVFYWKKDNETIPCTRERISMHQDTTGYACLLIQPAKKSDAGWYTLSAKNEAGIVSCTARLDIYAQWHHQIPPPMSVRPSGSRYGSLTSKGLDIFSAFSSMESTMVYSCSSRSVVESDEL

SEQ ID NO: 6945 - protein, 787 aa, Homo sapiens
MAATTANPEMTSDVPSLGPAIASGNSGPGIQGGGAIVQRAIKRRPGLDFDDDGEGNSKFLRCDDDQMSNDKERFARSDDEQSSADKERLARENHSEIERRRRNKMTAYITELSDMVPTCSALARKPDKLTILRMAVSHMKSLRGTGNTSTDGSYKPSFLTDQELKHLILEAADGFLFIVSCETGRVVYVSDSVTPVLNQPQSEWFGSTLYDQVHPDDVDKLREQLSTSENALTGRILDLKTGTVKKEGQQSSMRMCMGSRRSFICRMRCGSSSVDPVSVNRLSFVRNRCRNGLGSVKDGEPHFVVVHCTGYIKAWPPAGVSLPDDDPEAGQGSKFCLVAIGRLQVTSSPNCTDMSNVCQPTEFISRHNIEGIFTFVDHRCVATVGYQPQELLGKNIVEFCHPEDQQLLRDSFQQVVKLKGQVLSVMFRFRSKNQEWLWMRTSSFTFQNPYSDEIEYIICTNTNVKNSSQEPRPTLSNTIQRPQLGPTANLPLEMGSGQLAPRQQQQQTELDMVPGRDGLASYNHSQVVQPVTTTGPEHSKPLEKSDGLFAQDRDPRFSEIYHNINADQSKGISSSTVPATQQLFSQGNTFPPTPRPAENFSGLAPPVTIVQPSASAGQMLAQISRHSNPTQGATPTWTPTTRSGFSAQQVATQATAKTRTSQFGVGSFQTPSSFSSMSLPGAPTASPGAAAYPSLTNRGSNFAPETGQTAGQFQTRTAEGVGVWPQWQGQQPHHRSSSSEQHVQQPPAQQPGQPEVFQEMLSMLGDQSNSYNNEEFPDLTMFPPFSE

SEQ ID NO: 6946 - protein, 1443 aa, Homo sapiens
MAGGAWGRLACYLEFLKKEELKEFQLLLANKAHSRSSSGETPAQPEKTSGMEVASYLVAQYGEQRAWDLALHTWEQMGLRSLCAQAQEGAGHSPSFPYSPSEPHLGSPSQPTSTAVLMPWIHELPAGCTQGSERRVLRQLPDTSGRRWREISASLLYQALPSSPDHESPSQESPNAPTSTAVLGSWGSPPQPSLAPREQEAPGTQWPLDETSGIYYTEIREREREKSEKGRPPWAAVVGTPPQAHTSLQPHHHPWEPSVRESLCSTWPWKNEDFNQKFTQLLLLQRPHPRSQDPLVKRSWPDYVEENRGHLIEIRDLFGPGLDTQEPRIVILQGAAGIGKSTLARQVKEAWGRGQLYGDRFQHVFYFSCRELAQSKVVSLAELIGKDGTATPAPIRQILSRPERLLFILDGVDEPGWVLQEPSSELCLHWSQPQPADALLGSLLGKTILPEASFLITARTTALQNLIPSLEQARWVEVLGFSESSRKEYFYRYFTDERQAIRAFRLVKSNKELWALCLVPWVSWLACTCLMQQMKRKEKLTLTSKTTTTLCLHYLAQALQAQPLGPQLRDLCSLAAEGIWQKKTLFSPDDLRKHGLDGAIISTFLKMGILQEHPIPLSYSFIHLCFQEFFAAMSYVLEDEKGRGKHSNCIIDLEKTLEAYGIHGLFGASTTRFLLGLLSDEGEREMENIFHCRLSQGRNLMQWVPSLQLLLQPHSLESLHCLYETRNKTFLTQVMAHFEEMGMCVETDMELLVCTFCIKFSRHVKKLQLIEGRQHRSTWSPTMVVLFRWVPVTDAYWQILFSVLKVTRNLKELDLSGNSLSHSAVKSLCKTLRRPRCLLETLRLAGCGLTAEDCKDLAFGLRANQTLTELDLSFNVLTDAGAKHLCQRLRQPSCKLQRLQLVSCGLTSDCCQDLASVLSASPSLKELDLQQNNLDDVGVRLLCEGLRHPACKLIRLGKPSVMTPTEGLDTGEMSNSTSSLKRQRLGSERAASHVAQANLKLLDVSKIFPIAEIAEESSPEVVPVELLCVPSPASQGDLHTKPLGTDDDFWGPTGPVATEVVDKEKNLYRVHFPVAGSYRWPNTGLCFVMREAVTVEIEFCVWDQFLGEINPQHSWMVAGPLLDIKAEPGAVEAVHLPHFVALQGGHVDTSLFQMAHFKEEGMLLEKPARVELHHIVLENPSFSPLGVLLKMIHNALRFIPVTSVVLLYHRVHPEEVTFHLYLIPSDCSIRKAIDDLEMKFQFVRIHKPPPLTPLYMGCRYTVSGSGSGMLEILPKELELCYRSPGEDQLFSEFYVGHLGSGIRLQVKDKKDETLVWEALVKPGDLMPATTLIPPARIAVPSPLDAPQLLHFVDQYREQLIARVTSVEVVLDKLHGQVLSQEQYERVLAENTRPSQMRKLFSLSQSWDRKCKDGLYQALKETHPHLIMELWEKGSKKGLLPLSS

SEQ ID NO: 6947 - protein, 384 aa, Homo sapiens
MTWTSGQLQREKQARPGSGAVLAFPDDKDLRVYGPAESQSAVFGDVCPLLTSLLDGYNVCVMAYGQTGSGKSYTMLGRHSDDGPVLPLDPQSDLGIIPRVAEELFRLILENTSRSPKVEVSIVEVYNNDIFDLLAKDSIAAVSGVKREVVTAKDGRTEVALLASEAVGSASKLMELVHGGLQLRAKHPTLVHADSSRSHLIITVTLTTASCSDSTADQACSATLPREQTEAGRAGRSRRASQGALAPQLVPGNPAGHAEQVQARLQLVDSAGSECVGVSGVTGLALREMACISRSLAALAGVLGALLEHRGHAPYRNSRLTHLLQDCLGGDAKLLVILCISPSQRHLAQTLQGLGFGIRARQVQRGPARKKPPSSQTEGKRRPD

SEQ ID NO: 6948 - protein, 624 aa, Homo sapiens
MFHGTVTEELTSHEEWSHYNENIREGQKDFVFVKFNGLHLKSMENLQSCISLRVCIFSNNFITDIHPLQSCIKLIKLDLHGNQIKSLPNTKFWNGLKNLKLLYLHDNGFAKLKNICVLSACPTLIALTMFDCPVSLKKGYRHVLVNSIWPLKALDHHVISDEEIIQNWHLPERFKACNHRLFFNFCPALRKGTTYEEEINNIKHITSKINAILAHNSPVLIVQRWIRGFLVRKNLSPVFFHKKKQQEKIIRGYEAKWIYITKGYEDKLLKDLFFKPETNIKGKLAYWKHNIYYPVDLKNSSEHRKHVSSILCELKPKDLGMKSKTSRHLIQKGQESEDEIVDEKLDTSFRISVFKLPIYTSGSLKNNAVLREKKQHFFPAYPQPIYTTHPKPIIKKDIRLERSMKEFFAPQRAGMKLRTFSDIDKYYTEQKKQEYHKEKVRVVAMAQVARERVRVAVNEHLNQKKYATQKLIEENKETIQNSLRQVWQNRFNYLEKARERKALFLKEKSQKASERLLVQNLNNERTLLTRGLLKIDRLEKNEAVLKEKSLIVKQKLKAEKYRKNLLKEMKKVRSQEIYKRHCEEKFVMDMIAFEKACERLQDAKTKVAIVKTNLDFKVPNGLIK

SEQ ID NO: 6949 - protein, 540 aa, Homo sapiens
AAPRPSPAISVSVSAPAFYAPQKKFGPVVAPKPKVNPFRPGDSEPPPAPGAQRAQMGRVGEIPPPPPEDFPLPPPPLAGDGDDAEGALGGAFPPPPPPIEESFPPAPLEEEIFPSPPPPPEEEGGPEAPIPPPPQVSSGYVPPPVATPFSSKSSTKPAAGGTAPLPPWKSPSSSQPLPQVPAPAQSQTQFHVQPQPQPKPQVQLHVQSQTQPVSLANTQPRGPPASSPAPAPKFSPVTPKFTPVASKFSPGAPGGSGSQPNQKLGHPEALSAGTGSPQPPSFTYAQQREKPRVQEKQHPVPPPAQNQNQVRSPGAPGPLTLKEVEELEQLTQQLMQDMEHPQRQNVAVNELCGRCHQPLARAQPAVRALGQLFHIACFTCHQCAQQLQGQQFYSLEGAPYCEGCYTDTLEKCNTCGEPITDRMLRATGKAYHPHCFTCVVCARPLEGTSFIVDQANRPHCVPDYHKQYAPRCSVCSEPIMPEPGRDETVRVVALDKNFHMKCYKCEDCGKPLSIEADDNGCFPLDGHVLCRKCHTARAQT

SEQ ID NO: 6950 - protein, 1531 aa, Homo sapiens
MPSDFISLLSADLDLESPKSLYSRESVYDLLPKELQLPPSRETSVASMSQTSGGEAGSPPPAVVAADASSAPSSSSMGGACSSFTTSSSPTIYSTSVTDSKAMQVESCSSAVGVSNRGVSEKQLTSNTVQQHPSTPKRHTVLYISPPPEDLLDNSRMSCQDEGCGLESEQSCSMWMEDSPSNFSNMSTSSYNDNTEVPRKSRKRNPKQRPGVKRRDCEESNMDIFDADSAKAPHYVLSQLTTDNKGNSKAGNGTLENQKGTGVKKSPMLCGQYPVKSEGKELKIVVQPETQHRARYLTEGSRGSVKDRTQQGFPTVKLEGHNEPVVLQVFVGNDSGRVKPHGFYQACRVTGRNTTPCKEVDIEGTTVIEVGLDPSNNMTLAVDCVGILKLRNADVEARIGIAGSKKKSTRARLVFRVNIMRKDGSTLTLQTPSSPILCTQPAGVPEILKKSLHSCSVKGEEEVFLIGKNFLKGTKVIFQENVSDENSWKSEAEIDMELFHQNHLIVKVPPYHDQHITLPVSVGIYVVTNAGRSHDVQPFTYTPDPAAAGALNVNVKKEISSPARPCSFEEAMKAMKTTGCNLDKVNIIPNALMTPLIPSSMIKSEDVTPMEVTAEKRSSTIFKTTKSVGSTQQTLENISNIAGNGSFSSPSSSHLPSENEKQQQIQPKAYNPETLTTIQTQDISQPGTFPAVSASSQLPNSDALLQQATQFQTRETQSREILQSDGTVVNLSQLTEASQQQQQSPLQEQAQTLQQQISSNIFPSPNSVSQLQNTIQQLQAGSFTGSTASGSSGSVDLVQQVLEAQQQLSSVLFSAPDGNENVQEQLSADIFQQVSQIQSGVSPGMFSSTEPTVHTRPDNLLPGRAESVHPQSENTLSNQQQQQQQQQQVMESSAAMVMEMQQSICQAAAQIQSELFPSTASANGNLQQSPVYQQTSHMMSALSTNEDMQMQCELFSSPPAVSGNETSTTTTQQVATPGTTMFQTSSSGDGEETGTQAKQIQNSVFQTMVQMQHSGDNQPQVNLFSSTKSMMSVQNSGTQQQGNGLFQQGNEMMSLQSGNFLQQSSHSQAQLFHPQNPIADAQNLSQETQGSLFHSPNPIVHSQTSTTSSEQMQPPMFHSQSTIAVLQGSSVPQDQQSTNIFLSQSPMNNLQTNTVAQEAFFAAPNSISPLQSTSNSEQQAAFQQQAPISHIQTPMLSQEQAQPPQQGLFQPQVALGSLPPNPMPQSQQGTMFQSQHSIVAMQSNSPSQEQQQQQQQQQQQQQQQQQSILFSNQNTMATMASPKQPPPNMIFNPNQNPMANQEQQNQSIFHQQSNMAPMNQEQQPMQFQSQSTVSSLQNPGPTQSESSQTPLFHSSPQIQLVQGSPSSQEQQVTLFLSPASMSALQTSINQQDMQQSPLYSPQNNMPGIQGATSSPQPQATLFHNTAGGTMNQLQNSPGSSQQTSGMFLFGIQNNCSQLLTSGPATLPDQLMAISQPGQPQNEGQPPVTTLLSQQMPENSPLASSINTNQNIEKIDLLVSLQNQGNNLTGSF

SEQ ID NO: 6951 - protein, 703 aa, Homo sapiens
MAAATGDPGLSKLQFAPFSSALDVGFWHELTQKKLNEYRLDEAPKDIKGYYYNGDSAGLPARLTLEFSAFDMSAPTPARCCPAIGTLYNTNTLESFKTADKKLLLEQAANEIWESIKSGTALENPVLLNKFLLLTFADLKKYHFYYWFCYPALCLPESLPLIQGPVGLDQRFSLKQIEALECAYDNLCQTEGVTALPYFLIKYDENMVLVSLLKHYSDFFQGQRTKITIGVYDPCNLAQYPGWPLRNFLVLAAHRWSSSFQSVEVVCFRDRTMQGARDVAHSIIFEVKLPEMAFSPDCPKAVGWEKNQKGGMGPRMVNLSECMDPKRLAESSVDLNLKLMCWRLVPTLDLDKVVSVKCLLLGAGTLGCNVARTLMGWGVRHITFVDNAKISYSNPVRQPLYEFEDCLGGGKPKALAAADRLQKIFPGVNARGFNMSIPMPGHPVNFSSVTLEQARRDVEQLEQLIESHDVVFLLMDTRESRWLPAVIAASKRKLVINAALGFDTFVVMRHGLKKPKQQGAGDLCPNHPVASADLLGSSLFANIPGYKLGCYFCNDVVAPGDSTRDRTLDQQCTVSRPGLAVIAGALAVELMVSVLQHPEGGYAIASSSDDRMNEPPTSLGLVPHQIRGFLSRFDNVLPVSLAFDKCTACSSKVLDQYEREGFNFLAKVFNSSHSFLEDLTGLTLLHQETQAAEIWDMSDDETI

SEQ ID NO: 6952 - protein, 671 aa, Homo sapiens
MHHQQRMAALGTDKELSDLLDFSAMFSPPVSSGKNGPTSLASGHFTGSNVEDRSSSGSWGNGGHPSPSRNYGDGTPYDHMTSRDLGSHDNLSPPFVNSRIQSKTERGSYSSYGRESNLQGCHQQSLLGGDMDMGNPGTLSPTKPGSQYYQYSSNNPRRRPLHSSAMEVQTKKVRKVPPGLPSSVYAPSASTADYNRDSPGYPSSKPATSTFPSSFFMQDGHHSSDPWSSSSGMNQPGYAGMLGNSSHIPQSSSYCSLHPHERLSYPSHSSADINSSLPPMSTFHRSGTNHYSTSSCTPPANGTDSIMANRGSGAAGSSQTGDALGKALASIYSPDHTNNSFSSNPSTPVGSPPSLSAGTAVWSRNGGQASSSPNYEGPLHSLQSRIEDRLERLDDAIHVLRNHAVGPSTAMPGGHGDMHGIIGPSHNGAMGGLGSGYGTGLLSANRHSLMVGTHREDGVALRGSHSLLPNQVPVPQLPVQSATSPDLNPPQDPYRGMPPGLQGQSVSSGSSEIKSDDEGDENLQDTKSSEDKKLDDDKKDIKSITRSRSSNNDDEDLTPEQKAEREKERRMANNARERLRVRDINEAFKELGRMVQLHLKSDKPQTKLLILHQAVAVILSLEQQVRERNLNPKAACLKRREEEKVSSEPPPLSLAGPHPGMGDASNHMGQM

SEQ ID NO: 6953 - protein, 499 aa, Homo sapiens
MNDDPSMEENGVERVCPESLLQSREYSSLPLPRHTSSTDGTITSSDPGLEILNMASCDLDRNSLCKKEEDTRSASPTIEAQGTSPAHDNIAFQDSTSKDKTILNLEAKEEPETIEEHKKEHASGDSVVSPLPVTTVKSVNLRQSENTSANEKEVEAEFLRLSLGFKCDWFTLEKRVKLEERSRDLAEENLKKEITNCLKLLESLTPLCEDDNQAQEIIKKLEKSIKFLSQCAARVASRAEMLGAINQESRVSKAVEVMIQHVENLKRMYAKEHAELEELKQVLLQNERSFNPLEDDDDCQIKKRSASLNSKPSSLRRVTIASLPRNIGNAGMVAGMENNDRFSRRSSSWRILGSKQSEHRPSLPRFISTYSWADAEEEKCELKTKDDSEPSGEETVERTRKPSLSEKKNNPSKWDVSSVYDTIASWATNLKSSIRKANKALWLSIAFIVLFAALMSFLTGQLFQKSVDAAPTQQEDSWTSLEHILWPFTRLRHNGPPPV

SEQ ID NO: 6954 - protein, 1081 aa, Homo sapiens
MESAGLEQLLRELLLPDTERIRRATEQLQIVLRAPAALPALCDLLASAADPQIRQFAAVLTRRRLNTRWRRLAAEQRESLKSLILTALQRETEHCVSLSLAQLSATIFRKEGLEAWPQLLQLLQHSTHSPHSPEREMGLLLLSVVVTSRPEAFQPHHRELLRLLNETLGEVGSPGLLFYSLRTLTTMAPYLSTEDVPLARMLVPKLIMAMQTLIPIDEAKACEALEALDELLESEVPVITPYLSEVLTFCLEVARNVALGNAIRIRILCCLTFLVKVKSKALLKNRLLPPLLHTLFPIVAAEPPPGQLDPEDQDSEEEELEIELMGETPKHFAVQVVDMLALHLPPEKLCPQLMPMLEEALRSESPYQRKAGLLVLAVLSDGAGDHIRQRLLPPLLQIVCKGLEDPSQVVRNAALFALGQFSENLQPHISSYSREVMPLLLAYLKSVPLGHTHHLAKACYALENFVENLGPKVQPYLPELMECMLQLLRNPSSPRAKELAVSALGAIATAAQASLLPYFPAIMEHLREFLLTGREDLQPVQIQSLETLGVLARAVGEPMRPLAEECCQLGLGLCDQVDDPDLRRCTYSLFAALSGLMGEGLAPHLEQITTLMLLSLRSTEGIVPQYDGSSSFLLFDDESDGEEEEELMDEDVEEEDDSEISGYSVENAFFDEKEDTCAAVGEISVNTSVAFLPYMESVFEEVFKLLECPHLNVRKAAHEALGQFCCALHKACQSCPSEPNTAALQAALARVVPSYMQAVNRERERQVVMAVLEALTGVLRSCGTLTLKPPGRLAELCGVLKAVLQRKTACQDTDEEEEEEDDDQAEYDAMLLEHAGEAIPALAAAAGGDSFAPFFAGFLPLLVCKTKQGCTVAEKSFAVGTLAETIQGLGAASAQFVSRLLPVLLSTAQEADPEVRSNAIFGMGVLAEHGGHPAQEHFPKLLGLLFPLLARERHDRVRDNICGALARLLMASPTRKPEPQVLAALLHALPLKEDLEEWVTIGRLFSFLYQSSPDQVIDVAPELLRICSLILADNKIPPDTKAALLLLLTFLAKQHTDSFQAALGSLPVDKAQELQAVLGLS

SEQ ID NO: 6955 - protein, 747 aa, Homo sapiens
MAEAVERTDELVREYLLFRGFTHTLRQLDAEIKADKEKGFRVDKIVDQLQQLMQVYDLAALRDYWSYLERRLFSRLEDIYRPTIHKLKTSLFRFYLVYTIQTNRNDKAQEFFAKQATELQNQAEWKDWFVLPFLPSPDTNPTFATYFSRQWADTFIVSLHNFLSVLFQCMPVPVILNFDAECQRTNQVQEENEVLRQKLFALQAEIHRLKKEEQQPEEEEALVQHKLPPYVSNMDRLGDSELAMVCSQRNASLSQSPRVGFLSSLLPQSKKSPSRLSPAQGPPQPQSSAKKESFGGQGTKGKDPTSGAKDGKSLLSGLATGESGWSQHRQRRLQDHGKERKELFSTTTSQCAEKKPEASGPEAEPCPELHTEPVEPLTRASSAGPEGGGVRPEQPFIVLGQEEYGEHHSSIMHCRVDCSGRRVASLDVDGVIKVWSFNPIMQTKASSISKSPLLSLEWATKRDRLLLLGSGVGTVRLYDTEAKKNLCEININDNMPRILSLACSPNGASFVCSAAAPSLTSQVDFSAPDIGSKGMNQVPGRLLLWDTKTMKQQLQFSLDPEPIAINCTAFNHNGNLLVTGAADGVIRLFDMQQHECAMSWRAHYGEVYSVEFSYDENTVYSIGEDGKFIQWNIHKSGLKVSEYSLPSDATGPFVLSGYSGYKQVQVPRGRLFAFDSEGNYMLTCSATGGVIYKLGGDEKVLESCLSLGGHRAPVVTVDWSTAMDCGTCLTASMDGKIKLTTLLAHKA

SEQ ID NO: 6956 - protein, 1006 aa, Homo sapiens
MLRKELPLLHRVAFLDHLCKQKSEVEEEGEEEEEGEDEASLDPLKPCSPTKEAPTGEQATPAPPQPSCGSEGLLKAIGIPEQTVMQPVSPSRSFPIFQILTSFPVRHKIASGNRQQQRKSQLFWGLPSLHSESLEAIFLSSGGPSPLKWSVCSSVFFNKLAFLPRSNLLLPQYHSSAQFSTHGAHTMEDLEGMAPDPQLLPPPSSPSVSSLLLHLRPFPVDHKGVLSGAEAPTQSPGTSPLEVLPGYETHLETTGHKKMPQAFEPPMPPPCQSPASLSEPRKVSPEGGLAISKDFWGTVGYREKPQASESSMPVPCPPLDSLPELQRESSLEDPSRYKPQWECRENSGNLWAFESPVLDLNPELSGTSPECVPPASETPWKGMQSRENIWVPADPVSPPSLPSVPLLESLVMGPQGVLSESKALWETMGQKENLWASDSPDPVHSTPPTTLMEPHRINPGECLATSEATWKDTEHSRNSSASRSPSLALSPPPALAPELLRVRSMGVLSDSEARCGDIQKTKNSWASKHPACNLPQDLHGASPLGVLSDSQSIVGEMEQKENCVPVFPGRGSSPSSNSVSKSHVSEPIADQSNYKPDGEAVEQRKNHWATELPAPSSLSTPLPEPHIDLELVWRNVQQREVPQGPSPLAVDPLHPVPQPPTLAEAVKIERTHPGLPKGVTCPGVKAEAPLSQRWTVPELLTHPGIHAWQWSRELKLRLKKLRQSPASRAPGPSQSFCSSPILSSTIPDFWGLPSCPPQQIYPPNPCPHSSSCHPQEVQRTVPQPVQSSHCHHFQSSSQLQPQESGRAEQGSQRGEKMKGKMVSQVPSQGPCVHMEAGVDYLSPGPGEPSNSKVLVSGKRKDKASASSSAKKREHPRKPKAGDHRRGTARLGLSTVTGKNHPAQARSLVEAPVSTFPQRSQHRGQSSQHTALPQLLLPKASGPQDQPEAGRRASDILTPRHCKHCPWAHMEKYLSFPTLKASLTRGLQKVLAKCLDNHRPLPTKSSQ

SEQ ID NO: 6957 - protein, 314 aa, Homo sapiens
MVAPVWYLVAAALLVGFILFLTRSRGRAASAGQEPLHNEELAGAGRVAQPGPLEPEEPRAGGRPRRRRDLGSRLQAQRRAQRVAWAEADENEEEAVILAQEEEGVEKPAETHLSGKIGAKKLRKLEEKQARKAQREAEEAEREERKRLESQREAEWKKEEERLRLEEEQKEEEERKAREEQAQREHEEYLKLKEAFVVEEEGVGETMTEEQSQSFLTEFINYIKQSKVVLLEDLASQVGLRTQDTINRIQDLLAEGTITGVIDDRGKFIYITPEELAAVANFIRQRGRVSIAELAQASNSLIAWGRESPAQAPA

SEQ ID NO: 6958 - protein, 648 aa, Homo sapiens
MNRYTTMRQLGDGTYGSVLMGKSNESGELVAIKRMKRKFYSWDECMNLREVKSLKKLNHANVIKLKEVIRENDHLYFIFEYMKENLYQLMKDRNKLFPESVIRNIMYQILQGLAFIHKHGFFHRDMKPENLLCMGPELVKIADFGLARELRSQPPYTDYVSTRWYRAPEVLLRSSVYSSPIDVWAVGSIMAELYMLRPLFPGTSEVDEIFKICQVLGTPKKSDWPEGYQLASSMNFRFPQCVPINLKTLIPNASNEAIQLMTEMLNWDPKKRPTASQALKHPYFQVGQVLGPSSNHLESKQSLNKQLQPLESKPSLVEVEPKPLPDIIDQVVGQPQPKTSQQPLQPIQPPQNLSVQQPPKQQSQEKPPQTLFPSIVKNMPTKPNGTLSHKSGRRRWGQTIFKSGDSWEELEDYDFGASHSKKPSMGVFKEKRKKDSPFRLPEPVPSGSNHSTGENKSLPAVTSLKSDSELSTAPTSKQYYLKQSRYLPGVNPKKVSLIASGKEINPHTWSNQLFPKSLGPVGAELAFKRSNAEESIIKPIEKLSCNETFPEKLEDPQGNLGSYATYNQSGYIPSFLKKEVQSAGQRIHLAPLNATASEYTWNTKTGRGQFSGRTYNPTAKNLNIVNRAQPIPSVHGRTDWVAKYGGHR

SEQ ID NO: 6959 - protein, 214 aa, Homo sapiens
MAEPSAATQSHSISSSSFGAEPSAPGGGGSPGACPALGTKSCSSSCAVHDLIFWRDVKKTGFVFGTTLIMLLSLAAFSVISVVSYLILALLSVTISFRIYKSVIQAVQKSEEGHPFKPRLITMLASPEIRPSQLLKRSKQNSLESPKKRQNKYMETRNATVTKTPFNSYNVVTCTMKENTQCQLEPAFQAFFLIWCFLPSFPFNPQYQAQKLMD

SEQ ID NO: 6960 - protein, 412 aa, Homo sapiens
MMEGHFPQSDVIGQVLPEATTTAFEYEDEDGDRITVRSDEEMKAMLSYYYSTVMEQQVNGQLIEPLQIFPRACKPPGERNIHGLKVNTRAGPSQHSSPAVSDSLPSNSLKKSSAELKKILANGQMNEQDIRYRDTLGHGNGGTVYKAYHVPSGKILAVKVILLDITLELQKQIMSELEILYKCDSSYIIGFYGAFFVENRISICTEFMDGGSLDVYRKMPEHVLGRIAVAVVKGLTYLWSLKILHRDVKPSNMLVNTRGQVKLCDFGVSTQLVNSIAKTYVGTNAYMAPERISGEQYGIHSDVWSLGISFMELALGRFPYPQIQKNQGSLMPLQLLQCIVDEDSPVLPVGEFSEPFVHFITQCMRKQPKERPAPEELMGHPFIVQFNDGNAAVVSMWVCRALEERRSQQGPP

SEQ ID NO: 6961 - protein, 824 aa, Homo sapiens
MLPTKNRIKREKIHERCKNICPPKDTFERTLLHTHDKSRTDLEQVPKIFMKPDFALDDSLTFNSVLPWSHFNTAGGKGNRDAASSKLLQEKLSHYLDIVEVNIAHQISLRSEAFFHAMTSQHELQDYLRKTSQAVKMLRDKIAQIDKVMCEGSLHILRLALTRNNCVKVYNKLKLMATVHQTQPTVQVLLSTSEFVGALDLIATTQEVLQQELQGIHSFRHLGSQLCELEKLIDKMMIAEFSTYSHSDLNRPLEDDCQVLEECVINKVSQTEEIDTDVVVKLADQMRMLNFPQWFDLLKDIFSKFTIFLQRVKATLNIIHSVVLSVLDKNQRTRELEEISQQKNAAKDNSLDTEVAYLIHEGMFISDAFGEGELTPIAVDTTSQRNASPNSEPCSSDSVSEPECTTDSSSSKEHTSSSAIPGGVDIMVSEDMKLTDSELGKLANNIQELLYSASDICHDRAVKFLMSRAKDGFLEKLNSMEFITLSRLMETFILDTEQICGRKSTSLLGALQSQAIKFVNRFHEERKTKLSLLLDNERWKQADVPAEFQDLVDSLSDGKIALPEKKSGATEERKPAEVLIVEGQQYAVVGTVLLLIRIILEYCQCVDNIPSVTTDMLTRLSDLLKYFNSRSCQLVLGAGALQVVGLKTITTKNLALSSRCLQLIVHYIPVIRAHFEARLPPKQYSMLRHFDHITKDYHDHIAEISAKLVAIMDSLFDKLLSKYEVKAPVPSACFRNICKQMTKMHEAIFDLLPEEQTQMLFLRINASYKLHLKKQLSHLNVINDGGPQNGLVTADVAFYTGNLQALKGLKDLDLNMAEIWEQKR

SEQ ID NO: 6962 - protein, 912 aa, Homo sapiens
MEDFARGAASPGPSRPGLVPVSIIGAEDEDFENELETNSEEQNSQFQSLEQVKRRPAHLMALLQHVALQFEPGPLLCCLHADMLGSLGPKEAKKAFLDFYHSFLEKTAVLRVPVPPNVAFELDRTRADLISEDVQRRFVQEVVQSQQVAVGRQLEDFRSKRLMGMTPWEQELAQLEAWVGRDRASYEARERHVAERLLMHLEEMQHTISTDEEKSAAVVNAIGLYMRHLGVRTKSGDKKSGRNFFRKKVMGNRRSDEPAKTKKGLSSILDAARWNRGEPQVPDFRHLKAEVDAEKPGATDRKGGVGMPSRDRNIGAPGQDTPGVSLHPLSLDSPDREPGADAPLELGDSSPQGPMSLESLAPPESTDEGAETESPEPGDEGEPGRSGLELEPEEPPGWRELVPPDTLHSLPKSQVKRQEVISELLVTEAAHVRMLRVLHDLFFQPMAECLFFPLEELQNIFPSLDELIEVHSLFLDRLMKRRQESGYLIEEIGDVLLARFDGAEGSWFQKISSRFCSRQSFALEQLKAKQRKDPRFCAFVQEAESRPRCRRLQLKDMIPTEMQRLTKYPLLLQSIGQNTEEPTEREKVELAAECCREILHHVNQAVRDMEDLLRLKDYQRRLDLSHLRQSSDPMLSEFKNLDITKKKLVHEGPLTWRVTKDKAVEVHVLLLDDLLLLLQRQDERLLLKSHSRTLTPTPDGKTMLRPVLRLTSAMTREVATDHKAFYVLFTWDQEAQIYELVAQTVSERKNWCALITETAGSLKVPAPASRPKPRPSPSSTREPLLSSSENGNGGRETSPADARTERILSDLLPFCRPGPEGQLAATALRKVLSLKQLLFPAEEDNGAGPPRDGDGVPGGGPLSPARTQEIQENLLSLEETMKQLEELEEEFCRLRPLLSQLGGNSVPQPGCT

SEQ ID NO: 6963 - protein, 1980 aa, Homo sapiens
MAARLLAPPGPDSFKPFTPESLANIERRIAESKLKKPPKADGSHREDDEDSKPKPNSDLEAGKSLPFIYGDIPQGLVAVPLEDFDPYYLTQKTFVVLNRGKTLFRFSATPALYILSPFNLIRRIAIKILIHSVFSMIIMCTILTNCVFMTFSNPPDWSKNVEYTFTGIYTFESLVKIIARGFCIDGFTFLRDPWNWLDFSVIMMAYITEFVNLGNVSALRTFRVLRALKTISVIPGLKTIVGALIQSVKKLSDVMILTVFCLSVFALIGLQLFMGNLRNKCVVWPINFNESYLENGTKGFDWEEYINNKTNFYTVPGMLEPLLCGNSSDAGQCPEGYQCMKAGRNPNYGYTSFDTFSWAFLALFRLMTQDYWENLYQLTLRAAGKTYMIFFVLVIFVGSFYLVNLILAVVAMAYEEQNQATLEEAEQKEAEFKAMLEQLKKQQEEAQAAAMATSAGTVSEDAIEEEGEEGGGSPRSSSEISKLSSKSAKERRNRRKKRKQKELSEGEEKGDPEKVFKSESEDGMRRKAFRLPDNRIGRKFSIMNQSLLSIPGSPFLSRHNSKSSIFSFRGPGRFRDPGSENEFADDEHSTVEESEGRRDSLFIPIRARERRSSYSGYSGYSQGSRSSRIFPSLRRSVKRNSTVDCNGVVSLIGGPGSHIGGRLLPEATTEVEIKKKGPGSLLVSMDQLASYGRKDRINSIMSVVTNTLVEELEESQRKCPPCWYKFANTFLIWECHPYWIKLKEIVNLIVMDPFVDLAITICIVLNTLFMAMEHHPMTPQFEHVLAVGNLVFTGIFTAEMFLKLIAMDPYYYFQEGWNIFDGFIVSLSLMELSLADVEGLSVLRSFRLLRVFKLAKSWPTLNMLIKIIGNSVGALGNLTLVLAIIVFIFAVVGMQLFGKSYKECVCKINQDCELPRWHMHDFFHSFLIVFRVLCGEWIETMWDCMEVAGQAMCLIVFMMVMVIGNLVVLNLFLALLLSSFSADNLAATDDDGEMNNLQISVIRIKKGVAWTKLKVHAFMQAHFKQREADEVKPLDELYEKKANCIANHTGADIHRNGDFQKNGNGTTSGIGSSVEKYIIDEDHMSFINNPNLTVRVPIAVGESDFENLNTEDVSSESDPEGSKDKLDDTSSSEGSTIDIKPEVEEVPVEQPEEYLDPDACFTEGCVQRFKCCQVNIEEGLGKSWWILRKTCFLIVEHNWFETFIIFMILLSSGALAFEDIYIEQRKTIRTILEYADKVFTYIFILEMLLKWTAYGFVKFFTNAWCWLDFLIVAVSLVSLIANALGYSELGAIKSLRTLRALRPLRALSRFEGMRVVVNALVGAIPSIMNVLLVCLIFWLIFSIMGVNLFAGKYHYCFNETSEIRFEIEDVNNKTECEKLMEGNNTEIRWKNVKINFDNVGAGYLALLQVATFKGWMDIMYAAVDSRKPDEQPKYEDNIYMYIYFVIFIIFGSFFTLNLFIGVIIDNFNQQKKKFGGQDIFMTEEQKKYYNAMKKLGSKKPQKPIPRPLNKIQGIVFDFVTQQAFDIVIMMLICLNMVTMMVETDTQSKQMENILYWINLVFVIFFTCECVLKMFALRHYYFTIGWNIFDFVVVILSIVGMFLADIIEKYFVSPTLFRVIRLARIGRILRLIKGAKGIRTLLFALMMSLPALFNIGLLLFLVMFIFSIFGMSNFAYVKHEAGIDDMFNFETFGNSMICLFQITTSAGWDGLLLPILNRPPDCSLDKEHPGSGFKGDCGNPSVGIFFFVSYIIISFLIVVNMYIAIILENFSVATEESADPLSEDDFETFYEIWEKFDPDATQFIEYCKLADFADALEHPLRVPKPNTIELIAMDLPMVSGDRIHCLDILFAFTKRVLGDSGELDILRQQMEERFVASNPSKVSYEPITTTLRRKQEEVSAVVLQRAYRGHLARRGFICKKTTSNKLENGGTHREKKESTPSTASLPSYDSVTKPEKEKQQRAEEGRRERAKRQKEVRESKC

SEQ ID NO: 6964 - protein, 457 aa, Homo sapiens
MLLPQLCWLPLLAGLLPPVPAQKFSALTFLRVDQDKDKDCSLDCAGSPQKPLCASDGRTFLSRCEFQRAKCKDPQLEIAYRGNCKDVSRCVAERKYTQEQARKEFQQVFIPECNDDGTYSQVQCHSYTGYCWCVTPNGRPISGTAVAHKTPRCPGSVNEKLPQREGTGKTVSLQIFSVLNSDDAAAPALETQPQGDEEDIASRYPTLWTEQVKSRQNKTNKNSVSSCDQEHQSALEEAKQPKNDNVVIPECAHGGLYKPVQCHPSTGYCWCVLVDTGRPIPGTSTRYEQPKCDNTARAHPAKARDLYKGRQLQGCPGAKKHEFLTSVLDALSTDMVHAASDPSSSSGRLSEPDPSHTLEERVVHWYFKLLDKNSSGDIGKKEIKPFKRFLRKKSKPKKCVKKFVEYCDVNNDKSISVQELMGCLGVAKEDGKADTKKRHTPRGHAESTSNRQPRKQG

SEQ ID NO: 6965 - protein, 664 aa, Homo sapiens
MPYLYRAPGPQAHPVPKDARITHSSGQSFEQMRQECLQRGTLFEDADFPASNSSLFYSERPQIPFVWKRPGEIVKNPEFILGGATRTDICQGELGDCWLLAAIASLTLNQKALARVIPQDQSFGPGYAGIFHFQFWQHSEWLDVVIDDRLPTFRDRLVFLHSADHNEFWSALLEKAYAKLNGSYEALKGGSAIEAMEDFTGGVAETFQTKEAPENFYEILEKALKRGSLLGCFIDTRSAAESEARTPFGLIKGHAYSVTGIDQVSFRGQRIELIRIRNPWGQVEWNGSWSDRMAFKDFKAHFDKVEICNLTPDALEEDAIHKWEVTVHQGSWVRGSTAGGCRNFLDTFWTNPQIKLSLTEKDEGQEECSFLVALMQKDRRKLKRFGANVLTIGYAIYECPDKDEHLNKDFFRYHASRARSKTFINLREVSDRFKLPPGEYILIPSTFEPHQEADFCLRIFSEKKAITRDMDGNVDIDLPEPPKPTPPDQETEEEQRFRALFEQVAGEDMEVTAEELEYVLNAVLQKKKDIKFKKLSLISCKNIISLMDTSGNGKLEFDEFKVFWDKLKQWINLFLRFDADKSGTMSTYELRTALKAAGFQLSSHLLQLIVLRYADEELQLDFDDFLNCLVRLENASRVFQALSTKNKEFIHLNINEFIHLTMNI

SEQ ID NO: 6966 - protein, 410 aa, Homo sapiens
MPYSTNKELILGIMVGTAGISLLLLWYHKVRKPGIAMKLPEFLSLGNTFNSITLQDEIHDDQGTTVIFQERQLQILEKLNELLTNMEELKEEIRFLKEAIPKLEEYIQDELGGKITVHKISPQHRARKRRLPTIQSSATSNSSEEAESEGGYITANTDTEEQSFPVPKAFNTRVEELNLDVLLQKVDHLRMSESGKSESFELLRDHKEKFRDEIEFMWRFARAYGDMYELSTNTQEKKHYANIGKTLSERAINRAPMNGHCHLWYAVLCGYVSEFEGLQNKINYGHLFKEHLDIAIKLLPEEPFLYYLKGRYCYTVSKLSWIEKKMAATLFGKIPSSTVQEALHNFLKAEELCPGYSNPNYMYLAKCYTDLEENQNALKFCNLALLLPTVTKEDKEAQKEMQKIMTSLKR

SEQ ID NO: 6967 - protein, 673 aa, Homo sapiens
MAKPAQGAKYRGSIHDFPGFDPNQDAEALYTAMKGFGSDKEAILDIITSRSNRQRQEVCQSYKSLYGKDLIADLKYELTGKFERLIVGLMRPPAYCDAKEIKDAISGIGTDEKCLIEILASRTNEQMHQLVAAYKDAYERDLEADIIGDTSGHFQKMLVVLLQGTREEDDVVSEDLVQQDVQDLYEAGELKWGTDEAQFIYILGNRSKQHLRLVFDEYLKTTGKPIEASIRGELSGDFEKLMLAVVKCIRSTPEYFAERLFKAMKGLGTRDNTLIRIMVSRSELDMLDIREIFRTKYEKSLYSMIKNDTSGEYKKTLLKLSGGDDDAAGQFFPEAAQVAYQMWELSAVARVELKGTVRPANDFNPDADAKALRKAMKGLGTDEDTIIDIITHRSNVQRQQIRQTFKSHFGRDLMTDLKSEISGDLARLILGLMMPPAHYDAKQLKKAMEGAGTDEKALIEILATRTNAEIRAINEAYKEDYHKSLEDALSSDTSGHFRRILISLATGHREEGGENLDQAREDAQVAAEILEIADTPSGDKTSLETRFMTILCTRSYPHLRRVFQEFIKMTNYDVEHTIKKEMSGDVRDAFVAIVQSVKNKPLFFADKLYKSMKGAGTDEKTLTRIMVSRSEIDLLNIRREFIEKYDKSLHQAIEGDTSGDFLKALLALCGGED

SEQ ID NO: 6968 - protein, 695 aa, Homo sapiens
MVAERTHKAAATGARGPGELGAPGTVALVAARAERGARLPSPGSCGLLTLALCSLALSLLAHFRTAELQARVLRLEAERGEQQMETAILGRVNQLLDEKWKLHSRRRREAPKTSPGCNCPPGPPGPTGRPGLPGDKGAIGMPGRVGSPGDAGLSIIGPRGPPGQPGTRGFPGFPGPIGLDGKPGHPGPKGDMGLTGPPGQPGPQGQKGEKGQCGEYPHRECLSSMPAALRSSQIIALKGEQSQASIQGPPGPPGPPGPSGPLGHPGLPGPMGPPGLPGPPGPKGDPGIQGYHGRKGERGMPGMPGKHGAKGAPGIAVAGMKGEPGIPGTKGEKGAEGSPGLPGLLGQKGEKGDAGNSIGGGRGEPGPPGLPGPPGPKGEAGVDGQVGPPGQPGDKGERGAAGEQGPDGPKGSKGEPGKGEMVDYNGNINEALQEIRTLALMGPPGLPGQIGPPGAPGIPGQKGEIGLPGPPGHDGEKGPRGKPGDMGPPGPQGPPGKDGPPGVKGENGHPGSPGEKGEKGETGQAGSPGEKGEAGEKGNPGAEVPGLPGPEGPPGPPGLQGVPGPKGEAGLDGAKGEKGFQGEKGDRGPLGLPGASGLDGRPGPPGTPGPIGVPGPAGPKGERGSKGDPGMTGPTGAAGLPGLHGPPGDKGNRGERGKKGSRGPKGDKGDQGAPGLDAPCPLGEDGLPVQGCWNK

SEQ ID NO: 6969 - protein, 455 aa, Homo sapiens
MVFLSGNASDSSNCTQPPAPVNISKAILLGVILGGLILFGVLGNILVILSVACHRHLHSVTHYYIVNLAVADLLLTSTVLPFSAIFEVLGYWAFGRVFCNIWAAVDVLCCTASIMGLCIISIDRYIGVSYPLRYPTIVTQRRGLMALLCVWALSLVISIGPLFGWRQPAPEDETICQINEEPGYVLFSALGSFYLPLAIILVMYCRVYVVAKRESRGLKSGLKTDKSDSEQVTLRIHRKNAPAGGSGMASAKTKTHFSVRLLKFSREKKAAKTLGIVVGCFVLCWLPFFLVMPIGSFFPDFKPSETVFKIVFWLGYLNSCINPIIYPCSSQEFKKAFQNVLRIQCLCRKQSSKHALGYTLHPPSQAVEGQHKDMVRIPVGSRETFYRISKTDGVCEWKFFSSMPRGSARITVSKDQSSCTTARRGMDCRYFTKNCREHIKHVNFMMPPWRKGSEC

SEQ ID NO: 6970 - protein, 1135 aa, Homo sapiens
MRSRGSDTEGSAQKKFPRHTKGHSFQGPKNMKHRQQDKDSPSESDVILPCPKAEKPHSGNGHQAEDLSRDDLLFLLSILEGELQARDEVIGILKAEKMDLALLEAQYGFVTPKKVLEALQRDAFQAKSTPWQEDIYEKPMNELDKVVEKHKESYRRILGQLLVAEKSRRQTILELEEEKRKHKEYMEKSDEFICLLEQECERLKKLIDQEIKSQEEKEQEKEKRVTTLKEELTKLKSFALMVVDEQQRLTAQLTLQRQKIQELTTNAKETHTKLALAEARVQEEEQKATRLEKELQTQTTKFHQDQDTIMAKLTNEDSQNRQLQQKLAALSRQIDELEETNRSLRKAEEELQDIKEKISKGEYGNAGIMAEVEELRKRVLDMEGKDEELIKMEEQCRDLNKRLERETLQSKDFKLEVEKLSKRIMALEKLEDAFNKSKQECYSLKCNLEKERMTTKQLSQELESLKVRIKELEAIESRLEKTEFTLKEDLTKLKTLTVMFVDERKTMSEKLKKTEDKLQAASSQLQVEQNKVTTVTEKLIEETKRALKSKTDVEEKMYSVTKERDDLKNKLKAEEEKGNDLLSRVNMLKNRLQSLEAIEKDFLKNKLNQDSGKSTTALHQENNKIKELSQEVERLKLKLKDMKAIEDDLMKTEDEYETLERRYANERDKAQFLSKELEHVKMELAKYKLAEKTETSHEQWLFKRLQEEEAKSGHLSREVDALKEKIHEYMATEDLICHLQGDHSVLQKKLNQQENRNRDLGREIENLTKELERYRHFSKSLRPSLNGRRISDPQVFSKEVQTEAVDNEPPDYKSLIPLERAVINGQLYEESENQDEDPNDEGSVLSFKCSQSTPCPVNRKLWIPWMKSKEGHLQNGKMQTKPNANFVQPGDLVLSHTPGQPLHIKVTPDHVQNTATLEITSPTTESPHSYTSTAVIPNCGTPKQRITILQNASITPVKSKTSTEDLMNLEQGMSPITMATFARAQTPESCGSLTPERTMSPIQVLAVTGSASSPEQGRSPEPTEISAKHAIFRVSPDRQSSWQFQRSNSNSSSVITTEDNKIHIHLGSPYMQAVASPVRPASPSAPLQDNRTQGLINGALNKTTNKVTSSITITPTATPLPRQSQITVEPLLLPH

SEQ ID NO: 6971 - protein, 562 aa, Homo sapiens
MNTNDAKEYLARREIPQLFESLLNGLMCSKPEDPVEYLESCLQKVKELGGCDKVKWDTFVSQEKKTLPPLNGGQSRRSFLRNVMPENSNFPYRRYDRLPPIHQFSIESDTDLSETAELIEEYEVFDPTRPRPKIILVIGGPGSGKGTQSLKIAERYGFQYISVGELLRKKIHSTSSNRKWSLIAKIITTGELAPQETTITEIKQKLMQIPDEEGIVIDGFPRDVAQALSFEDQICTPDLVVFLACANQRLKERLLKRAEQQGRPDDNVKATQRRLMNFKQNAAPLVKYFQEKGLIMTFDADRDEDEVFYDISMAVDNKLFPNKEAAAGSSDLDPSMILDTGEIIDTGSDYEDQGDDQLNVFGEDTMGGFMEDLRKCKIIFIIGGPGSGKGTQCEKLVEKYGFTHLSTGELLREELASESERSKLIRDIMERGDLVPSGIVLELLKEAMVASLGDTRGFLIDGYPREVKQGEEFGRRIGDPQLVICMDCSADTMTNRLLQRSRSSLPVDDTTKTIAKRLEAYYRASIPVIAYYETKTQLHKINAEGTPEDVFLQLCTAIDSIF

SEQ ID NO: 6972 - protein, 749 aa, Homo sapiens
MAELGAGGDGHRGGDGAVRSETAPDSYKVQDKKNASSRPASAISGQNNNHSGNKPDPPPVLRVDDRQRLARERREEREKQLAAREIVWLEREERARQHYEKHLEERKKRLEEQRQKEERRRAAVEEKRRQRLEEDKERHEAVVRRTMERSQKPKQKHNRWSWGGSLHGSPSIHSADPDRRSVSTMNLSKYVDPVISKRLSSSSATLLNSPDRARRLQLSPWESSVVNRLLTPTHSFLARSKSTAALSGEAASCSPIIMPYKAAHSRNSMDRPKLFVTPPEGSSRRRIIHGTASYKKERERENVLFLTSGTRRAVSPSNPKARQPARSRLWLPSKSLPHLPGTPRPTSSLPPGSVKAAPAQVRPPSPGNIRPVKREVKVEPEKKDPEKEPQKVANEPSLKGRAPLVKVEEATVEERTPAEPEVGPAAPAMAPAPASAPAPASAPAPAPVPTPAMVSAPSSTVNASASVKTSAGTTDPEEATRLLAEKRRLAREQREKEERERREQEELERQKREELAQRVAEERTTRREEESRRLEAEQAREKEEQLQRQAEERALREREEAERAQRQKEEEARVREEAERVRQEREKHFQREEQERLERKKRLEEIMKRTRRTEATDKKTSDQRNGDIAKGALTGGTEVSALPCTTNAPGNGKPVGSPHVVTSHQSKVTVESTPDLEKQPNENGVSVQNENFEEIINLPIGSKPSRLDVTNSESPEIPLNPILAFDDEGTLGPLPQVDGVQTQQTAEVI

SEQ ID NO: 6973 - protein, 681 aa, Homo sapiens [sequence omitted]

SEQ ID NO: 6974 - protein, 1365 aa, Homo sapiens
METQLQSIFEEVVKTEVIEEAFPGMFMDTPEDEKTKLISCLGAFRQFWGGLSQESHEQCIQWIVKFIHGQHSPKRISFLYDCLAMAVETGLLPPRLVCESLINSDTLEWERTQLWALTFKLVRKIIGGVDYKGVRDLLKVILEKILTIPNTVSSAVVQQLLAAREVIAYILERNACLLPAYFAVTEIRKLYPEGKLPHWLLGNLVSDFVDTFRPTARINSICGRCSLLPVVNNSGAICNSWKLDPATLRFPLKGLLPYDKDLFEPQTALLRYVLEQPYSRDMVCNMLGLNKQTLNIAQHKQRCPVLEDQLVDLVVYAMERSETEEKFDDGGTSQLLWQHLSSQLIFFVLFQFASFPHMVLSLHQKLAGRGLIKGRDHLMWVLLQFISGSIQKNALADFLPVMKLFDLLYPEKEYIPVPDINKPQSTHAFAMTCIWIHLNRKAQNDNSKLQIPIPHSLRLHHEFLQQSLRNKSLQMNDYKIALLCNAYSTNSECFTLPMGALVETIYGNGIMRIPLPGTNCMASGSITPLPMNLLDSLTVHAKMSLIHSIATRVIKLAHAKSSVALAPALVETYSRLLVYMEIESLGIKGFISQLLPTVFKSHAWGILHTLLEMFSYRMHHIQPHYRVQLLSHLHTLAAVAQTNQNQLHLCVESTALRLITALGSSEVQPQFTRFLSDPKTVLSAESEELNRALILTLARATHVTDFFTGSDSIQGTWCKDILQTIMSFTPHNWASHTLSCFPGPLQAFFKQNNVPQESRFNLKKNVEEEYRKWKSMSNENDIITHFSMQGSPPLFLCLLWKMLLETDHINQIGYRVLERIGARALVAHVRTFADFLVYEFSTSAGGQQLNKCIEILNDMVWKYNIVTLDRLILCLAMRSHEGNEAQVCYFIIQLLLLKPNDFRNRVSDFVKENSPEHWLQNDWHTKHMNYHKKYPEKLYFEGLAEQVDPPVQIQSPYLPIYFGNVCLRFLPVFDIVIHRFLELLPVSKSLETLLDHLGGLYKFHDRPVTYLYNTLHYYEMHLRDRAFLKRKLVHAIIGSLKDNRPQGWCLSDTYLKCAMNAREENPWVPDDTYYCRLIGRLVDTMAGKSPGPFPNCDWRFNEFPNPAAHALHVTCVELMALAVSGKEVGNALLNVVLKSQPLVPRENITAWMNAIGLIITALPEPYWIVLHDRIVSVISSPSLTSETEWVGYPFRLFDFTACHQSYSEMSCSYTLALAHAVWHHSSIGQLSLIPKFLTEVLLPIVKTEFQLLYVYHLVGPFLQRFQQERTRCMIEIGVAFYDMLLNVDQCSTHLNYMDPICDFLYHMKYMFTGDSVKEQVEKIICNLKPALKLRLRFITHISKMEPAAVPPQAMNSGSPAPQSNQ

SEQ ID NO: 6975 - protein, 2750 aa, Homo sapiens
MSDKMSSFLHIGDICSLYAEGSTNGFISTLGLVDDRCVVQPETGDLNNPPKKFRDCLFKLCPMNRYSAQKQFWKAAKPGANSTTDAVLLNKLHHAADLEKKQNETENRKLLGTVIQYGNVIQLLHLKSNKYLTVNKRLPALLEKNAMRVTLDEAGNEGSWFYIQPFYKLRSIGDSVVIGDKVVLNPVNAGQPLHASSHQLVDNPGCNEVNSVNCNTSWKIVLFMKWSDNKDDILKGGDVVRLFHAEQEKFLTCDEHRKKQHVFLRTTGRQSATSATSSKALWEVEVVQHDPCRGGAGYWNSLFRFKHLATGHYLAAEVDPDFEEECLEFQPSVDPDQDASRSRLRNAQEKMVYSLVSVPEGNDISSIFELDPTTLRGGDSLVPRNSYVRLRHLCTNTWVHSTNIPIDKEEEKPVMLKIGTSPVKEDKEAFAIVPVSPAEVRDLDFANDASKVLGSIAGKLEKGTITQNERRSVTKLLEDLVYFVTGGTNSGQDVLEVVFSKPNRERQKLMREQNILKQIFKLLQAPFTDCGDGPMLRLEELGDQRHAPFRHICRLCYRVLRHSQQDYRKNQEYIAKQFGFMQKQIGYDVLAEDTITALLHNNRKLLEKHITAAEIDTFVSLVRKNREPRFLDYLSDLCVSMNKSIPVTQELICKAVLNPTNADILIETKLVLSRFEFEGVSSTGENALEAGEDEEEVWLFWRDSNKEIRSKSVRELAQDAKEGQKEDRDVLSYYRYQLNLFARMCLDRQYLAINEISGQLDVDLILRCMSDENLPYDLRASFCRLMLHMHVDRDPQEQVTPVKYARLWSEIPSEIAIDDYDSSGASKDEIKERFAQTMEFVEEYLRDVVCQRFPFSDKEKNKLTFEVVNLARNLIYFGFYNFSDLLRLTKILLAILDCVHVTTIFPISKMAKGEENKGSNVMRSIHGVGELMTQVVLRGGGFLPMTPMAAAPEGNVKQAEPEKEDIMVMDTKLKIIEILQFILNVRLDYRISCLLCIFKREFDESNSQTSETSSGNSSQEGPSNVPGALDFEHIEEQAEGIFGGSEENTPLDLDDHGGRTFLRVLLHLTMHDYPPLVSGALQLLFRHFSQRQEVLQAFKQVQLLVTSQDVDNYKQIKQDLDQLRSIVEKSELWVYKGQGPDETMDGASGENEHKKTEEGNNKPQKHESTSSYNYRVVKEILIRLSKLCVQESASVRKSRKQQQRLLRNMGAHAVVLELLQIPYEKAEDTKMQEIMRLAHEFLQNFCAGNQQNQALLHKHINLFLNPGILEAVTMQHIFMNNFQLCSEINERVVQHFVHCIETHGRNVQYIKFLQTIVKAEGKFIKKCQDMVMAELVNSGEDVLVFYNDRASFQTLIQMMRSERDRMDENSPLMYHIHLVELLAVCTEGKNVYTEIKCNSLLPLDDIVRVVTHEDCIPEVKIAYINFLNHCYVDTEVEMKEIYTSNHMWKLFENFLVDICRACNNTSDRKHADSILEKYVTEIVMSIVTTFFSSPFSDQSTTLQTRQPVFVQLLQGVFRVYHCNWLMPSQKASVESCIRVLSDVAKSRAIAIPVDLDSQVNNLFLKSHSIVQKTAMNWRLSARNAARRDSVLAASRDYRNIIERLQDIVSALEDRLRPLVQAELSVLVDVLHRPELLFPENTDARRKCESGGFICKLIKHTKQLLEENEEKLCIKVLQTLREMMTKDRGYGEKLISIDELDNAELPPAPDSENATEQELEPSPPLRQLEDHKRGEALRQVLVNRYYGNVRPSGRRESLTSFGNGPLSAGGPGKPGGGGGGSGSSSMSRGEMSLAEVQCHLDKEGASNLVIDLIMNASSDRVFHESILLAIALLEGGNTTIQHSFFCRLTEDKKSEKFFKVFYDRMKVAQQEIKATVTVNTSDLGNKKKDDEVDRDAPSRKKAKEPTTQITEEVRDQLLEASAATRKAFTTFRREADPDDHYQPGEGTQATADKAKDDLEMSAVITIMQPILRFLQLLCENHNRDLQNFLRCQNNKTNYNLVCETLQFLDCICGSTTGGLGLLGLYINEKNVALINQTLESLTEYCQGPCHENQNCIATHESNGIDIITALILNDINPLGKKRMDLVLELKNNASKLLLAIMESRHDSENAERILYNMRPKELVEVIKKAYMQGEVEFEDGENGEDGAASPRNVGHNIYILAHQLARHNKELQSMLKPGGQVDGDEALEFYAKHTAQIEIVRLDRTMEQIVFPVPSICEFLTKESKLRIYYTTERDEQGSKINDFFLRSEDLFNEMNWQKKLRAQPVLYWCARNMSFWSSISFNLAVLMNLLVAFFYPFKGVRGGTLEPHWSGLLWTAMLISLAIVIALPKPHGIRALIASTILRLIFSVGLQPTLFLLGAFNVCNKIIFLMSFVGNCGTFTRGYRAMVLDVEFLYHLLYLVICAMGLFVHEFFYSLLLFDLVYREETLLNVIKSVTRNGRSIILTAVLALILVYLFSIVGYLFFKDDFILEVDRLPNETAVPETGESLASEFLFSDVCRVESGENCSSPAPREELVPAEETEQDKEHTCETLLMCIVTVLSHGLRSGGGVGDVLRKPSKEEPLFAARVIYDLLFFFMVIIIVLNLIFGVIIDTFADLRSEKQKKEEILKTTCFICGLERDKFDNKTVTFEEHIKEEHNMWHYLCFIVLVKVKDSTEYTGPESYVAEMIKERNLDWFPRMRAMSLVSSDSEGEQNELRNLQEKLESTMKLVTNLSGQLSELKDQMTEQRKQKQRIGLLGHPPHMNVNPQQPA

SEQ ID NO: 6976 - protein, 223 aa, Homo sapiens
MEDVKLEFPSLPQCKEDAEEWTYPMRREMQEILPGLFLGPYSSAMKSKLPVLQKHGITHIICIRQNIEANFIKPNFQQLFRYLVLDIADNPVENIIRFFPMTKEFIDGSLQMGGKVLVHGNAGISRSAAFVIAYIMETFGMKYRDAFAYVQERRFCINPNAGFVHQLQEYEAIYLAKLTIQMMSPLQIERSLSVHSGTTGSLKRTHEEEDDFGTMQVATAQNG

SEQ ID NO: 6977 - protein, 4547 aa, Homo sapiens
MEPSGSLFPSLVVVGHVVTLAAVWHWRRGRRWAQDEQDERDRVQKKTFTKWVNKHLIKAQRHISDLYEDLRDGHNLISLLEVLSGDSLPREKGRMRFHKLQNVQIALDYLRHRQVKLVNIRNDDIADGNPKLTLGLIWTIILHFQISDIQVSGQSEDMTAKEKLLLWSQRMVEGYQGLRCDNFTSSWRDGRLFNAIIHRHKPLLIDMNKVYRQTNLENLDQAFSVAERDLGVTRLLDPEDVDVPQPDEKSIITYVSSLYDAMPRVPDVQDGVRANELQLRWQEYRELVLLLLQWMRHHTAAFEERRFPSSFEEIEILWSQFLKFKEMELPAKEADKNRSKGIYQSLEGAVQAGQLKVPPGYHPLDVEKEWGKLHVAILEREKQLRSEFERLECLQRIVTKLQMEAGLCEEQLNQADALLQSDVRLLAAGKVPQRAGEVERDLDKADSMIRLLFNDVQTLKDGRHPQGEQMYRRVYRLHERLVAIRTEYNLRLKAGVAAPATQVAQVTLQSVQRRPELEDSTLRYLQDLLAWVEENQHRVDGAEWGVDLPSVEAQLGSHRGLHQSIEEFRAKIERARSDEGQLSPATRGAYRDCLGRLDLQYAKLLNSSKARLRSLESLHSFVAAATKELMWLNEKEEEEVGFDWSDRNTNMTAKKESYSALMRELELKEKKIKELQNAGDRLLREDHPARPTVESFQAALQTQWSWMLQLCCCIEAHLKENAAYFQFFSDVREAEGQLQKLQEALRRKYSCDRSATVTRLEDLLQDAQDEKEQLNEYKGHLSGLAKRAKAVVQLKPRHPAHPMRGRLPLLAVCDYKQVEVTVHKGDECQLVGPAQPSHWKVLSSSGSEAAVPSVCFLVPPPNQEAQEAVTRLEAQHQALVTLWHQLHVDMKSLLAWQSLRRDVQLIRSWSLATFRTLKPEEQRQALHSLELHYQAFLRDSQDAGGFGPEDRLMAEREYGSCSHHYQQLLQSLEQGAQEESRCQRCISELKDIRLQLEACETRTVHRLRLPLDKEPARECAQRIAEQQKAQAEVEGLGKGVARLSAEAEKVLALPEPSPAAPTLRSELELTLGKLEQVRSLSAIYLEKLKTISLVIRGTQGAEEVLRAHEEQLKEAQAVPATLPELEATKASLKKLRAQAEAQQPTFDALRDELRGAQEVGERLQQRHGERDVEVERWRERVAQLLERWQAVLAQTDVRQRELEQLGRQLRYYRESADPLGAWLQDARRRQEQIQAMPLADSQAVREQLRQEQALLEEIERHGEKVEECQRFAKQYINAIKDYELQLVTYKAQLEPVASPAKKPKVQSGSESVIQEYVDLRTHYSELTTLTSQYIKFISETLRRMEEEERLAEQQRAEERERLAEVEAALEKQRQLAEAHAQAKAQAEREAKELQQRMQEEVVRREEAAVDAQQQKRSIQEELQQLRQSSEAEIQAKARQAEAAERSRLRIEEEIRVVRLQLEATERQRGGAEGELQALRARAEEAEAQKRQAQEEAERLRRQVQDESQRKRQAEVELASRVKAEAEAAREKQRALQALEELRLQAEEAERRLRQAEVERARQVQVALETAQRSAEAELQSKRASFAEKTAQLERSLQEEHVAVAQLREEAERRAQQQAEAERAREEAERELERWQLKANEALRLRLQAEEVAQQKSLAQAEAEKQKEEAEREARRRGKAEEQAVRQRELAEQELEKQRQLAEGTAQQRLAAEQELIRLRAETEQGEQQRQLLEEELARLQREAAAATQKRQELEAELAKVRAEMEVLLASKARAEEESRSTSEKSKQRLEAEAGRFRELAEEAARLRALAEEAKRQRQLAEEDAARQRAEAERVLAEKLAAIGEATRLKTEAEIALKEKEAENERLRRLAEDEAFQRRRLEEQAAQHKADIEERLAQLRKASDSELERQKGLVEDTLRQRRQVEEEILALKASFEKAAAGKAELELELGRIRSNAEDTLRSKEQAELEAARQRQLAAEEERRRREAEERVQKSLAAEEEAARQRKAALEEVERLKAKVEEARRLRERAEQESARQLQLAQEAAQKRLQAEEKAHAFAVQQKEQELQQTLQQEQSVLDQLRGEAEAARRAAEEAEEARVQAEREAAQSRRQVEEAERLKQSAEEQAQARAQAQAAAEKLRKEAEQEAARRAQAEQAALRQKQAADAEMEKHKKFAEQTLRQKAQVEQELTTLRLQLEETDHQKNLLDEELQRLKAEATEAARQRSQVEEELFSVRVQMEELSKLKARIEAENRALILRDKDNTQRFLQEEAEKMKQVAEEAARLSVAAQEAARLRQLAEEDLAQQRALAEKMLKEKMQAVQEATRLKAEAELLQQQKELAQEQARRLQEDKEQMAQQLAEETQGFQRTLEAERQRQLEMSAEAERLKLRVAEMSRAQARAEEDAQRFRKQAEEIGEKLHRTELATQEKVTLVQTLEIQRQQSDHDAERLREAIAELEREKEKLQQEAKLLQLKSEEMQTVQQEQLLQETQALQQSFLSEKDSLLQRERFIEQEKAKLEQLFQDEVAKAQQLREEQQRQQQQMEQERQRLVASMEEARRRQHEAEEGVRRKQEELQQLEQQRRQQEELLAEENQRLREQLQLLEEQHRAALAHSEEVTASQVAATKTLPNGRDALDGPAAEAEPEHSFDGLRRKVSAQRLQEAGILSAEELQRLAQGHTTVDELARREDVRHYLQGRSSIAGLLLKATNEKLSVYAALQRQLLSPGTALILLEAQAASGFLLDPVRNRRLTVNEAVKEGVVGPELHHKLLSAERAVTGYKDPYTGQQISLFQAMQKGLIVREHGIRLLEAQIATGGVIDPVHSHRVPVDVAYRRGYFDEEMNRVLADPSDDTKGFFDPNTHENLTYLQLLERCVEDPETGLCLLPLTDKAAKGGELVYTDSEARDVFEKATVSAPFGKFQGKTVTIWEIINSEYFTAEQRRDLLRQFRTGRITVEKIIKIIITVVEEQEQKGRLCFEGLRSLVPAAELLESRVIDRELYQQLQRGERSVRDVAEVDTVRRALRGANVIAGVWLEEAGQKLSIYNALKKDLLPSDMAVALLEAQAGTGHIIDPATSARLTVDEAVRAGLVGPEFHEKLLSAEKAVTGYRDPYTGQSVSLFQALKKGLIPREQGLRLLDAQLSTGGIVDPSKSHRVPLDVACARGCLDEETSRALSAPRADAKAYSDPSTGEPATYGELQQRCRPDQLTGLSLLPLSEKAARARQEELYSELQARETFEKTPVEVPVGGFKGRTVTVWELISSEYFTAEQRQELLRQFRTGKVTVEKVIKILITIVEEVETLRQERLSFSGLRAPVPASELLASGVLSRAQFEQLKDGKTTVKDLSELGSVRTLLQGSGCLAGIYLEDTKEKVSIYEAMRRGLLRATTAALLLEAQAATGFLVDPVRNQRLYVHEAVKAGVVGPELHEQLLSAEKAVTGYRDPYSGSTISLFQAMQKGLVLRQHGIRLLEAQIATGGIIDPVHSHRVPVDVAYQRGYFSEEMNRVLADPSDDTKGFFDPNTHENLTYRQLLERCVEDPETGLRLLPLKGAEKAEVVETTQVYTEEETRRAFEETQIDIPGGGSHGGSTMSLWEVMQSDLIPEEQRAQLMADFQAGRVTKERMIIIIIEIIEKTEIIRQQGLASYDYVRRRLTAEDLFEARIISLETYNLLREGTRSLREALEAESAWCYLYGTGSVAGVYLPGSRQTLSIYQALKKGLLSAEVARLLLEAQAATGFLLDPVKGERLTVDEAVRKGLVGPELHDRLLSAERAVTGYRDPYTEQTISLFQAMKKELIPTEEALRLLDAQLATGGIVDPRLGFHLPLEVAYQRGYLNKDTHDQLSEPSEVRSYVDPSTDERLSYTQLLRRCRRDDGTGQLLLPLSDARKLTFRGLRKQITMEELVRSQVMDEATALQLREGLTSIEEVTKNLQKFLEGTSCIAGVFVDATKERLSVYQAMKKGIIRPGTAFELLEAQAATGYVIDPIKGLKLTVEEAVRMGIVGPEFKDKLLSAERAVTGYKDPYSGKLISLFQAMKKGLILKDHGIRLLEAQIATGGIIDPEESHRLPVEVAYKRGLFDEEMNEILTDPSDDTKGFFDPNTEENLTYLQLMERCITDPQTGLCLLPLKEKKRERKTSSKSSVRKRRVVIVDPETGKEMSVYEAYRKGLIDHQTYLELSEQECEWEEITISSSDGVVKSMIIDRRSGRQYDIDDAIAKNLIDRSALDQYRAGTLSITEFADMLSGNAGGFRSRSSSVGSSSSYPISPAVSRTQLASWSDPTEETGPVAGILDTETLEKVSITEAMHRNLVDNITGQRLLEAQACTGGIIDPSTGERFPVTDAVNKGLVDKIMVDRINLAQKAFCGFEDPRTKTKMSAAQALKKGWLYYEAGQRFLEVQYLTGGLIEPDTPGRVPLDEALQRGTVDARTAQKLRDVGAYSKYLTCPKTKLKISYKDALDRSMVEEGTGLRLLEAAAQSTKGYYSPYSVSGSGSTAGSRTGSRTGSRAGSRRGSFDATGSGFSMTFSSSSYSSSGYGRRYASGSSASLGGPESAVA

SEQ ID NO: 6978 - protein, 557 aa, Homo sapiens
MTLLTFRDVAIEFSLEEWKCLDLAQQNLYRDVMLENYRNLFSVGLTVCKPGLITCLEQRKEPWNVKRQEAADGHPAMSSHFTQDLLPEQGIQDAFPKRILRGYGNCGLDNLYLRKDWESLDECKLQKDYNGLNQCSSTTHSKIFQYNKYVKIFDNFSNLHRRNISNTGEKPFKCQECGKSFQMLSFLTEHQKIHTGKKFQKCGECGKTFIQCSHFTEPENIDTGEKPYKCQECNNVIKTCSVLTKNRIYAGGEHYRCEEFGKVFNQCSHLTEHEHGTEEKPCKYEECSSVFISCSSLSNQQMILAGEKLSKCETWYKGFNHSPNPSKHQRNEIGGKPFKCEECDSIFKWFSDLTKHKRIHTGEKPYKCDECGKAYTQSSHLSEHRRIHTGEKPYQCEECGKVFRTCSSLSNHKRTHSEEKPYTCEECGNIFKQLSDLTKHKKTHTGEKPYKCDECGKNFTQSSNLIVHKRIHTGEKPYKCEECGRVFMWFSDITKHKKTHTGEKPYKCDECGKNFTQSSNLIVHKRIHTGEKPYKCEKCGKAFTQFSHLTVHESIHT

SEQ ID NO: 6979 - protein, 586 aa, Homo sapiens
MLYLENNAQTQFSEPQYTNLGLLNSMDQQIQNGSSSTSPYNTDHAQNSVTAPSPYAQPSSTFDALSPSPAIPSNTDYPGPHSFDVSFQQSSTAKSATWTYSTELKKLYCQIAKTCPIQIKVMTPPPQGAVIRAMPVYKKAEHVTEVVKRCPNHELSREFNEGQIAPPSHLIRVEGNSHAQYVEDPITGRQSVLVPYEPPQVGTEFTTVLYNFMCNSSCVGGMNRRPILIIVTLETRDGQVLGRRCFEARICACPGRDRKADEDSIRKQQVSDSTKNGDGTKRPFRQNTHGIQMTSIKKRRSPDDELLYLPVRGRETYEMLLKIKESLELMQYLPQHTIETYRQQQQQQHQHLLQKQTSIQSPSSYGNSSPPLNKMNSMNKLPSVSQLINPQQRNALTPTTIPDGMGANIPMMGTHMPMAGDMNGLSPTQALPPPLSMPSTSHCTPPPPYPTDCSIVSFLARLGCSSCLDYFTTQGLTTIYQIEHYSMDDLASLKIPEQFRHAIWKGILDHRQLHEFSSPSHLLRTPSSASTVSVGSSETRGERVIDAVRFTLRQTISFPPRDEWNDFNFDMDARRNKQQRIKEEGE

SEQ ID NO: 6980 - protein, 831 aa, Homo sapiens
MAGALAGLAAGLQVPRVAPSPDSDSDTDSEDPSLRRSAGGLLRSQVIHSGHFMVSSPHSDSLPRRRDQEGSVGPSDFGPRSIDPTLTRLFECLSLAYSGKLVSPKWKNFKGLKLLCRDKIRLNNAIWRAWYIQYVKRRKSPVCGFVTPLQGPEADAHRKPEAVVLEGNYWKRRIEVVMREYHKWRIYYKKRLRKPSREDDLLAPKQAEGRWPPPEQWCKQLFSSVVPVLLGDPEEEPGGRQLLDLNCFLSDISDTLFTMTQSGPSPLQLPPEDAYVGNADMIQPDLTPLQPSLDDFMDISDFFTNSRLPQPPMPSNFPEPPSFSPVVDSLFSSGTLGPEVPPASSAMTHLSGHSRLQARNSCPGPLDSSAFLSSDFLLPEDPKPRLPPPPVPPPLLHYPPPAKVPGLEPCPPPPFPPMAPPTALLQEEPLFSPRFPFPTVPPAPGVSPLPAPAAFPPTPQSVPSPAPTPFPIELLPLGYSEPAFGPCFSMPRGKPPAPSPRGQKASPPTLAPATASPPTTAGSNNPCLTQLLTAAKPEQALEPPLVSSTLLRSPGSPQETVPEFPCTFLPPTPAPTPPRPPPGPATLAPSRPLLVPKAERLSPPAPSGSERRLSGDLSSMPGPGTLSVRVSPPQPILSRGRPDSNKNRRITHISAEQKRRFNIKLGFDTLHGLVSTLSAQPSLKERAGLQEEAQQLRDEIEELNAAINLCQQQLPATGVPITHQRFDQMRDMFDDYVRTRTLHNWKFWVFSILIRPLFESFNGMVSTASVHTLRQTSLAWLDQYCSLPALRPTVLNSLRQLGTSTSILTDPGRIPEQATRAVTEGTLGKPL

SEQ ID NO: 6981 - protein, 955 aa, Homo sapiens
MSKTNKSKSGSRSSRSRSASRSRSRSFSKSRSRSRSLSRSRKRRLSSRSRSRSYSPAHNRERNHPRVYQNRDFRGHNRGYRRPYYFRGRNRGFYPWGQYNRGGYGNYRSNWQNYRQAYSPRRGRSRSRSPKRRSPSPRSRSHSRNSDKSSSDRSRRSSSSRSSSNHSRVESSKRKSAKEKKSSSKDSRPSQAAGDNQGDEAKEQTFSGGTSQDTKASESSKPWPDATYGTGSASRASAVSELSPRERSPALKSPLQSVVVRRRSPRPSPVPKPSPPLSSTSQMGSTLPSGAGYQSGTHQGQFDHGSGSLSPSKKSPVGKSPPSTGSTYGSSQKEESAASGGAAYTKRYLEEQKTENGKDKEQKQTNTDKEKIKEKGSFSDTGLGDGKMKSDSFAPKTDSEKPFRGSQSPKRYKLRDDFEKKMADFHKEEMDDQDKDKAKGRKESEFDDEPKFMSKVIGANKNQEEEKSGKWEGLVYAPPGKEKQRKTEELEEESFPERSKKEDRGKRSEGGHRGFVPEKNFRVTAYKAVQEKSSSPPPRKTSESRDKLGAKGDFPTGKSSFSITREAQVNVRMDSFDEDLARPSGLLAQERKLCRDLVHSNKKEQEFRSIFQHIQSAQSQRSPSELFAQHIVTIVHHVKEHHFGSSGMTLHERFTKYLKRGTEQEAAKNKKSPEIHRRIDISPSTFRKHGLAHDEMKSPREPGYKAEGKYKDDPVDLRLDIERRKKHKERDLKRGKSRESVDSRDSSHSRERSAEKTEKTHKGSKKQKKHRRARDRSRSSSSSSQSSHSYKAEEYTEETEEREESTTGFDKSRLGTKDFVGPSERGGGRARGTFQFRARGRGWGRGNYSGNNNNNSNNDFQKRNREEEWDPEYTPKSKKYYLHDDREGEGSDKWVSRGRGRGAFPRGRGRFMFRKSSTSPKWAHDKFSGEEGEIEDDESGTENREEKDNIQPTTE

SEQ ID NO: 6982 - protein, 917 aa, Homo sapiens
MFAVHLMAFYFSKLKEDQIKKVDRFLYHMRLSDDTLLDIMRRFRAEMEKGLAKDTNPTAAVKMLPTFVRAIPDGSENGEFLSLDLGGSKFRVLKVQVAEEGKRHVQMESQFYPTPNEIIRGNGTELFEYVADCLADFMKTKDLKHKKLPLGLTFSFPCRQTKLEEGVLLSWTKKFKARGVQDTDVVSRLTKAMRRHKDMDVDILALVNDTVGTMMTCAYDDPYCEVGVIIGTGTNACYMEDMSNIDLVEGDEGRMCINTEWGAFGDDGALEDIRTEFDRELDLGSLNPGKQLFEKMISGLYLGELVRLILLKMAKAGLLFGGEKSSALHTKGKIETRHVAAMEKYKEGLANTREILVDLGLEPSEADCIAVQHVCTIVSFRSANLCAAALAAILTRLRENKKVERLRTTVGMDGTLYKIHPQYPKRLHKVVRKLVPSCDVRFLLSESGSTKGAAMVTAVASRVQAQRKQIDRVLALFQLTREQLVDVQAKMRAELEYGLKKKSHGLATVRMLPTYVCGLPDGTEKGKFLALDLGGTNFRVLLVKIRSGRRSVRMYNKIFAIPLEIMQGTGEELFDHIVQCIADFLDYMGLKGASLPLGFTFSFPCRQMSIDKGTLIGWTKGFKATDCEGEDVVDMLREAIKRRNEFDLDIVAVVNDTVGTMMTCGYEDPNCEIGLIAGTGSNMCYMEDMRNIEMVEGGEGKMCINTEWGGFGDNGCIDDIWTRYDTEVDEGSLNPGKQRYEKMTSGMYLGEIVRQILIDLTKQGLLFRGQISERLRTRGIFETKFLSQIESDRLALLQVRRILQQLGLDSTCEDSIVVKEVCGAVSRRAAQLCGAGLAAIVEKRREDQGLEHLRITVGVDGTLYKLHPHFSRILQETVKELAPRCDVTFMLSEDGSGKGAALITAVAKRLQQAQKEN

SEQ ID NO: 6983 - protein, 838 aa, Homo sapiens
MHLEGRDGRRYPGAPAVELLQTSVPSGLAELVAGKRRLPRGAGGADPSHSCPRGAAGQSSWAPAGQEFASFLTKGRSHSSLPQMSSSRSKDSCFTENTPLLRNSLQEKGSRCIPVYHPEFITAEESWEDSSADWERRYLLSREVSGLSASASSEKGDLLDSPHIRLRLSKLRRCVQWLKVMGLFAFVVLCSILFSLYPDQGKLWQLLALSPLENYSVNLSSHVDSTLLQVDLAGALVASGPSRPGREEHIVVELTQADALGSRWRRPQQVTHNWTVYLNPRRSEHSVMSRTFEVLTRETVSISIRASLQQTQAVPLLMAHQYLRGSVETQVTIATAILAGVYALIIFEIVHRTLAAMLGSLAALAALAVIGDRPSLTHVVEWIDFETLALLFGMMILVAIFSETGFFDYCAVKAYRLSRGRVWAMIIMLCLIAAVLSAFLDNVTTMLLFTPVTIRLCEVLNLDPRQVLIAEVIFTNIGGAATAIGDPPNVIIVSNQELRKMGLDFAGFTAHMFIGICLVLLVCFPLLRLLYWNRKLYNKEPSEIVELKHEIHVWRLTAQRISPASREETAVRRLLLGKVLALEHLLARRLHTFHRQISQEDKNWETNIQELQKKHRISDGILLAKCLTVLGFVIFMFFLNSFVPGIHLDLGWIAILGAIWLLILADIHDFEIILHRVEWATLLFFAALFVLMEALAHLHLIEYVGEQTALLIKMVPEEQRLIAAIVLVVWVSALASSLIDNIPFTATMIPVLLNLSHDPEVGLPAPPLMYALAFGACLGGNGTLIGASANVVCAGIAEQHGYGFSFMEFFRLGFPMMVVSCTVGMCYLLVAHVVVGWN

SEQ ID NO: 6984 - protein, 996 aa, Homo sapiens
MDEDTHYDKVEDVVGSHIEDAVTFWAQSINRNKDIMKIGCSLSEVCPQASSVLGNLDPNKIYGGLFSEDQCWYRCKVLKIISVEKCLVRYIDYGNTEILNRSDIVEIPLELQFSSVAKKYKLWGLHIPSDQEVTQFDQGTTFLGSLIFEKEIKMRIKATSEDGTVIAQAEYGSVDIGEEVLKKGFAEKCRLASRTDICEEKKLDPGQLVLRNLKSPIPLWGHRSNQSTFSRPKGHLSEKMTLDLKDENDAGNLITFPKESLAVGDFNLGSNVSLEKIKQDQKLIEENEKLKTEKDALLESYKALELKVEQIAQELQQEKAAAVDLTNHLEYTLKTYIDTRMKNLAAKMEILKEMRHVDISVRFGKDLSDAIQVLDEGCFTTPASLNGLEIIWAEYSLAQENIKTCEYVSEGNILIAQRNEMQQKLYMSVEDFILEVDESSLNKRLKTLQDLSVSLEAVYGQAKEGANSDEILKKFYDWKCDKREEFTSVRSETDASLHRLVAWFQRTLKVFDLSVEGSLISEDAMDNIDEILEKTESSVCKELEIALVDQGDADKEIISNTYSQVLQKIHSEERLIATVQAKYKDSIEFKKQLIEYLNKSPSVDHLLSIKKTLKSLKALLRWKLVEKSNLEESDDPDGSQIEKIKEEITQLRNNVFQEIYHEREEYEMLTSLAQKWFPELPLLHPEIGLLKYMNSGGLLTMSLERDLLDAEPMKELSSKRPLVRSEVNGQIILLKGYSVDVDTEAKVIERAATYHRAWREAEGDSGLLPLIFLFLCKSDPMAYLMVPYYPRANLNAVQANMPLNSEETLKVMKGVAQGLHTLHKADIIHGSLHQNNVFALNREQGIVGDFDFTKSVSQRASVNMMVGDLSLMSPELKMGKPASPGSDLYAYGCLLLWLSVQNQEFEINKDGIPKVDQFHLDDKVKSLLCSLICYRSSMTAEQVLNAECFLMPKEQSVPNPEKDTEYTLYKKEEEIKTENLDKCMEKTRNGEANFDC

SEQ ID NO: 6985 - protein, 1800 aa, Homo sapiens
MATDSGDPASTEDSEKPDGISFENRVPQVAATLTVEARLKEKNSTFSASGETVERKRFFRKSVEMTEDDKVAESSPKDERIKAAMNIPRVDKLPSNVLRGGQEVKYEQCSKSTSEISKDCFKEKNEKEMEEEAEMKAVATSPSGRFLKFDIELGRGAFKTVYKGLDTETWVEVAWCELQDRKLTKAEQQRFKEEAEMLKGLQHPNIVRFYDSWESILKGKKCIVLVTELMTSGTLKTYLKRFKVMKPKVLRSWCRQILKGLQFLHTRTPPIIHRDLKCDNIFITGPTGSVKIGDLGLATLMRTSFAKSVIGTPEFMAPEMYEEHYDESVDVYAFGMCMLEMATSEYPYSECQNAAQIYRKVTSGIKPASFNKVTDPEVKEIIEGCIRQNKSERLSIRDLLNHAFFAEDTGLRVELAEEDDCSNSSLALRLWVEDPKKLKGKHKDNEAIEFSFNLETDTPEEVAYEMVKSGFFHESDSKAVAKSIRDRVTPIKKTREKKPAGCLEERRDSQCKSMGNVFPQPQNTTLPLAPAQQTGAECEETEVDQHVRQQLLQRKPQQHCSSVTGDNLSEAGAASVIHSDTSSQPSVAYSSNQTMGSQMVSNIPQAEVNVPGQIYSSQQLVGHYQQVSGLQKHSKLTQPQILPLVQGQSTVLPVHVLGPTVVSQPQVSPLTVQKVPQIKPVSQPVGAEQQAALLKPDLVRSLNQDVATTKENVSSPDNPSGNGKQDRIKQRRASCPRPEKGTKFQLTVLQVSTSGDNMVECQLETHNNKMVTFKFDVDGDAPEDIADYMVEDNFVLESEKEKFVEELRAIVGQAQEILHVHFATERATGVDSITVDSNSSQTGSSEQVQINSTSTQTSNESAPQSSPVGRWRFCINQTIRNRETQSPPSLQHSMSAVPGRHPLPSPKNTSNKEISRDTLLTIENNPCHRALFTSKSEHKDVVDGKISECASVETKQPAILYQVEDNRQIMAPVTNSSSYSTTSVRAVPAECEGLTKQASIFIPVYPCHQTASQADALMSHPGESTQTSGNSLTTLAFDQKPQTLSVQQPAMDAEFISQEGETTVNTEASSPKTVIPTQTPGLEPTTLQPTTVLESDGERPPKLEFADNRIKTLDEKLRNLLYQEHSISSIYPESQKDTQSIDSPFSSSAEDTLSCPVTEVIAISHCGIKDSPVQSPNFQQTGSKLLSNVAASQPANISVFKRDLNVITSVPSELCLHEMSSDASLPGDPEAYPAAVSSGGAIHLQTGGGYFGLSFTCPSLKNPISKKSWTRKLKSWAYRLRQSTSFFKRSKVRQVETEEMRSAIAPDPIPLTRESTADTRALNRCKAMSGSFQRGRFQVITIPQQQSAKMTSFGIEHISVFSETNHSSEEAFIKTAKSQLVEIEPATQNPKTSFSYEKLQALQETCKENKGVPKQGDNFLSFSAACETDVSSVTPEKEFEETSATGSSMQSGSELLLKEREILTAGKQPSSDSEFSASLAGSGKSVAKTGPESNQCLPHHEEQAYAQTQSSLFYSPSSPMSSDDESEIEDEDLKVELQRLREKHIQEVVNLQTQQNKELQELYERLRSIKDSKTQSTEIPLPPASPRRPRSFKSKLRSRPQSLTHVDNGIVATGKSCLINELENPLCVESNAASCQQSPASKKGMFTDDLHKLVDDWTKEAVGNSLIKPSLNQLKQSQHKLETENWNKVSENTPSTMGYTSTWISSLSQIRGAVPTSLPQGLSLPSFPGPLSSYGMPHVCQYNAVAGAGYPVQWVGISGTTQQSVVIPAQSGGPFQPGMNMQAFPTSSVQNPATIPPGPK

SEQ ID NO: 6986 - protein, 492 aa, Homo sapiens
MASNGAYPVLGPGVTVNPGTSLSVFTALPFATPSPGPTHRPPLVTAVVPPAGPLVLSAFPSTPLVAGQDGRGPSGAGASNVFVQMRTEVGPVKPPQAQTLILTQAPLVWQAPGTLCGGVMCPPPLLLAAAPGVPVTSAQVVGGTQACEGGWSHGLPLPPPPPAAQVAPIVSPGNAGPWPQGAHGEGSLAPSQAKARPDDSCKPKSVYENFRLWQHYKPLARRHLPQSPDTEALSCFLIPVLRSLARRKPTMTLEEGLWRAMREWQHTSNFDRMIFYEMAAKFLEFEAEEEMQIQKSQWMKGPQSLPPPAPPRLEPRGPPAPEVVKQPVYLPSKDGPKAPTACLPPPRPQRPAETKAHLPPPRPPRPAETKVPEEIPPEVVQEYVDIMEELLGSHPGDTGEPEGQREKGKVEQPQEEDGMTSDPGLLSYIDKLCSQEDFVTKVEAVIHPRFLEELLSPDPQMDFLALSQELEQEEGLTLAQGAPSDALGTDRC

SEQ ID NO: 6987 - protein, 537 aa, Homo sapiens
MGCVQCKDKEATKLTEERDGSLNQSSGYRYGTDPTPQHYPSFGVTSIPNYNNFHAAGGQGLTVFGGVNSSSHTGTLRTRGGTGVTLFVALYDYEARTEDDLSFHKGEKFQILNSSEGDWWEARSLTTGETGYIPSNYVAPVDSIQAEEWYFGKLGRKDAERQLLSFGNPRGTFLIRESETTKGAYSLSIRDWDDMKGDHVKHYKIRKLDNGGYYITTRAQFETLQQLVQHYSERAAGLCCRLVVPCHKGMPRLTDLSVKTKDVWEIPRESLQLIKRLGNGQFGEVWMGTWNGNTKVAIKTLKPGTMSPESFLEEAQIMKKLKHDKLVQLYAVVSEEPIYIVTEYMNKGSLLDFLKDGEGRALKLPNLVDMAAQVAAGMAYIERMNYIHRDLRSANILVGNGLICKIADFGLARLIEDNEYTARQGAKFPIKWTAPEAALYGRFTIKSDVWSFGILLTELVTKGRVPYPGMNNREVLEQVERGYRMPCPQDCPISLHELMIHCWKKDPEERPTFEYLQSFLEDYFTATEPQYQPGENL

SEQ ID NO: 6988 - protein, 430 aa, Homo sapiens
MSLVELLLWWNCFSRTGVAASLEVSESPGSIQVARGQPAVLPCTFTTSAALINLNVIWMVTPLSNANQPEQVILYQGGQMFDGAPRFHGRVGFTGTMPATNVSIFINNTQLSDTGTYQCLVNNLPDIGGRNIGVTGLTVLVPPSAPHCQIQGSQDIGSDVILLCSSEEGIPRPTYLWEKLDNTLKLPPTATQDQVQGTVTIRNISALSSGLYQCVASNAIGTSTCLLDLQVISPQPRNIGLIAGAIGTGAVIIIFCIALILGAFFYWRSKNKEEEEEEIPNEIREDDLPPKCSSAKAFHTEISSSDNNTLTSSNAYNSRYWSNNPKVHRNTESVSHFSDLGQSFSFHSGNANIPSIYANGTHLVPGQHKTLVVTANRGSSPQVMSRSNGSVSRKPRPPHTHSYTISHATLERIGAVPVMVPAQSRAGSLV

SEQ ID NO: 6989 - protein, 975 aa, Homo sapiens
MVVAEDLSALRMAEDSCVDADLPDCNCDVTRVKKLKETLVAVQQLDKNMSSLRTWLAHIESELAKPIVYDSCNSEEIQRKLNEQQELQRDIEKHSTGVASVLNLCEVLLHDCDACATDAECDSIQQATRNLDRRWRNICAMSMERRLKIEETWRLWQKFLDDYSRFEDWLKSSERTAAFPSSSGVIYTVAKEELKKFEAFQRQVHECLTQLELINKQYRRLARENRTDSACSLKQMVHEGNQRWDNLQKRVTSILRRLKHFIGQREEFETARDSILVWLTEMDLQLTNIEHFSECDVQAKIKQLKAFQQEISLNHNKIEQIIAQGEQLIEKSEPLDAAIIEEELDELRRYCQEVFGRVERYHKKLIRLPLPDDEHDLSDRELELEDSAALSDLHWHDRSADSLLSPQPSSNLSLSLAQPLRSERSGRDTPASVDSIPLEWDHDYDLSRDLESAMSRALPSEDEEGQDDKDFYLRGAVGLSDVMIPESPEAYVKLTENAIKNTSGDHSALESQIRQLGKALDDSRFQIQQTENIIRSKTPTGPELDTSYKGYMKLLGECSSSIDSVKRLEHKLKEEEESLPGFVNLHSTETQTAGVIDRWELLQAQALSKELRMKQNLQKWQQFNSDLNSIWAWLGDTEEELEQLQRLELSTDIQTIELQIKKLKELQKAVDHRKAIILSINLCSPEFTQADSKESRDLQDRLSQMNGRWDRVCSLLEEWRGLLQDALMQCQGFHEMSHGLLLMLENIDRRKNEIVPIDSNLDAEILQDHHKQLMQIKHELLESQLRVASLQDMSCQLLVNAEGTDCLEAKEKVHVIGNRLKLLLKEVSRHIKELEKLLDVSSSQQDLSSWSSADELDTSGSVSPTSGRSTPNRQKTPRGKCSLSQPGPSVSSPHSRSTKGGSDSSLSEPGPGRSGRGFLFRVLRAALPLQLLLLLLIGLACLVPMSEEDYSCALSNNFARSFHPMLRYTNGPPPL

SEQ ID NO: 6990 - protein, 1684 aa, Homo sapiens
MLGTITITVGQRDSEDVSKRDSDKEMATKSAVVHDITDDGQEETPEIIEQIPSSESNLEELTQPTESQANDIGFKKVFKFVGFKFTVKKDKTEKPDTVQLLTVKKDEGEGAAGAGDHKDPSLGAGEAASKESEPKQSTEKPEETLKREQSHAEISPPAESGQAVEECKEEGEEKQEKEPSKSAESPTSPVTSETGSTFKKFFTQGWAGWRKKTSFRKPKEDEVEASEKKKEQEPEKVDTEEDGKAEVASEKLTASEQAHPQEPAESAHEPRLSAEYEKVELPSEEQVSGSQGPSEEKPAPLATEVFDEKIEVHQEEVVAEVHVSTVEERTEEQKTEVEETAGSVPAEELVEMDAEPQEAEPAKELVKLKETCVSGEDPTQGADLSPDEKVLSKPPEGVVSEVEMLSSQERMKVQGSPLKKLFTSTGLKKLSGKKQKGKRGGGDEESGEHTQVPADSPDSQEEQKGESSASSPEEPEEITCLEKGLAEVQQDGEAEEGATSDGEKKREGVTPWASFKKMVTPKKRVRRPSESDKEDELDKVKSATLSSTESTASEMQEEMKGSVEEPKPEEPKRKVDTSVSWEALICVGSSKKRARRGSSSDEEGGPKAMGGDHQKADEAGKDKETGTDGILAGSQEHDPGQGSSSPEQAGSPTEGEGVSTWESFKRLVTPRKKSKSKLEEKSEDSIAGSGVEHSTPDTEPGKEESWVSIKKFIPGRRKKRPDGKQEQAPVEDAGPTGANEDDSDVPAVVPLSEYDAVEREKMEAQQAQKSAEQPEQKAATEVSKELSESQVHMMAAAVADGTRAATIIEERSPSWISASVTEPLEQVEAEAALLTEEVLEREVIAEEEPPTVTEPLPENREARGDTVVSEAELTPEAVTAAETAGPLGAEEGTEASAAEETTEMVSAVSQLTDSPDTTEEATPVQEVEGGVPDIEEQERRTQEVLQAVAEKVKEESQLPGTGGPEDVLQPVQRAEAERPEEQAEASGLKKETDVVLKVDAQEAKTEPFTQGKVVGQTTPESFEKAPQVTESIESSELVTTCQAETLAGVKSQEMVMEQAIPPDSVETPTDSETDGSTPVADFDAPGTTQKDEIVEIHEENEVASGTQSGGTEAEAVPAQKERPPAPSSFVFQEETKEQSKMEDTLEHTDKEVSVETVSILSKTEGTQEADQYADEKTKDVPFFEGLEGSIDTGITVSREKVTEVALKGEGTEEAECKKDDALELQSHAKSPPSPVEREMVVQVEREKTEAEPTHVNEEKLEHETAVTVSEEVSKQLLQTVNVPIIDGAKEVSSLEGSPPPCLGQEEAVCTKIQVQSSEASFTLTAAAEEEKVLGETANILETGETLEPAGAHLVLEEKSSEKNEDFAAHPGEDAVPTGPDCQAKSTPVIVSATTKKGLSSDLEGEKTTSLKWKSDEVDEQVACQEVKVSVAIEDLEPENGILELETKSSKLVQNIIQTAVDQFVRTEETATEMLTSELQTQAHVIKADSQDAGQETEKEGEEPQASAQDETPITSAKEESESTAVGQAHSDISKDMSEASEKTMTVEVEGSTVNDQQLEEVVLPSEEEGGGAGTKSVPEDDGHALLAERIEKSLVEPKEDEKGDDVDDPENQNSALADTDASGGLTKESPDTNGPKQKEKEDAQEVELQEGKVHSESDKAITPQAQEELQKQERESAKSELTES

SEQ ID NO: 6991 - protein, 597 aa, Homo sapiens
MVPEERRVGLSSDETSSDSLKSWHSICVLDSKEQPLACQQKQRQFVKPVTESEQPTVLELLLAELRTLFSAVLQDSSPAAWRYLHAVLGLLPPYRELLVGHLDLLPFLEQLYCWAPWVQTHLHLDLLGAIVQAFPPDSSLLDSASHADCCPQKRRLHHRPPCPACPFVQAQWSRQQVKEELATWLRPLTLPELQRCLGIVGAQVALEEAVWLDGLSLLPLALAADIPVRYESSDTDNAEVEPVGRKETRSQLDYEVPREKAFQKSSTGFSPETSFLDSQVMTALKMERYLKKIHFLYLNVAPSRYFRPYSLMVVPPDKVNPEHYIFSPFGILHVHPVEGSETMTLGTWHHHCVLWQQLQFIPFFKYCLLRKSFTCWKKNVRLQGLHRLQKFLENHLLLAVPHFGAGLLHISRLLQELHSVSWLPQELDRCYELLDLQTALAEEKHKALRLLHRCLNLCTSILRLVHEDTYHMQQCLQERVQNCDRIRTGQGSIYLQRVQHKQLEQKLKQAEAWWLQLGKFARLVDYMICQSLISVLEEQITSFVANILQAPRQKPFLSSQLVFDDHGQLSHVPCVENMIQTLTGGLQSVKTSALQVF

SEQ ID NO: 6992 - protein, 910 aa, Homo sapiens
MASSAQSGGSSGGPAVPTVQRGIIKMVLSGCAIIVRGQPRGGPPPERQINLSNIRAGNLARRAAATQPDAKDTPDEPWAFPAREFLRKKLIGKEVCFTIENKTPQGREYGMIYLGKDTNGENIAESLVAEGLATRREGMRANNPEQNRLSECEEQAKAAKKGMWSEGNGSHTIRDLKYTIENPRHFVDSHHQKPVNAIIEHVRDGSVVRALLLPDYYLVTVMLSGIKCPTFRREADGSETPEPFAAEAKFFTESRLLQRDVQIILESCHNQNILGTILHPNGNITELLLKEGFARCVDWSIAVYTRGAEKLRAAERFAKERRLRIWRDYVAPTANLDQKDKQFVAKVMQVLNADAIVVKLNSGDYKTIHLSSIRPPRLEGENTQDKNKKLRPLYDIPYMFEAREFLRKKLIGKKVNVTVDYIRPASPATETVPAFSERTCATVTIGGINIAEALVSKGLATVIRYRQDDDQRSSHYDELLAAEARAIKNGKGLHSKKEVPIHRVADISGDTQKAKQFLPFLQRAGRSEAVVEYVFSGSRLKLYLPKETCLITFLLAGIECPRGARNLPGLVQEGEPFSEEATLFTKELVLQREVEVEVESMDKAGNFIGWLHIDGANLSVLLVEHALSKVHFTAERSSYYKSLLSAEEAAKQKKEKVWAHYEEQPVEEVMPVLEEKERSASYKPVFVTEITDDLHFYVQDVETGTQLEKLMENMRNDIASHPPVEGSYAPRRGEFCIAKFVDGEWYRARVEKVESPAKIHVFYIDYGNREVLPSTRLGTLSPAFSTRVLPAQATEYAFAFIQVPQDDDARTDAVDSVVRDIQNTQCLLNVEHLSAGCPHVTLQFADSKGDVGLGLVKEGLVMVEVRKEKQFQKVITEYLNAQESAKSARLNLWRYGDFRADDADEFGYSR

SEQ ID NO: 6993 - protein, 530 aa, Homo sapiens
MACTGWTSPLPLCVCLLLTCGFAEAGKLLVVPMDGSHWFTMRSVVEKLILRGHEVVVVMPEVSWQLGRSLNCTVKTYSTSYTLEDLDREFKAFAHAQWKAQVRSIYSLLMGSYNDIFDLFFSNCRSLFKDKKLVEYLKESSFDAVFLDPFDNCGLIVAKYFSLPSVVFARGILCHYLEEGAQCPAPLSYVPRILLGFSDAMTFKERVRNHIMHLEEHLLCHRFFKNALEIASEILQTPVTEYDLYSHTSIWLLRTDFVLDYPKPVMPNMIFIGGINCHQGKPLPMEFEAYINASGEHGIVVFSLGSMVSEIPEKKAMAIADALGKIPQTVLWRYTGTRPSNLANNTILVKWLPQNDLLGHPMTRAFITHAGSHGVYESICNGVPMVMMPLFGDQMDNAKRMETKGAGVTLNVLEMTSEDLENALKAVINDKSYKENIMRLSSLHKDRPVEPLDLAVFWVEFVMRHKGAPHLRPAAHDLTWYQYHSLDVIGFLLAVVLTVAFITFKCCAYGYRKCLGKKGRVKKAHKSKTH

SEQ ID NO: 6994 - protein, 1017 aa, Homo sapiens
MRVFLLCAYILLLMVSQLRAVSFPEDDEPLNTVDYHYSRQYPVFRGRPSGNESQHRLDFQLMLKIRDTLYIAGRDQVYTVNLNEMPKTEVIPNKKLTWRSRQQDRENCAMKGKHKDECHNFIKVFVPRNDEMVFVCGTNAFNPMCRYYRLSTLEYDGEEISGLARCPFDARQTNVALFADGKLYSATVADFLASDAVIYRSMGDGSALRTIKYDSKWIKEPHFLHAIEYGNYVYFFFREIAVEHNNLGKAVYSRVARICKNDMGGSQRVLEKHWTSFLKARLNCSVPGDSFFYFDVLQSITDIIQINGIPTVVGVFTTQLNSIPGSAVCAFSMDDIEKVFKGRFKEQKTPDSVWTAVPEDKVPKPRPGCCAKHGLAEAYKTSIDFPDETLSFIKSHPLMDSAVPPIADEPWFTKTRVRYRLTAISVDHSAGPYQNYTVIFVGSEAGMVLKVLAKTSPFSLNDSVLLEEIEAYNHAKCSAENEEDKKVISLQLDKDHHALYVAFSSCIIRIPLSRCERYGSCKKSCIASRDPYCGWLSQGSCGRVTPGMLAEGYEQDTEFGNTAHLGDCHEILPTSTTPDYKIFGGPTSGVRWEVQSGESNQMVHMNVLITCVFAAFVLGAFIAGVAVYCYRDMFVRKNRKIHKDAESAQSCTDSSGSFAKLNGLFDSPVKEYQQNIDSPKLYSNLLTSRKELPPNGDTKSMVMDHRGQPPELAALPTPESTPVLHQKTLQAMKSHSEKAHGHGASRKETPQFFPSSPPPHSPLSHGHIPSAIVLPNATHDYNTSFSNSNAHKAEKKLQNIDHPLTKSSSKRDHRRSVDSRNTLNDLLKHLNDPNSNPKAIMGDIQMAHQNLMLDPMGSMSEVPPKVPNREASLYSPPSTLPRNSPTKRVDVPTTPGVPMTSLERQRGYHKNSSQRHSISAMPKNLNSPNGVLLSRQPSMNRGGYMPTPTGAKVDYIQGTPVSVHLQPSLSRQSSYTSNGTLPRTGLKRTPSLKPDVPPKPSFVPQTPSVRPLNKYTY

SEQ ID NO: 6995 - protein, 2025 aa, Homo sapiens
MDNFAEGDFTVADYALLEDCPHVDDCVFAAEFMSNDYVRVTQLYCDGVGVQYKDYIQSERNLEFDICSIWCSKPISVLQDYCDAIKINIFWPLLFQHQNSSVISRLHPCVDANNSRASEINLKKLQHLELMEDIVDLAKKVANDSFLIGGLLRIGCKIENKILAMEEALNWIKYAGDVTILTKLGSIDNCWPMLSIFFTEYKYHITKIVMEDCNLLEELKTQSCMDCIEEGELMKMKGNEEFSKERFDIAIIYYTRAIEYRPENYLLYGNRALCFLRTGQFRNALGDGKRATILKNTWPKGHYRYCDALSMLGEYDWALQANIKAQKLCKNDPEGIKDLIQQHVKLQKQIEDLQGRTANKDPIKAFYENRAYTPRSLSAPIFTTSLNFVEKERDFRKINHEMANGGNQNLKVADEALKVDDCDCHPEFSPPSSQPPKHKGKQKSRNNESEKFSSSSPLTLPADLKNILEKQFSKSSRAAHQDFANIMKMLRSLIQDGYMALLEQRCRSAAQAFTELLNGLDPQKIKQLNLAMINYVLVVYGLAISLLGIGQPEELSEAENQFKRIIEHYPSEGLDCLAYCGIGKVYLKKNRFLEALNHFEKARTLIYRLPGVLTWPTSNVIIEESQPQKIKMLLEKFVEECKFPPVPDAICCYQKCHGYSKIQIYITDPDFKGFIRISCCQYCKIEFHMNCWKKLKTTTFNDKIDKDFLQGICLTPDCEGVISKIIIFSSGGEVKCEFEHKVIKEKVPPRPILKQKCSSLEKLRLKEDKKLKRKIQKKEAKKLAQERMEEDLRESNPPKNEEQKETVDNVQRCQFLDDRILQCIKQYADKIKSGIQNTAMLLKELLSWKVLSTEDYTTCFSSRNFLNEAVDYVIRHLIQENNRVKTRIFLHVLSELKEVEPKLAAWIQKLNSFGLDATGTFFSRYGASLKLLDFSIMTFLWNEKYGHKLDSIEGKQLDYFSEPASLKEARCLIWLLEEHRDKFPALHSALDEFFDIMDSRCTVLRKQDSGEAPFSSTKVKNKSKKKKPKDSKPMLVGSGTTSVTSNNEIITSSEDHSNRNSDSAGPFAVPDHLRQDVEEFEALYDQHSNEYVVRNKKLWDMNPKQKCSTLYDYFSQFLEEHGPLDMSNKMFSAEYEFFPEETRQILEKAGGLKPFLLGCPRFVVIDNCIALKKVASRLKKKRKKKNIKTKVEEISKAGEYVRVKLQLNPAAREFKPDVKSKPVSDSSSAPAFENVKPKPVSANSPKPACEDVKAKPVSDNSSRQVSEDGQPKGVSSNSPKPGSEDANYKRVSCNSPKPVLEDVKPTYWAQSHLVTGYCTYLPFQRFDITQTPPAYINVLPGLPQYTSIYTPLASLSPEYQLPRSVPVVPSFVANDRADKNAAAYFEGHHLNAENVAGHQIASETQILEGSLGISVKSHCSTGDAHTVLSESNRNDEHCGNSNNKCEVIPESTSAVTNIPHVQMVAIQVSWNIIHQEVNTEPYNPFEERQGEISRIEKEHQVLQDQLQEVYENYEQIKLKGLEETRDLEEKLKRHLEENKISKTELDWFLQDLEREIKKWQQEKKEIQERLKSLKKKIKKVSNASEMYTQKNDGKEKEHELHLDQSLEISNTLTNEKMKIEEYIKKGKEDYEESHQRAVAAEVSVLENWKESEVYKLQIMESQAEAFLKKLGLISRDPAAYPDMESDIRSWELFLSNVTKEIEKAKSQFEEQIKAIKNGSRLSELSKVQISELSFPACNTVHPELLPESSGDDGQGLVTSASDVTGNHAALHRDPSVFSAGDSPGEAPSALLPGPPPGQPEATQLTGPKRAGQAALSERSPVADRKQPVPPGRAARSSQSPKKPFNSIIEHLSVVFPCYNSTELAGFIKKVRSKNKNSLSGLSIDEIVQRVTEHILDEQKKKKPNPGKDKRTYEPSSATPVTRSSQGSPSVVVAPSPKTKGQKAEDVPVRIALGASSCEICHEVFKSKNVRVLKCGHKYHKGCFKQWLKGQSACPACQGRDLLTEESPSGRGWPSQNQELPSCSSR

SEQ ID NO: 6996 - protein, 707 aa, Homo sapiens
MPSPAGEGPPLALSLAEKAVCKVVYGAPRPRPLLLPVGLELWLYVQKMRNLQRKRMEASCLELALEGERLCKAGDFKTGVAFFEAAVQVGTEDLKTLSAIYSQLGNAYFYLKEHGRALEYHKHDLLLARTIGDRMGEAKASGNLGNTLKVLGRFDEAAVCCQRHLSIAQEQGDKVGEARALYNIGNVYHAKGKQLSWNAANATQDPGHLPPDVRETLCKASEFYERNLSLVKELGDRAAQGRAYGNLGNTHYLLGNFTEATTFHKERLAIAKEFGDKAAERRAYSNLGNAHVFLGRFDVAAEYYKKTLQLSRQLRDQAVEAQACYSLGNTYTLLQDYERAAEYHLRHLLIAQELADRVGEGRACWSLGNAYVSMGRPAQALTFAKKHLQISQEIGDRHGELTARMNVAQLQLVLGRLTSPAASEKPDLAGYEAQGARPKRTQRLSAETWDLLRLPLEREQNGDSHHSGDWRGPSRDSLPLPVRSRKYQEGPDAERRPREGSHSPLDSADVRVHVPRTSIPRAPSSDEECFFDLLTKFQSSRMDDQRCPLDDGQAGAAEATAAPTLEDRIAQPSMTASPQTEEFFDLIASSQSRRLDDQRASVGSLPGLRITHSNAGHLRGHGEPQEPGDDFFNMLIKYQSSRIDDQRCPPPDVLPRGPTMPDEDFFSLIQRVQAKRMDEQRVDLAGGPEQGAGGPPEPQQQCQPGAS

SEQ ID NO: 6997 - protein, 562 aa, Homo sapiens
MLDTIARALQDLGRQVLPTLPSLSQEEVSIIWGNVSEFVRRQLTLHKGVQIPAFGTFTFIRQKLEVGNNKFILIQRPVFIMVEKLVQIHGLKQNKRPGTVDSVLSSREALRKWPSSVLAFPRIELKEMENKLPMETLVEECGENRERKCKLKDQSDKEEGTRDISSPKRLRDRQALFPAKVTNVSLLEKFERSESGGKIMTPESLSYPSCLKHDSEMKPQTSPACQDHNKAGQEMCYVCLQRAQRNSLLYYSEERRREIEDERLIQQYQMLKDQEALFRHQMKSLATREQNQKNAAYNLGVAEAIRNHKNEKPEFYKSFLFDKRPLSPALNALKQEEYSRSLLKQMDNRQENEIKQRQYRELMDRLEQVQLTEELAAQRAKFLKDKMEETQCYKRALDAQIKNKPSRLPPFEPDSSEPIFGKNEGELMVEKQKREQNYMKHQLEAAANHKRKAILHQLVDQRRDLQMLQRTQREHLADRTAELERVNRVNQCLQEDWERSAAMKKQRDLEDKAFERASDKLFLLDQCEKYRRCKQCQRRTSNVGESNLWPLNKFLPGSRLLV

SEQ ID NO: 6998 - protein, 797 aa, Homo sapiens
MENQGTRTQQIRQVLLLFVLLGMSQAGSETWSFSVAEEMQSGSFVGNLAKDLGLKVRELSSRGARVVSNDKKQRLQLDINTGDLLLSETLDREELCGSIEPCVLHLQVLMQNPTQFLQIELQVRDINDHSPIFSEKQMLLEIPENSPVGAVFLLESAKDLDVGINAVKSYTISPNSHFHIKMRVIPDNRKYPELVLDKALDYEELPELSFILSALDGGSPPRSGTALVRVVVVDINDNSPEFEQAFYEVKIRENSILGSLILIVSAWDLDSGTNGEICYTFSHASEDIRKTFEINQKSGEITLRAPLDFETIESYSIIIQATDGGGLFGKSTVIIHVIDVNDNAPEITVSSITSPIPENTPETVVMVFSIQDIDSGDNGRIVCSIPEDLPFVLKSSVENYYTLETERPLDRESTAEYNITITVTDLGIPRLKTEHNTTVLVSDVNDNAPTFTQTSYTLFVRENNSPALHIGSVSATDRDSGTNAQVNYSLLPPQDLHLPLASLVSINTDNGHLFALRSLDYEALQAFDFRVGATDRGSPALSSEALVRVLVLDANDNSPFVLYPLQNGSAPCTELVPRAAEPGYLVTKVVAVDGDSGQNAWLSYQLLKATEPGLFGVWAHNGEVRTARLLSERDAAKHRLVVLVKDNGEPPRSATATLQVLLVDGFSQPYLPLPEAAPAQAQADSLTVYLVVALASVSSLFLFSVLLFVAVRLCRRSRAASVGSCSVPKGPFPGHLVDVSGTGTLSQSYQYEVCLTGGSETNEFKFLKPVIPNIQAKGLGKNSEENSTFRNSFGFNF

SEQ ID NO: 6999 - protein, 922 aa, Homo sapiens
MFLHSVNLWNLAFYVFMVFLATLGLWDVFFGFEENKCSMSYMFEYPEYQKIELPKKLAKRYPAYELYLYGEGSYAEEHKILPLTGIPVLFLPGNAGSYKQVRSIGSIALRKAEDIDFKYHFDFFSVNFNEELVALYGGSLQKQTKFVHECIKTILKLYKGQEFAPKSVAIIGHSMGGLVARALLTLKNFKHDLINLLITQATPHVAPVMPLDRFITDFYTTVNNYWILNARHINLTTLSVAGGFRDYQVRSGLTFLPKLSHHTSALSVVSSAVPKTWVSTDHLSIVWCKQLQLTTVRAFFDLIDADTKQITQNSKKKLSVLYHHFIRHPSKHFEENPAIISDLTGTSMWVLVKVSKWTYVAYNESEKIYFTFPLENHRKIYTHVYCQSTMLDTNSWIFACINSTSMCLQGVDLSWKAELLPTIKYLTLRLQDYPSLSHLVVYVPSVRGSKFVVDCEFFKKEKRYIQLPVTHLFSFGLSSRKVVLNTNGLYYNLELLNFGQIYQAFKINVVSKCSAVKEEITSIYRLHIPWSYEDSLTIAQAPSSTEISLKLHIAQPENNTHVALFKMYTSSDCRYEVTVKTSFSQILGQVVRFHGGALPAYVVSNILLAYRGQLYSLFSTGCCLEYATMLDKEAKPYKVDPFVIIIKFLLGYKWFKELWDVLLLPELDAVILTCQSMCFPLISLILFLFGTCTAYWSGLLSSASVRLLSSLWLALKRPSELPKDIKMISPDLPFLTIVLIIVSWTTCGALAILLSYLYYVFKVVHLQASLTTFKNSQPVNPKHSRRSEKKSNHHKDSSIHHLRLSANDAEDSLRMHSTVINLLTWIVLLSMPSLIYWLKNLRYYFKLNPDPCKPLAFILIPTMAILGNTYTVSIKSSKLLKTTSQFPLPLAVGVIAFGSAHLYRLPCFVFIPLLLHALCNFM

SEQ ID NO: 7000 - protein, 631 aa, Homo sapiens
LAPRVATGTPEPNGGGGGKIDNTVEITPTSNGQVGTLGDAVPTEQLQGEREREREGEGDAGGDGLGSSLSLAVPPGPLSFEALLAQVGALGGGQQLQLGLCCLPVLFVALGMASDPIFTLAPPLHCHYGAFPPNASGWEQPPNASGVSVASAALAASAASRVATSTDPSCSGFAPPDFNHCLKDWDYNGLPVLTTNAIGQWDLVCDLGWQVILEQILFILGFASGYLFLGYPADRFGRRGIVLLTLGLVGPCGVGGAAAGSSTGVMALRFLLGFLLAGVDLGVYLMRLELCDPTQRLRVALAGELVGVGGHFLFLGLALVSKDWRFLQRMITAPCILFLFYGWPGLFLESARWLIVKRQIEEAQSVLRILAERNRPHGQMLGEEAQEALQDLENTCPLPATSSFSFASLLNYRNIWKNLLILGFTNFIAHAIRHCYQPVGGGGSPSDFYLCSLLASGTAALACVFLGVTVDRFGRRGILLLSMTLTGIASLVLLGLWDYLNEAAITTFSVLGLFSSQAAAILSTLLAAEVIPTTVRGRGLGLIMALGALGGLSGPAQRLHMGHGAFLQHVVLAACALLCILSIMLLPETKRKLLPEVLRDGELCRRPSLLRQPPPTRCDHVPLLATPNPAL

SEQ ID NO: 7001 - protein, 2477 aa, Homo sapiens
MLRGPGPGLLLLAVQCLGTAVPSTGASKSKRQAQQMVQPQSPVAVSQSKPGCYDNGKHYQINQQWERTYLGNALVCTCYGGSRGFNCESKPEAEETCFDKYTGNTYRVGDTYERPKDSMIWDCTCIGAGRGRISCTIANRCHEGGQSYKIGDTWRRPHETGGYMLECVCLGNGKGEWTCKPIAEKCFDHAAGTSYVVGETWEKPYQGWMMVDCTCLGEGSGRITCTSRNRCNDQDTRTSYRIGDTWSKKDNRGNLLQCICTGNGRGEWKCERHTSVQTTSSGSGPFTDVRAAVYQPQPHPQPPPYGHCVTDSGVVYSVGMQWLKTQGNKQMLCTCLGNGVSCQETAVTQTYGGNSNGEPCVLPFTYNGRTFYSCTTEGRQDGHLWCSTTSNYEQDQKYSFCTDHTVLVQTRGGNSNGALCHFPFLYNNHNYTDCTSEGRRDNMKWCGTTQNYDADQKFGFCPMAAHEEICTTNEGVMYRIGDQWDKQHDMGHMMRCTCVGNGRGEWTCIAYSQLRDQCIVDDITYNVNDTFHKRHEEGHMLNCTCFGQGRGRWKCDPVDQCQDSETGTFYQIGDSWEKYVHGVRYQCYCYGRGIGEWHCQPLQTYPSSSGPVEVFITETPSQPNSHPIQWNAPQPSHISKYILRWRPKNSVGRWKEATIPGHLNSYTIKGLKPGVVYEGQLISIQQYGHQEVTRFDFTTTSTSTPVTSNTVTGETTPFSPLVATSESVTEITASSFVVSWVSASDTVSGFRVEYELSEEGDEPQYLDLPSTATSVNIPDLLPGRKYIVNVYQISEDGEQSLILSTSQTTAPDAPPDTTVDQVDDTSIVVRWSRPQAPITGYRIVYSPSVEGSSTELNLPETANSVTLSDLQPGVQYNITIYAVEENQESTPVVIQQETTGTPRSDTVPSPRDLQFVEVTDVKVTIMWTPPESAVTGYRVDVIPVNLPGEHGQRLPISRNTFAEVTGLSPGVTYYFKVFAVSHGRESKPLTAQQTTKLDAPTNLQFVNETDSTVLVRWTPPRAQITGYRLTVGLTRRGQPRQYNVGPSVSKYPLRNLQPASEYTVSLVAIKGNQESPKATGVFTTLQPGSSIPPYNTEVTETTIVITWTPAPRIGFKLGVRPSQGGEAPREVTSDSGSIVVSGLTPGVEYVYTIQVLRDGQERDAPIVNKVVTPLSPPTNLHLEANPDTGVLTVSWERSTTPDITGYRITTTPTNGQQGNSLEEVVHADQSSCTFDNLSPGLEYNVSVYTVKDDKESVPISDTIIPEVPQLTDLSFVDITDSSIGLRWTPLNSSTIIGYRITVVAAGEGIPIFEDFVDSSVGYYTVTGLEPGIDYDISVITLINGGESAPTTLTQQTAVPPPTDLRFTNIGPDTMRVTWAPPPSIDLTNFLVRYSPVKNEEDVAELSISPSDNAVVLTNLLPGTEYVVSVSSVYEQHESTPLRGRQKTGLDSPTGIDFSDITANSFTVHWIAPRATITGYRIRHHPEHFSGRPREDRVPHSRNSITLTNLTPGTEYVVSIVALNGREESPLLIGQQSTVSDVPRDLEVVAATPTSLLISWDAPAVTVRYYRITYGETGGNSPVQEFTVPGSKSTATISGLKPGVDYTITVYAVTGRGDSPASSKPISINYRTEIDKPSQMQVTDVQDNSISVKWLPSSSPVTGYRVTTTPKNGPGPTKTKTAGPDQTEMTIEGLQPTVEYVVSVYAQNPSGESQPLVQTAVTNIDRPKGLAFTDVDVDSIKIAWESPQGQVSRYRVTYSSPEDGIHELFPAPDGEEDTAELQGLRPGSEYTVSVVALHDDMESQPLIGTQSTAIPAPTDLKFTQVTPTSLSAQWTPPNVQLTGYRVRVTPKEKTGPMKEINLAPDSSSVVVSGLMVATKYEVSVYALKDTLTSRPAQGVVTTLENVSPPRRARVTDATETTITISWRTKTETITGFQVDAVPANGQTPIQRTIKPDVRSYTITGLQPGTDYKIYLYTLNDNARSSPVVIDASTAIDAPSNLRFLATTPNSLLVSWQPPRARITGYIIKYEKPGSPPREVVPRPRPGVTEATITGLEPGTEYTIYVIALKNNQKSEPLIGRKKTDELPQLVTLPHPNLHGPEILDVPSTVQKTPFVTHPGYDTGNGIQLPGTSGQQPSVGQQMIFEEHGFRRTTPPTTATPIRHRPRPYPPNVGEEIQIGHIPREDVDYHLYPHGPGLNPNASTGQEALSQTTISWAPFQDTSEYIISCHPVGTDEEPLQFRVPGTSTSATLTGLTRGATYNVIVEALKDQQRHKVREEVVTVGNSVNEGLNQPTDDSCFDPYTVSHYAVGDEWERMSESGFKLLCQCLGFGSGHFRCDSSRWCHDNGVNYKIGEKWDRQGENGQMMSCTCLGNGKGEFKCDPHEATCYDDGKTYHVGEQWQKEYLGAICSCTCFGGQRGWRCDNCRRPGGEPSPEGTTGQSYNQYSQRYHQRTNTNVNCPIECFMPLDVQADREDSRE

SEQ ID NO: 7002 - protein, 503 aa, Homo sapiens
MDLIPNFAMETWVLVATSLVLLYIYGTHSHKLFKKLGIPGPTPLPFLGTILFYLRGLWNFDRECNEKYGEMWGLYEGQQPMLVIMDPDMIKTVLVKECYSVFTNQMPLGPMGFLKSALSFAEDEEWKRIRTLLSPAFTSVKFKEMVPIISQCGDMLVRSLRQEAENSKSINLKDFFGAYTMDVITGTLFGVNLDSLNNPQDPFLKNMKKLLKLDFLDPFLLLISLFPFLTPVFEALNIGLFPKDVTHFLKNSIERMKESRLKDKQKHRVDFFQQMIDSQNSKETKSHKALSDLELVAQSIIIIFAAYDTTSTTLPFIMYELATHPDVQQKLQEEIDAVLPNKAPVTYDALVQMEYLDMVVNETLRLFPVVSRVTRVCKKDIEINGVFIPKGLAVMVPIYALHHDPKYWTEPEKFCPERFSKKNKDSIDLYRYIPFGAGPRNCIGMRFALTNIKLAVIRALQNFSFKPCKETQIPLKLDNLPILQPEKPIVLKVHLRDGITSGP

SEQ ID NO: 7003 - protein, 1219 aa, Homo sapiens
MLRRVTVAAVCATRRKLCEAGRELAALWGIETRGRCEDSAAARPFPILAMPGRNKAKSTCSCPDLQPNGQDLGENSRVARLGADESEEEGRRGSLSNAGDPEIVKSPSDPKQYRYIKLQNGLQALLISDLSNMEGKTGNTTDDEEEEEVEEEEEDDDEDSGAEIEDDDEEGFDDEDEFDDEHDDDLDTEDNELEELEERAEARKKTTEKQQLQSLFLLWSKLTDRLWFKSTYSKMSSTLLVETRNLYGVVGAESRSAPVQHLAGWQAEEQQGETDTVLSAAALCVGVGSFADPDDLPGLAHFLEHMVFMGSLKYPDENGFDAFLKKHGGSDNASTDCERTVFQFDVQRKYFKEALDRWAQFFIHPLMIRDAIDREVEAVDSEYQLARPSDANRKEMLFGSLARPGHPMGKFFWGNAETLKHEPRKNNIDTHARLREFWMRYYSSHYMTLVVQSKETLDTLEKWVTEIFSQIPNNGLPRPNFGHLTDPFDTPAFNKLYRVVPIRKIHALTITWALPPQQQHYRVKPLHYISWLVGHEGKGSILSFLRKKCWALALFGGNGETGFEQNSTYSVFSISITLTDEGYEHFYEVAYTVFQYLKMLQKLGPEKRIFEEIRKIEDNEFHYQEQTDPVEYVENMCENMQLYPLQDILTGDQLLFEYKPEVIGEALNQLVPQKANLVLLSGANEGKCDLKEKWFGTQYSIEDIENSWAELWNSNFELNPDLHLPAENKYIATDFTLKAFDCPETEYPVKIVNTPQGCLWYKKDNKFKIPKAYIRFHLISPLIQKSAANVVLFDIFVNILTHNLAEPAYEADVAQLEYKLVAGEHGLIIRVKGFNHKLPLLFQLIIDYLAEFNSTPAVFTMITEQLKKTYFNILIKPETLAKDVRLLILEYARWSMIDKYQALMDGLSLESLLSFVKEFKSQLFVEGLVQGNVTSTESMDFLKYVVDKLNFKPLEQEMPVQFQVVELPSGHHLCKVKALNKGDANSEVTVYYQSGTRSLREYTLMELLVMHMEEPCFDFLRTKQTLGYHVYPTCRNTSGILGFSVTVGTQATKYNSEVVDKKIEEFLSSFEEKIENLTEEAFNTQVTALIKLKECEDTHLGEEVDRNWNEVVTQQYLFDRLAHEIEALKSFSKSDLVNWFKAHRGPGSKMLSVHVVGYGKYELEEDGTPSSEDSNSSCEVMQLTYLPTSPLLADCIIPITDIRAFTTTLNLLPYHKIVK

SEQ ID NO: 7004 - protein, 1015 aa, Homo sapiens
MRGSGPRGAGRRRPPSGGGDTPITPASLAGCYSAPRRAPLWTCLLLCAALRTLLASPSNEVNLLDSRTVMGDLGWIAFPKNGWEEIGEVDENYAPIHTYQVCKVMEQNQNNWLLTSWISNEGASRIFIELKFTLRDCNSLPGGLGTCKETFNMYYFESDDQNGRNIKENQYIKIDTIAADESFTELDLGDRVMKLNTEVRDVGPLSKKGFYLAFQDVGACIALVSVRVYYKKCPSVVRHLAVFPDTITGADSSQLLEVSGSCVNHSVTDEPPKMHCSAEGEWLVPIGKCMCKAGYEEKNGTCQVCRPGFFKASPHIQSCGKCPPHSYTHEEASTSCVCEKDYFRRESDPPTMACTRPPSAPRNAISNVNETSVFLEWIPPADTGGRKDVSYYIACKKCNSHAGVCEECGGHVRYLPRQSGLKNTSVMMVDLLAHTNYTFEIEAVNGVSDLSPGARQYVSVNVTTNQAAPSPVTNVKKGKIAKNSISLSWQEPDRPNGIILEYEIKYFEKDQETSYTIIKSKETTITAEGLKPASVYVFQIRARTAAGYGVFSRRFEFETTPVFAASSDQSQIPVIAVSVTVGVILLAVVIGVLLSGRRCGYSKAKQDPEEEKMHFHNGHIKLPGVRTYIDPHTYEDPNQAVHEFAKEIEASCITIERVIGAGEFGEVCSGRLKLPGKRELPVAIKTLKVGYTEKQRRDFLGEASIMGQFDHPNIIHLEGVVTKSKPVMIVTEYMENGSLDTFLKKNDGQFTVIQLVGMLRGISAGMKYLSDMGYVHRDLAARNILINSNLVCKVSDFGLSRVLEDDPEAAYTTRGGKIPIRWTAPEAIAFRKFTSASDVWSYGIVMWEVVSYGERPYWEMTNQDVIKAVEEGYRLPSPMDCPAALYQLMLDCWQKERNSRPKFDEIVNMLDKLIRNPSSLKTLVNASCRVSNLLAEHSPLGSGAYRSVGEWLEAIKMGRYTEIFMENGYSSMDAVAQVTLEDLRRLGVTLVGHQKKIMNSLQEMKVQLVNGMVPL

SEQ ID NO: 7005 - protein, 532 aa, Homo sapiens
MAKRVAIVGAGVSGLASIKCCLEEGLEPTCFERSDDLGGLWRFTEHVEEGRASLYKSVVSNSCKEMSCYSDFPFPEDYPNYVPNSQFLEYLKMYANHFDLLKHIQFKTKVCSVTKCSDSAVSGQWEVVTMHEEKQESAIFDAVMVCTGFLTNPYLPLDSFPGINAFKGQYFHSRQYKHPDIFKDKRVLVIGMGNSGTDIAVEASHLAEKVFLSTTGGGWVISRIFDSGYPWDMVFMTRFQNMLRNSLPTPIVTWLMERKINNWLNHANYGLIPEDRTQLKEFVLNDELPGRIITGKVFIRPSIKEVKENSVIFNNTSKEEPIDIIVFATGYTFAFPFLDESVVKVEDGQASLYKYIFPAHLQKPTLAIIGLIKPLGSMIPTGETQARWAVRVLKGVNKLPPPSVMIEEINARKENKPSWFGLCYCKALQSDYITYIDELLTYINAKPNLFSMLLTDPHLALTVFFGPCSPYQFRLTGPGKWEGARNAIMTQWDRTFKVIKARVVQESPSPFESFLKVFSFLALLVAIFLIFL

SEQ ID NO: 7006 - protein, 842 aa, Homo sapiens
MCGSERILQAGNILEIRVGQAGARRVATMTSPVLVDIREEVTCPICLELLTEPLSIDCGHSFCQACITPNGRESVIGQEGERSCPVCQTSYQPGNLRPNRHLANIVRRLREVVLGPGKQLKAVLCADHGEKLQLFCQEDGKVICWLCERSQEHRGHHTFLVEEVAQEYQEKFQESLKKLKNEEQEAEKLTAFIREKKTSWKNQMEPERCRIQTEFNQLRNILDRVEQRELKKLEQEEKKGLRIIEEAENDLVHQTQSLRELISDLERRCQGSTMELLQDVSDVTERSEFWTLRKPEALPTKLRSMFRAPDLKRMLRVCRELTDVQSYWAIQGSLTRRERRASGVRTRRSQGSSAMASKILLNVQEEVTCPICLELLTEPLSLDCGHSLCRACITVSNKEAVTSMGGKSSCPVCGISYSFEHLQANQHLANIVERLKEVKLSPDNGKKRDLCDHHGEKLLLFCKEDRKVICWLCERSQEHRGHHTVLTEEVFKECQEKLQAVLKRLKKEEEEAEKLEADIREEKTSWKYQVQTERQRIQTEFDQLRSILNNEEQRELQRLEEEEKKTLDKFAEAEDELVQQKQLVRELISDVECRSQWSTMELLQDMSGIMKWSEIWRLKKPKMVSKKLKTVFHAPDLSRMLQMFRELTAVRCYWVDVTLNSVNLNLNLVLSEDQRQVISVPIWPFQCYNYGVLGSQYFSSGKHYWEVDVSKKTAWILGVYCRTYSRHMKYVVRRCANRQNLYTKYRPLFGYWVIGLQNKCKYGVFEESLSSDPEVLTLSMAVPPCRVGVFLDYEAGIVSFFNVTSHGSLIYKFSKCCFSQPVYPYFNPWNCPAPMTLCPPSS

SEQ ID NO: 7007 - protein, 826 aa, Homo sapiens
MNIQEQGFPLDLGASFTEDAPRPPVPGEEGELVSTDPRPASYSFCSGKGVGIKGETSTATPRRSDLDLGYEPEGSASPTPPYLKWAESLHSLLDDQDGISLFRTFLKQEGCADLLDFWFACTGFRKLEPCDSNEEKRLKLARAIYRKYILDNNGIVSRQTKPATKSFIKGCIMKQLIDPAMFDQAQTEIQATMEENTYPSFLKSDIYLEYTRTGSESPKVCSDQSSGSGTGKGISGYLPTLNEDEEWKCDQDMDEDDGRDAAPPGRLPQKLLLETAAPRVSSSRRYSEGREFRYGSWREPVNPYYVNAGYALAPATSANDSEQQSLSSDADTLSLTDSSVDGIPPYRIRKQHRREMQESVQVNGRVPLPHIPRTYRVPKEVRVEPQKFAEELIHRLEAVQRTREAEEKLEERLKRVRMEEEGEDGDPSSGPPGPCHKLPPAPAWHHFPPRCVDMGCAGLRDAHEENPESILDEHVQRVLRTPGRQSPGPGHRSPDSGHVAKMPVALGGAASGHGKHVPKSGAKLDAAGLHHHRHVHHHVHHSTARPKEQVEAEATRRAQSSFAWGLEPHSHGARSRGYSESVGAAPNASDGLAHSGKVGVACKRNAKKAESGKSASTEVPGASEDAEKNQKIMQWIIEGEKEISRHRRTGHGSSGTRKPQPHENSRPLSLEHPWAGPQLRTSVQPSHLFIQDPTMPPHPAPNPLTQLEEARRRLEEEEKRASRAPSKQRTRSQRKVGGGSAQPCDSIVVAYYFCGEPIPYRTLVRGRAVTLGQFKELLTKKGSYRYYFKKVSDEFDCGVVFEEVREDEAVLPVFEEKIIGKVEKVD

SEQ ID NO: 7008 - protein, 521 aa, Homo sapiens
MEASWGSFNAERGWYVSVQQPEEAEAEELSPLLSNELHRQRSPGVSFGLSVFNLMNAIMGSGILGLAYVLANTGVFGFSFLLLTVALLASYSVHLLLSMCIQTAVTSYEDLGLFAFGLPGKLVVAGTIIIQNIGAMSSYLLIIKTELPAAIAEFLTGDYSRYWYLDGQTLLIIICVGIVFPLALLPKIGFLGYTSSLSFFFMMFFALVVIIKKWSIPCPLTLNYVEKGFQISNVTDDCKPKLFHFSKESAYALPTMAFSFLCHTSILPIYCELQSPSKKRMQNVTNTAIALSFLIYFISALFGYLTFYDKVESELLKGYSKYLSHDVVVMTVKLCILFAVLLTVPLIHFPARKAVTMMFFSNFPFSWIRHFLITLALNIIIVLLAIYVPDIRNVFGVVGASTSTCLIFIFPGLFYLKLSREDFLSWKKLGGLILSHRLACSGVISAHCNLCLPDSSNPPTSASRVAETTGRDTMEMCTQRKGHARTQQEGNCLQAKGRGLRRTKRVHTLILHFPTSRTVSK

SEQ ID NO: 7009 - protein, 1017 aa, Homo sapiens
MDLIRGVLLRLLLLASSLGPGAVSLRAAIRKPGKVGPPLDIKLGALNCTAFSIQWKMPRHPGSPILGYTVFYSEVGADKSLQEQLHSVPLSRDIPTTEEVIGDLKPGTEYRVSIAAYSQAGKGRLSSPRHVTTLSQDSCLPPAAPQQPHVIVVSDSEVALSWKPGASEGSAPIQYYSVEFIRPDFDKKWTSIHERIQMDSMVIKGLDPDTNYQFAVRAMNSHGPSPRSWPSDIIRTLCPEEAGSGRYGPRYITDMGAGEDDEGFEDDLDLDISFEEVKPLPATKGGNKKFLVESKKMSISNPKTISRLIPPTSASLPVTTVAPQPIPIQRKGKNGVAIMSRLFDMPCDETLCSADSFCVNDYTWGGSRCQCTLGKGGESCSEDIVIQYPQFFGHSYVTFEPLKNSYQAFQITLEFRAEAEDGLLLYCGENEHGRGDFMSLAIIRRSLQFRFNCGTGVAIIVSETKIKLGGWHTVMLYRDGLNGLLQLNNGTPVTGQSQGQYSKITFRTPLYLGGAPSAYWLVRATGTNRGFQGCVQSLAVNGRRIDMRPWPLGKALSGADVGECSSGICDEASCIHGGTCTAIKADSYICLCPLGFKGRHCEDAFTLTIPQFRESLRSYAATPWPLEPQHYLSFMEFEITFRPDSGDGVLLYSYDTGSKDFLSINLAGGHVEFRFDCGSGTGVLRSEDPLTLGNWHELRVSRTAKNGILQVDKQKIVEGMAEGGFTQIKCNTDIFIGGVPNYDDVKKNSGVLKPFSGSIQKIILNDRTIHVKHDFTSGVNVENAAHPCVRAPCAHGGSCRPRKEGYDCDCPLGFEGLHCQKECGNYCLNTIIEAIEIPQFIGRSYLTYDNPDILKRVSGSRSNVFMRFKTTAKDGLLLWRGDSPMRPNSDFISLGLRDGALVFSYNLGSGVASIMVNGSFNDGRWHRVKAVRDGQSGKITVDDYGARTGKSPGMMRQLNINGALYVGGMKEIALHTNRQYMRGLVGCISHFTLSTDYHISLVEDAVDGKNINTCGAK

SEQ ID NO: 7010 - protein, 647 aa, Homo sapiens
MVMYARKQQRLSDGCHDRRGDSQPYQALKYSSKSHPSSGDHRHEKMRDAGDPSPPNKMLRRSDSPENKYSDSTGHSKAKNVHTHRVRERDGGTSYSPQENSHNHSALHSSNSHSSNPSNNPSKTSDAPYDSADDWSEHISSSGKKYYYNCRTEVSQWEKPKEWLEREQRQKEANKMAVNSFPKDRDYRREVMQATATSGFASGMEDKHSSDASSLLPQNILSQTSRHNDRDYRLPRAETHSSSTPVQHPIKPVVHPTATPSTVPSSPFTLQSDHQPKKSFDANGASTLSKLPTPTSSVPAQKTERKESTSGDKPVSHSCTTPSTSSASGLNPTSAPPTSASAVPVSPVPQSPIPPLLQDPNLLRQLLPALQATLQLNNSNVDISKINEVLTAAVTQASLQSIIHKFLTAGPSAFNITSLISQAAQLSTQAQPSNQSPMSLTSDASSPRSYVSPRISTPQTNTVPIKPLISTPPVSSQPKVSTPVVKQGPVSQSATQQPVTADKQQGHEPVSPRSLQRSSSQRSPSPGPNHTSNSSNASNATVVPQNSSARSTCSLTPALAAHFSENLIKHVQGWPADHAEKQASRLREEAHNMGTIHMSEICTELKNLRSLVRVCEIQATLREQRILFLRQQIKELEKLKNQNSFMV

SEQ ID NO: 7011 - protein, 495 aa, Homo sapiens
MENKAMYLHTVSDCDTSSICEDSFDGRSLSKLNLCEDGPCHKRRASICCTQLGSLSALKHAVLGLYLLVFLILVGIFILAVSRPRSSPDDLKALTRNVNRLNESFRDLQLRLLQAPLQADLTEQVWKVQDALQNQSDSLLALAGAVQRLEGALWGLQAQAVQTEQAVALLRDRTGQQSDTAQLELYQLQVESNSSQLLLRRHAGLLDGLARRVGILGEELADVGGVLRGLNHSLSYDVALHRTRLQDLRVLVSNASEDTRRLRLAHVGMELQLKQELAMLNAVTEDLRLKDWEHSIALRNISLAKGPPGPKGDQGDEGKEGRPGIPGLPGLRGLPGERGTPGLPGPKGDDGKLGATGPMGMRGFKGDRGPKGEKGEKGDRAGDASGVEAPMMIRLVNGSGPHEGRVEVYHDRRWGTVCDDGWDKKDGDVVCRMLGFRGVEEVYRTARFGQGTGRIWMDDVACKGTEETIFRCSFSKWGVTNCGHAEDASVTCNRH

SEQ ID NO: 7012 - protein, 317 aa, Homo sapiens
METNCRKLVSACVQLGVQPAAVECLFSKDSEIKKVEFTDSPESRKEAASSKFFPRQHPGANEKDKSQQGKNEDVGAEDPSKKKRQRRQRTHFTSQQLQELEATFQRNRYPDMSTREEIAVWTNLTEARVRVWFKNRRAKWRKRERNQQAELCKNGFGPQFNGLMQPYDDMYPGYSYNNWAAKGLTSASLSTKSFPFFNSMNVNPLSSQSMFSPPNSISSMSMSSSMVPSAVTGVPGSSLNSLNNLNNLSSPSLNSAVPTPACPYAPPTPPYVYRDTCNSSLASLRLKAKQHSSFGYASVQNPASNLSACQYAVDRPV

SEQ ID NO: 7013 - protein, 498 aa, Homo sapiens
MNGPEDLPKSYDYDLIIIGGGSGGLAAAKEAAQYGKKVMVLDFVTPTPLGTRWGLGGTCVNVGCIPKKLMHQAALLGQALQDSRNYGWKVEETVKHDWDRMIEAVQNHIGSLNWGYRVALREKKVVYENAYGQFIGPHRIKATNNKGKEKIYSAERFLIATGERPRYLGIPGDKEYCISSDDLFSLPYCPGKTLVVGASYVALECAGFLAGIGLDVTVMVRSILLRGFDQDMANKIGEHMEEHGIKFIRQFVPIKVEQIEAGTPGRLRVVAQSTNSEEIIEGEYNTVMLAIGRDACTRKIGLETVGVKINEKTGKIPVTDEEQTNVPYIYAIGDILEDKVELTPVAIQAGRLLAQRLYAGSTVKCDYENVPTTVFTPLEYGACGLSEEKAVEKFGEENIEVYHSYFWPLEWTIPSRDNNKCYAKIICNTKDNERVVGFHVLGPNAGEVTQGFAAALKCGLTKKQLDSTIGIHPVCAEVFTTLSVTKRSGASILQAGCG

SEQ ID NO: 7014 - protein, 329 aa, Homo sapiens
MSGVVPTAPEQPAGEMENQTKPPDPRPDAPPEYNSHFLPGPPGTAVPPPTGYPGGLPMGYYSPQQPSTFPLYQPVGGIHPVRYQPGKYPMPNQSVPITWMPGPTPMANCPPGLEYLVQLDNIHVLQHFEPLEMMTCFETNNRYDIKNNSDQMVYIVTEDTDDFTRNAYRTLRPFVLRVTDCMGREIMTMQRPFRCTCCCFCCPSARQELEVQCPPGVTIGFVAEHWNLCRAVYSIQNEKKENVMRVRGPCSTYGCGSDSVFEVKSLDGISNIGSIIRKWNGLLSAMADADHFDIHFPLDLDVKMKAMIFGACFLIDFMYFERSPPQRSR

SEQ ID NO: 7015 - protein, 676 aa, Homo sapiens
MAAATGDPGLSKLQFAPFSSALDVGFWHELTQKKLNEYRLDEAPKDIKGYYYNGDSAGLPARLTLEFSAFDMSAPTPARCCPAIGTLYNTNTLESFKTADKKLLLEQAANEIWESIKSGTALENPVLLNKFLLLTFADLKKYHFYYWFCYPALCLPESLPLIQGPVGLDQRFSLKQIEALECAYDNLCQTEGVTALPYFLIKYDENMVLVSLLKHYSDFFQGQRTKITIGVYDPCNLAQYPGWPLRNFLVLAAHRWSSSFQSVEVVCFRDRTMQGARDVAHSIIFEVKLPEMAFSPDCPKAVGWEKNQKGGMGPRMVNLSECMDPKRLAESSVDLNLKLMCWRLVPTLDLDKVVSVKCLLLGAGTLGCNVARTLMGWGVRHITFVDNAKISYSNPVRQPLYEFEDCLGGGKPKALAAADRLQKIFPGVNARGFNMSIPMPGHPVNFSSVTLEQARRDVEQLEQLIESHDVVFLLMDTRESRWLPAVIAASKRKLVINAALGFDTFVVMRHGLKKPKQQGAGDLCPNHPVASADLLGSSLFANIPGYKLGCYFCNDVVAPGDSTRDRTLDQQCTVSRPGLAVIAGALAVELMVSVLQHPEGGYAIASSSDDRMNEPPTSLGLVPHQVLDQYEREGFNFLAKVFNSSHSFLEDLTGLTLLHQETQAAEIWDMSDDETI

SEQ ID NO: 7016 - protein, 505 aa, Homo sapiens
MTKAQESLTLEDVAVDFTWEEWQFLSPAQKDLYRDVMLENYSNLVSVGYQAGKPDALTKLEQGEPLWTLEDEIHSPAHPEIEKADDHLQQPLQNQKILKRTGQRYEHGRTLKSYLGLTNQSRRYNRKEPAEFNGDGAFLHDNHEQMPTEIEFPESRKPISTKSQFLKHQQTHNIEKAHECTDCGKAFLKKSQLTEHKRIHTGKKPHVCSLCGKAFYKKYRLTEHERAHRGEKPHGCSLCGKAFYKRYRLTEHERAHKGEKPYGCSECGKAFPRKSELTEHQRIHTGIKPHQCSECGRAFSRKSLLVVHQRTHTGEKPHTCSECGKGFIQKGNLNIHQRTHTGEKPYGCIDCGKAFSQKSCLVAHQRYHTGKTPFVCPECGQPCSQKSGLIRHQKIHSGEKPYKCSDCGKAFLTKTMLIVHHRTHTGERPYGCDECEKAYFYMSCLVKHKRIHSREKRGDSVKVENPSTASHSLSPSEHVQGKSPVNMVTVAMVAGQCEFAHILHS

SEQ ID NO: 7017 - protein, 4525 aa, Homo sapiens
MDPSRAIQNEISSLKDERDRVQKKTFTKWVNKHLIKAQRHISDLYEDLRDGHNLISLLEVLSGDSLPREKGRMRFHKLQNVQIALDYLRHRQVKLVNIRNDDIADGNPKLTLGLIWTIILHFQISDIQVSGQSEDMTAKEKLLLWSQRMVEGYQGLRCDNFTSSWRDGRLFNAIIHRHKPLLIDMNKVYRQTNLENLDQAFSVAERDLGVTRLLDPEDVDVPQPDEKSIITYVSSLYDAMPRVPDVQDGVRANELQLRWQEYRELVLLLLQWMRHHTAAFEERRFPSSFEEIEILWSQFLKFKEMELPAKEADKNRSKGIYQSLEGAVQAGQLKVPPGYHPLDVEKEWGKLHVAILEREKQLRSEFERLECLQRIVTKLQMEAGLCEEQLNQADALLQSDVRLLAAGKVPQRAGEVERDLDKADSMIRLLFNDVQTLKDGRHPQGEQMYRRVYRLHERLVAIRTEYNLRLKAGVAAPATQVAQVTLQSVQRRPELEDSTLRYLQDLLAWVEENQHRVDGAEWGVDLPSVEAQLGSHRGLHQSIEEFRAKIERARSDEGQLSPATRGAYRDCLGRLDLQYAKLLNSSKARLRSLESLHSFVAAATKELMWLNEKEEEEVGFDWSDRNTNMTAKKESYSALMRELELKEKKIKELQNAGDRLLREDHPARPTVESFQAALQTQWSWMLQLCCCIEAHLKENAAYFQFFSDVREAEGQLQKLQEALRRKYSCDRSATVTRLEDLLQDAQDEKEQLNEYKGHLSGLAKRAKAVVQLKPRHPAHPMRGRLPLLAVCDYKQVEVTVHKGDECQLVGPAQPSHWKVLSSSGSEAAVPSVCFLVPPPNQEAQEAVTRLEAQHQALVTLWHQLHVDMKSLLAWQSLRRDVQLIRSWSLATFRTLKPEEQRQALHSLELHYQAFLRDSQDAGGFGPEDRLMAEREYGSCSHHYQQLLQSLEQGAQEESRCQRCISELKDIRLQLEACETRTVHRLRLPLDKEPARECAQRIAEQQKAQAEVEGLGKGVARLSAEAEKVLALPEPSPAAPTLRSELELTLGKLEQVRSLSAIYLEKLKTISLVIRGTQGAEEVLRAHEEQLKEAQAVPATLPELEATKASLKKLRAQAEAQQPTFDALRDELRGAQEVGERLQQRHGERDVEVERWRERVAQLLERWQAVLAQTDVRQRELEQLGRQLRYYRESADPLGAWLQDARRRQEQIQAMPLADSQAVREQLRQEQALLEEIERHGEKVEECQRFAKQYINAIKDYELQLVTYKAQLEPVASPAKKPKVQSGSESVIQEYVDLRTHYSELTTLTSQYIKFISETLRRMEEEERLAEQQRAEERERLAEVEAALEKQRQLAEAHAQAKAQAEREAKELQQRMQEEVVRREEAAVDAQQQKRSIQEELQQLRQSSEAEIQAKARQAEAAERSRLRIEEEIRVVRLQLEATERQRGGAEGELQALRARAEEAEAQKRQAQEEAERLRRQVQDESQRKRQAEVELASRVKAEAEAAREKQRALQALEELRLQAEEAERRLRQAEVERARQVQVALETAQRSAEAELQSKRASFAEKTAQLERSLQEEHVAVAQLREEAERRAQQQAEAERAREEAERELERWQLKANEALRLRLQAEEVAQQKSLAQAEAEKQKEEAEREARRRGKAEEQAVRQRELAEQELEKQRQLAEGTAQQRLAAEQELIRLRAETEQGEQQRQLLEEELARLQREAAAATQKRQELEAELAKVRAEMEVLLASKARAEEESRSTSEKSKQRLEAEAGRFRELAEEAARLRALAEEAKRQRQLAEEDAARQRAEAERVLAEKLAAIGEATRLKTEAEIALKEKEAENERLRRLAEDEAFQRRRLEEQAAQHKADIEERLAQLRKASDSELERQKGLVEDTLRQRRQVEEEILALKASFEKAAAGKAELELELGRIRSNAEDTLRSKEQAELEAARQRQLAAEEERRRREAEERVQKSLAAEEEAARQRKAALEEVERLKAKVEEARRLRERAEQESARQLQLAQEAAQKRLQAEEKAHAFAVQQKEQELQQTLQQEQSVLDQLRGEAEAARRAAEEAEEARVQAEREAAQSRRQVEEAERLKQSAEEQAQARAQAQAAAEKLRKEAEQEAARRAQAEQAALRQKQAADAEMEKHKKFAEQTLRQKAQVEQELTTLRLQLEETDHQKNLLDEELQRLKAEATEAARQRSQVEEELFSVRVQMEELSKLKARIEAENRALILRDKDNTQRFLQEEAEKMKQVAEEAARLSVAAQEAARLRQLAEEDLAQQRALAEKMLKEKMQAVQEATRLKAEAELLQQQKELAQEQARRLQEDKEQMAQQLAEETQGFQRTLEAERQRQLEMSAEAERLKLRVAEMSRAQARAEEDAQRFRKQAEEIGEKLHRTELATQEKVTLVQTLEIQRQQSDHDAERLREAIAELEREKEKLQQEAKLLQLKSEEMQTVQQEQLLQETQALQQSFLSEKDSLLQRERFIEQEKAKLEQLFQDEVAKAQQLREEQQRQQQQMEQERQRLVASMEEARRRQHEAEEGVRRKQEELQQLEQQRRQQEELLAEENQRLREQLQLLEEQHRAALAHSEEVTASQVAATKTLPNGRDALDGPAAEAEPEHSFDGLRRKVSAQRLQEAGILSAEELQRLAQGHTTVDELARREDVRHYLQGRSSIAGLLLKATNEKLSVYAALQRQLLSPGTALILLEAQAASGFLLDPVRNRRLTVNEAVKEGVVGPELHHKLLSAERAVTGYKDPYTGQQISLFQAMQKGLIVREHGIRLLEAQIATGGVIDPVHSHRVPVDVAYRRGYFDEEMNRVLADPSDDTKGFFDPNTHENLTYLQLLERCVEDPETGLCLLPLTDKAAKGGELVYTDSEARDVFEKATVSAPFGKFQGKTVTIWEIINSEYFTAEQRRDLLRQFRTGRITVEKIIKIIITVVEEQEQKGRLCFEGLRSLVPAAELLESRVIDRELYQQLQRGERSVRDVAEVDTVRRALRGANVIAGVWLEEAGQKLSIYNALKKDLLPSDMAVALLEAQAGTGHIIDPATSARLTVDEAVRAGLVGPEFHEKLLSAEKAVTGYRDPYTGQSVSLFQALKKGLIPREQGLRLLDAQLSTGGIVDPSKSHRVPLDVACARGCLDEETSRALSAPRADAKAYSDPSTGEPATYGELQQRCRPDQLTGLSLLPLSEKAARARQEELYSELQARETFEKTPVEVPVGGFKGRTVTVWELISSEYFTAEQRQELLRQFRTGKVTVEKVIKILITIVEEVETLRQERLSFSGLRAPVPASELLASGVLSRAQFEQLKDGKTTVKDLSELGSVRTLLQGSGCLAGIYLEDTKEKVSIYEAMRRGLLRATTAALLLEAQAATGFLVDPVRNQRLYVHEAVKAGVVGPELHEQLLSAEKAVTGYRDPYSGSTISLFQAMQKGLVLRQHGIRLLEAQIATGGIIDPVHSHRVPVDVAYQRGYFSEEMNRVLADPSDDTKGFFDPNTHENLTYRQLLERCVEDPETGLRLLPLKGAEKAEVVETTQVYTEEETRRAFEETQIDIPGGGSHGGSTMSLWEVMQSDLIPEEQRAQLMADFQAGRVTKERMIIIIIEIIEKTEIIRQQGLASYDYVRRRLTAEDLFEARIISLETYNLLREGTRSLREALEAESAWCYLYGTGSVAGVYLPGSRQTLSIYQALKKGLLSAEVARLLLEAQAATGFLLDPVKGERLTVDEAVRKGLVGPELHDRLLSAERAVTGYRDPYTEQTISLFQAMKKELIPTEEALRLLDAQLATGGIVDPRLGFHLPLEVAYQRGYLNKDTHDQLSEPSEVRSYVDPSTDERLSYTQLLRRCRRDDGTGQLLLPLSDARKLTFRGLRKQITMEELVRSQVMDEATALQLREGLTSIEEVTKNLQKFLEGTSCIAGVFVDATKERLSVYQAMKKGIIRPGTAFELLEAQAATGYVIDPIKGLKLTVEEAVRMGIVGPEFKDKLLSAERAVTGYKDPYSGKLISLFQAMKKGLILKDHGIRLLEAQIATGGIIDPEESHRLPVEVAYKRGLFDEEMNEILTDPSDDTKGFFDPNTEENLTYLQLMERCITDPQTGLCLLPLKEKKRERKTSSKSSVRKRRVVIVDPETGKEMSVYEAYRKGLIDHQTYLELSEQECEWEEITISSSDGVVKSMIIDRRSGRQYDIDDAIAKNLIDRSALDQYRAGTLSITEFADMLSGNAGGFRSRSSSVGSSSSYPISPAVSRTQLASWSDPTEETGPVAGILDTETLEKVSITEAMHRNLVDNITGQRLLEAQACTGGIIDPSTGERFPVTDAVNKGLVDKIMVDRINLAQKAFCGFEDPRTKTKMSAAQALKKGWLYYEAGQRFLEVQYLTGGLIEPDTPGRVPLDEALQRGTVDARTAQKLRDVGAYSKYLTCPKTKLKISYKDALDRSMVEEGTGLRLLEAAAQSTKGYYSPYSVSGSGSTAGSRTGSRTGSRAGSRRGSFDATGSGFSMTFSSSSYSSSGYGRRYASGSSASLGGPESAVA

SEQ ID NO: 7018 - protein, 809 aa, Homo sapiens
MGPLTFMDVAIEFCLEEWQCLDIAQQNLYRNVMLENYRNLVFLGIAVSKPDLITCLEQEKEPWEPMRRHEMVAKPPVMCSHFTQDFWPEQHIKDPFQKATLRRYKNCEHKNVHLKKDHKSVDECKVHRGGYNGFNQCLPATQSKIFLFDKCVKAFHKFSNSNRHKISHTEKKLFKCKECGKSFCMLPHLAQHKIIHTRVNFCKCEKCGKAFNCPSIITKHKRINTGEKPYTCEECGKVFNWSSRLTTHKKNYTRYKLYKCEECGKAFNKSSILTTHKIIRTGEKFYKCKECAKAFNQSSNLTEHKKIHPGEKPYKCEECGKAFNWPSTLTKHKRIHTGEKPYTCEECGKAFNQFSNLTTHKRIHTAEKFYKCTECGEAFSRSSNLTKHKKIHTEKKPYKCEECGKAFKWSSKLTEHKLTHTGEKPYKCEECGKAFNWPSTLTKHNRIHTGEKPYKCEVCGKAFNQFSNLTTHKRIHTAEKPYKCEECGKAFSRSSNLTKHKKIHIEKKPYKCEECGKAFKWSSKLTEHKITHTGEKPYKCEECGKAFNHFSILTKHKRIHTGEKPYKCEECGKAFTQSSNLTTHKKIHTGEKFYKCEECGKAFTQSSNLTTHKKIHTGGKPYKCEECGKAFNQFSTLTKHKIIHTEEKPYKCEECGKAFKWSSTLTKHKIIHTGEKPYKCEECGKAFKLSSTLSTHKIIHTGEKPYKCEKCGKAFNRSSNLIEHKKIHTGEQPYKCEECGKAFNYSSHLNTHKRIHTKEQPYKCKECGKAFNQYSNLTTHNKIHTGEKLYKPEDVTVILTTPQTFSNIK

SEQ ID NO: 7019 - protein, 875 aa, Homo sapiens
MERAGPSFGQQRQQQQPQQQKQQQRDQDSVEAWLDDHWDFTFSYFVRKATREMVNAWFAERVHTIPVCKEGIRGHTESCSCPLQQSPRADNSAPGTPTRKISASEFDRPLRPIVVKDSEGTVSFLSDSEKKEQMPLTPPRFDHDEGDQCSRLLELVKDISSHLDVTALCHKIFLHIHGLISADRYSLFLVCEDSSNDKFLISRLFDVAEGSTLEEVSNNCIRLEWNKGIVGHVAALGEPLNIKDAYEDPRFNAEVDQITGYKTQSILCMPIKNHREEVVGVAQAINKKSGNGGTFTEKDEKDFAAYLAFCGIVLHNAQLYETSLLENKRNQVLLDLASLIFEEQQSLEVILKKIAATIISFMQVQKCTIFIVDEDCSDSFSSVFHMECEELEKSSDTLTREHDANKINYMYAQYVKNTMEPLNIPDVSKDKRFPWTTENTGNVNQQCIRSLLCTPIKNGKKNKVIGVCQLVNKMEENTGKVKPFNRNDEQFLEAFVIFCGLGIQNTQMYEAVERAMAKQMVTLEVLSYHASAAEEETRELQSLAAAVVPSAQTLKITDFSFSDFELSDLETALCTIRMFTDLNLVQNFQMKHEVLCRWILSVKKNYRKNVAYHNWRHAFNTAQCMFAALKAGKIQNKLTDLEILALLIAALSHDLDHRGVNNSYIQRSEHPLAQLYCHSIMEHHHFDQCLMILNSPGNQILSGLSIEEYKTTLKIIKQAILATDLALYIKRRGEFFELIRKNQFNLEDPHQKELFLAMLMTACDLSAITKPWPIQQRIAELVATEFFDQGDRERKELNIEPTDLMNREKKNKIPSMQVGFIDAICLQLYEALTHVSEDCFPLLDGCRKNRQKWQALAEQQEKMLINGESGQAKRN

SEQ ID NO: 7020 - protein, 662 aa, Homo sapiens
MKLSPQPSCVNLGMMWTWALWMLPSLCKFSLAALPAKPENISCVYYYRKNLTCTWSPGKETSYTQYTVKRTYAFGEKHDNCTTNSSTSENRASCSFFLPRITIPDNYTIEVEAENGDGVIKSHMTYWRLENIAKTEPPKIFRVKPVLGIKRMIQIEWIKPELAPVSSDLKYTLRFRTVNSTSWMEVNFAKNRKDKNQTYNLTGLQPFTEYVIALRCAVKESKFWSDWSQEKMGMTEEEAPCGLELWRVLKPAEADGRRPVRLLWKKARGAPVLEKTLGYNIWYYPESNTNLTETMNTTNQQLELHLGGESFWVSMISYNSLGKSPVATLRIPAIQEKSFQCIEVMQACVAEDQLVVKWQSSALDVNTWMIEWFPDVDSEPTTLSWESVSQATNWTIQQDKLKPFWCYNISVYPMLHDKVGEPYSIQAYAKEGVPSEGPETKVENIGVKTVTITWKEIPKSERKGIICNYTIFYQAEGGKGFSKTVNSSILQYGLESLKRKTSYIVQVMASTSAGGTNGTSINFKTLSFSVFEIILITSLIGGGLLILIILTVAYGLKKPNKLTHLCWPTVPNPAESSIATWHGDDFKDKLNLKESDDSVNTEDRILKPCSTPSDKLVIDKLVVNFGNVLQEIFTDEARTGQENNLGGEKNGTRILSSCPTSI

SEQ ID NO: 7021 - protein, 1317 aa, Homo sapiens
MASVKVAVRVRPMNRREKDLEAKFIIQMEKSKTTITNLKIPEGGTGDSGRERTKTFTYDFSFYSADTKSPDYVSQEMVFKTLGTDVVKSAFEGYNACVFAYGQTGSGKSYTMMGNSGDSGLIPRICEGLFSRINETTRWDEASFRTEVSYLEIYNERVRDLLRRKSSKTFNLRVREHPKEGPYVEDLSKHLVQNYGDVEELMDAGNINRTTAATGMNDVSSRSHAIFTIKFTQAKFDSEMPCETVSKIHLVDLAGSERADATGATGVRLKEGGNINKSLVTLGNVISALADLSQDAANTLAKKKQVFVPYRDSVLTWLLKDSLGGNSKTIMIATISPADVNYGETLSTLRYANRAKNIINKPTINEDANVKLIRELRAEIARLKTLLAQGNQIALLDSPTALSMEEKLQQNEARVQELTKEWTNKWNETQNILKEQTLALRKEGIGVVLDSELPHLIGIDDDLLSTGIILYHLKEGQTYVGRDDASTEQDIVLHGLDLESEHCIFENIGGTVTLIPLSGSQCSVNGVQIVEATHLNQGAVILLGRTNMFRFNHPKEAAKLREKRKSGLLSSFSLSMTDLSKSRENLSAVMLYNPGLEFERQQREELEKLESKRKLIEEMEEKQKSDKAELERMQQEVETQRKETEIVQLQIRKQEESLKRRSFHIENKLKDLLAEKEKFEEERLREQQEIELQKKRQEEETFLRVQEELQRLKELNNNEKAEKFQIFQELDQLQKEKDEQYAKLELEKKRLEEQEKEQVMLVAHLEEQLREKQEMIQLLRRGEVQWVEEEKRDLEGIRESLLRVKEARAGGDEDGEELEKAQLRFFEFKRRQLVKLVNLEKDLVQQKDILKKEVQEEQEILECLKCEHDKESRLLEKHDESVTDVTEVPQDFEKIKPVEYRLQYKERQLQYLLQNHLPTLLEEKQRAFEILDRGPLSLDNTLYQVEKEMEEKEEQLAQYQANANQLQKLQATFEFTANIARQEEKVRKKEKEILESREKQQREALERALARLERRHSALQRHSTLGMEIEEQRQKLASLNSGSREQSGLQASLEAEQEALEKDQERLEYEIQQLKQKIYEVDGVQKDHHGTLEGKVASSSLPVSAEKSHLVPLMDARINAYIEEEVQRRLQDLHRVISEGCSTSADTMKDNEKLHNGTIQRKLKYERMVSRSLGANPDDLKDPIKISIPRYVLCGQGKDAHFEFEVKITVLDETWTVFRRYSRFREMHKTLKLKYAELAALEFPPKKLFGNKDERVIAERRSHLEKYLRDFFSVMLQSATSPLHINKVGLTLSKHTICEFSPFFKKGVFDYSSHGTG

SEQ ID NO: 7022 - protein, 2343 aa, Homo sapiens
MDEEEDGAGAEESGQPRSFMRLNDLSGAGGRPGPGSAEKDPGSADSEAEGLPYPALAPVVFFYLSQDSRPRSWCLRTVCNPWFERISMLVILLNCVTLGMFRPCEDIACDSQRCRILQAFDDFIFAFFAVEMVVKMVALGIFGKKCYLGDTWNRLDFFIVIAGMLEYSLDLQNVSFSAVRTVRVLRPLRAINRVPSMRILVTLLLDTLPMLGNVLLLCFFVFFIFGIVGVQLWAGLLRNRCFLPENFSLPLSVDLERYYQTENEDESPFICSQPRENGMRSCRSVPTLRGDGGGGPPCGLDYEAYNSSSNTTCVNWNQYYTNCSAGEHNPFKGAINFDNIGYAWIAIFQVITLEGWVDIMYFVMDAHSFYNFIYFILLIIVGSFFMINLCLVVIATQFSETKQRESQLMREQRVRFLSNASTLASFSEPGSCYEELLKYLVYILRKAARRLAQVSRAAGVRVGLLSSPAPLGGQETQPSSSCSRSHRRLSVHHLVHHHHHHHHHYHLGNGTLRAPRASPEIQDRDANGSRRLMLPPPSTPALSGAPPGGAESVHSFYHADCHLEPVRCQAPPPRSPSEASGRTVGSGKVYPTVHTSPPPETLKEKALVEVAASSGPPTLTSLNIPPGPYSSMHKLLETQSTGACQSSCKISSPCLKADSGACGPDSCPYCARAGAGEVELADREMPDSDSEAVYEFTQDAQHSDLRDPHSRRQRSLGPDAEPSSVLAFWRLICDTFRKIVDSKYFGRGIMIAILVNTLSMGIEYHEQPEELTNALEISNIVFTSLFALEMLLKLLVYGPFGYIKNPYNIFDGVIVVISVWEIVGQQGGGLSVLRTFRLMRVLKLVRFLPALQRQLVVLMKTMDNVATFCMLLMLFIFIFSILGMHLFGCKFASERDGDTLPDRKNFDSLLWAIVTVFQILTQEDWNKVLYNGMASTSSWAALYFIALMTFGNYVLFNLLVAILVEGFQAEGDANKSESEPDFFSPSLDGDGDRKKCLALVSLGEHPELRKSLLPPLIIHTAATPMSLPKSTSTGLGEALGPASRRTSSSGSAEPGAAHEMKSPPSARSSPHSPWSAASSWTSRRSSRNSLGRAPSLKRRSPSGERRSLLSGEGQESQDEEESSEEERASPAGSDHRHRGSLEREAKSSFDLPDTLQVPGLHRTASGRGSASEHQDCNGKSASGRLARALRPDDPPLDGDDADDEGNLSKGERVRAWIRARLPACCLERDSWSAYIFPPQSRFRLLCHRIITHKMFDHVVLVIIFLNCITIAMERPKIDPHSAERIFLTLSNYIFTAVFLAEMTVKVVALGWCFGEQAYLRSSWNVLDGLLVLISVIDILVSMVSDSGTKILGMLRVLRLLRTLRPLRVISRAQGLKLVVETLMSSLKPIGNIVVICCAFFIIFGILGVQLFKGKFFVCQGEDTRNITNKSDCAEASYRWVRHKYNFDNLGQALMSLFVLASKDGWVDIMYDGLDAVGVDQQPIMNHNPWMLLYFISFLLIVAFFVLNMFVGVVVENFHKCRQHQEEEEARRREEKRLRRLEKKRRSKEKQMAEAQCKPYYSDYSRFRLLVHHLCTSHYLDLFITGVIGLNVVTMAMEHYQQPQILDEALKICNYIFTVIFVLESVFKLVAFGFRRFFQDRWNQLDLAIVLLSIMGITLEEIEVNASLPINPTIIRIMRVLRIARVLKLLKMAVGMRALLDTVMQALPQVGNLGLLFMLLFFIFAALGVELFGDLECDETHPCEGLGRHATFRNFGMAFLTLFRVSTGDNWNGIMKDTLRDCDQESTCYNTVISPIYFVSFVLTAQFVLVNVVIAVLMKHLEESNKEAKEEAELEAELELEMKTLSPQPHSPLGSPFLWPGVEGPDSPDSPKPGALHPAAHARSASHFSLEHPTDRQLFDTISLLIQGSLEWELKLMDELAGPGGQPSAFPSAPSLGGSDPQIPLAEMEALSLTSEIVSEPSCSLALTDDSLPDDMHTLLLSALESNMQPHPTELPGPDLLTVRKSGVSRTHSLPNDSYMCRHGSTAEGPLGHRGWGLPKAQSGSVLSVHSQPADTSYILQLPKDAPHLLQPHSAPTWGTIPKLPPPGRSPLAQRPLRRQAAIRTDSLDVQGLGSREDLLAEVSGPSPPLARAYSFWGQSSTQAQQHSRSHSKISKHMTPPAPCPGPEPNWGKGPPETRSSLELDTELSWISGDLLPPGGQEEPPSPRDLKKCYSVEAQSCQRRPTSWLDEQRRHSIAVSCLDSGSQPHLGTDPSNLGGQPLGGPGSRPKKKLSPPSITIDPPESQGPRTPPSPGICLRRRAPSSDSKDPLASGPPDSMAASPSPKKDVLSLSGLSSDPADLDP

SEQ ID NO: 7023 - protein, 467 aa, Homo sapiens
MQPQHGPWQTRMRKISNHGSLRVAKVAYPLGLCVGVFIYVAYIKWHRATATQAFFSITRAAPGARWGQQAHSPLGTAADGHEVFYGIMFDAGSTGTRVHVFQFTRPPRETPTLTHETFKALKPGLSAYADDVEKSAQGIRELLDVAKQDIPFDFWKATPLVLKATAGLRLLPGEKAQKLLQKVKKVFKASPFLVGDDCVSIMNGTDEGVSAWITINFLTGSLKTPGGSSVGMLDLGGGSTQIAFLPRVEGTLQASPPGYLTALRMFNRTYKLYSYSYLGLGLMSARLAILGGVEGQPAKDGKELVSPCLSPSFKGEWEHAEVTYRVSGQKAAASLHELCAARVSEVLQNRVHRTEEVKHVDFYAFSYYYDLAAGVGLIDAEKGGSLVVGDFEIAAKYVCRTLETQPQSSPFSCMDLTYVSLLLQEFGFPRSKVLKLTRKIDNVETSWALGAIFHYIDSLNRQKSPAS

SEQ ID NO: 7024 - protein, 761 aa, Homo sapiens
MALPALGLDPWSLLGLFLFQLLQLLLPTTTAGGGGQGPMPRVRYYAGDERRALSFFHQKGLQDFDTLLLSGDGNTLYVGAREAILALDIQDPGVPRLKNMIPWPASDRKKSECAFKKKSNETQCFNFIRVLVSYNVTHLYTCGTFAFSPACTFIELQDSYLLPISEDKVMEGKGQSPFDPAHKHTAVLVDGMLYSGTMNNFLGSEPILMRTLGSQPVLKTDNFLRWLHHDASFVAAIPSTQVVYFFFEETASEFDFFERLHTSRVARVCKNDVGGEKLLQKKWTTFLKAQLLCTQPGQLPFNVIRHAVLLPADSPTAPHIYAVFTSQWQVGGTRSSAVCAFSLLDIERVFKGKYKELNKETSRWTTYRGPETNPRPGSCSVGPSSDKALTFMKDHFLMDEQVVGTPLLVKSGVEYTRLAVETAQGLDGHSHLVMYLGTTTGSLHKAVVSGDSSAHLVEEIQLFPDPEPVRNLQLAPTQGAVFVGFSGGVWRVPRANCSVYESCVDCVLARDPHCAWDPESRTCCLLSAPNLNSWKQDMERGNPEWACASGPMSRSLRPQSRPQIIKEVLAVPNSILELPCPHLSALASYYWSHGPAAVPEASSTVYNGSLLLIVQDGVGGLYQCWATENGFSYPVISYWVDSQDQTLALDPELAGIPREHVKVPLTRVSGGAALAAQQSYWPHFVTVTVLFALVLSGALIILVASPLRALRARGKVQGCETLRPGEKAPLSREQHLQSPKECRTSASDVDADNNCLGTEVA

SEQ ID NO: 7025 - protein, 469 aa, Homo sapiens
MMSEHDLADVVQIAVEDLSPDHPVVLENHVVTDEDEPALKRQRLEINCQDPSIKSFLYSINQTICLRLDSIEAKLQALEATCKSLEEKLDLVTNKQHSPIQVPMVAGSPLGATQTCNKVRCAVPGRRQNTIVVKVPGQEDSHHEDGESGSEASDSVSSCGQAGSQSIGSNVTLITLNSEEDYPNGTWLGDENNPEMRVRCAIIPSDMLHISTNCRTAEKMALTLLDYLFHREVQAVSNLSGQGKHGKKQLDPLTIYGIRCHLFYKFGITESDWYRIKQSIDSKCRTAWRRKQRGQSLAVKSFSRRTPNSSSYCPSEPMMSTPPPASELPQPQPQPQALHYALANAQQVQIHQIGEDGQVQVIPQGHLHIAQVPQGEQVQITQDSEGNLQIHHVGQDGQVLQGAQLIAVASSDPAAAGVDGSPLQGSDIQVQYVQLAPVSDHTAGAQTAEALQPTLQPEMQLEHGAIQIQ

SEQ ID NO: 7026 - protein, 171 aa, Homo sapiens
MASSSTVPLGFHYETKYVVLSYLGLLSQEKLQEQHLSSPQGVQLDIASQSLDQEILLKVKTEIEEELKSLDKEISEAFTSTGFDRHTSPVFSPANPESSMEDCLAHLGEKVSQELKEPLHKALQMLLSQALCLVLSQRRRNTLESLQKIAMTFTSCPATTLDKSVPQSLQL

SEQ ID NO: 7027 - protein, 1379 aa, Homo sapiens
METGGRARTGTPQPAAPGVWRARPAGGGGGGASSWLLDGNSWLLCYGFLYLALYAQVSQSKPCERTGSCFSGRCVNSTCLCDPGWVGDQCQHCQGRFKLTEPSGYLTDGPINYKYKTKCTWLIEGYPNAVLRLRFNHFATECSWDHMYVYDGDSIYAPLIAVLSGLIVPEIRGNETVPEVVTTSGYALLHFFSDAAYNLTGFNIFYSINSCPNNCSGHGKCTTSVSVPSQVYCECDKYWKGEACDIPYCKANCGSPDHGYCDLTGEKLCVCNDSWQGPDCSLNVPSTESYWILPNVKPFSPSVGRASHKAVLHGKFMWVIGGYTFNYSSFQMVLNYNLESSIWNVGTPSRGPLQRYGHSLALYQENIFMYGGRIETNDGNVTDELWVFNIHSQSWSTKTPTVLGHGQQYAVEGHSAHIMELDSRDVVMIIIFGYSAIYGYTSSIQEYHISSNTWLVPETKGAIVQGGYGHTSVYDEITKSIYVHGGYKALPGNKYGLVDDLYKYEVNTKTWTILKESGFARYLHSAVLINGAMLIFGGNTHNDTSLSNGAKCFSADFLAYDIACDEWKILPKPNLHRDVNRFGHSAVVINGSMYIFGGFSSVLLNDILVYKPPNCKAFRDEELCKNAGPGIKCVWNKNHCESWESGNTNNILRAKCPPKTAASDDRCYRYADCASCTANTNGCQWCDDKKCISANSNCSMSVKNYTKCHVRNEQICNKLTSCKSCSLNLNCQWDQRQQECQALPAHLCGEGWSHIGDACLRVNSSRENYDNAKLYCYNLSGNLASLTTSKEVEFVLDEIQKYTQQKVSPWVGLRKINISYWGWEDMSPFTNTTLQWLPGEPNDSGFCAYLERAAVAGLKANPCTSMANGLVCEKPVVSPNQNARPCKKPCSLRTSCSNCTSNGMECMWCSSTKRCVDSNAYIISFPYGQCLEWQTATCSPQNCSGLRTCGQCLEQPGCGWCNDPSNTGRGHCIEGSSRGPMKLIGMHHSEMVLDTNLCPKEKNYEWSFIQCPACQCNGHSTCINNNVCEQCKNLTTGKQCQDCMPGYYGDPTNGGQCTACTCSGHANICHLHTGKCFCTTKGIKGDQCQLCDSENRYVGNPLRGTCYYSLLIDYQFTFSLLQEDDRHHTAINFIANPEQSNKNLDISINASNNFNLNITWSVGSTAGTISGEETSIVSKNNIKEYRDSFSYEKFNFRSNPNITFYVYVSNFSWPIKIQIAFSQHNTIMDLVQFFVTFFSCFLSLLLVAAVVWKIKQTCWASRRREQLLRERQQMASRPFASVDVALEVGAEQTEFLRGPLEGAPKPIAIEPCAGNRAAVLTVFLCLPRGSSGAPPPGQSGLAIASALIDISQQKASDSKDKTSGVRNRKHLSTRQGTCV

SEQ ID NO: 7028 - protein, 698 aa, Homo sapiens
MMRSRSKSPRRPSPTARGANCDVELLKTTTRDREELKCMLEKYERHLAEIQGNVKVLKSERDKIFLLYEQAQEEITRLRREMMKSCKSPKSTTAHAILRRVETERDVAFTDLRRMTTERDSLRERLKIAQETAFNEKAHLEQRIEELECTVHNLDDERMEQMSNMTLMKETISTVEKEMKSLARKAMDTESELGRQKAENNSLRLLYENTEKDLSDTQRHLAKKKYELQLTQEKIMCLDEKIDNFTRQNIAQREEISILGGTLNDLAKEKECLQACLDKKSENIASLGESLAMKEKTISGMKNIIAEMEQASRQCTEALIVCEQDVSRMRRQLDETNDELAQIARERDILAHDNDNLQEQFAKAKQENQALSKKLNDTHNELNDIKQKVQDTNLEVNKLKNILKSEESENRQMMEQLRKANEDAENWENKARQSEADNNTLKLELITAEAEGNRLKEKVDSLNREVEQHLNAERSYKSQISTLHKSVVKMEEELQKVQFEKVSALADLSSTRELCIKLDSSKELLNRQLVAKDQEIEMRENELDSAHSEIELLRSQMANERISMQNLEALLVANRDKEYQSQIALQEKESEIQLLKEHLCLAENKMAIQSRDVAQFRNVVTQLEADLDITKRQLGTERFERERAVQELRRQNYSSNAYHMSSTMKPNTKCHSPERAHHRSPDRGLDRSLEENLCYRDF

SEQ ID NO: 7029 - protein, 651 aa, Homo sapiens
MNKLRQSFRRKKDVYVPEASRPHQWQTDEEGVRTGKCSFPVKYLGHVEVDESRGMHICEDAVKRLKAERKFFKGFFGKTGKKAVKAVLWVSADGLRVVDEKTKDLIVDQTIEKVSFCAPDRNFDRAFSYICRDGTTRRWICHCFMAVKDTGERLSHAVGCAFAACLERKQKREKECGVTATFDASRTTFTREGSFRVTTATEQAEREEIMKQMQDAKKAETDKIVVGSSVAPGNTAPSPSSPTSPTSDATTSLEMNNPHAIPRRHAPIEQLARQGSFRGFPALSQKMSPFKRQLSLRINELPSTMQRKTDFPIKNAVPEVEGEAESISSLCSQITNAFSTPEDPFSSAPMTKPVTVVAPQSPTFQANGTDSAFHVLAKPAHTALAPVAMPVRETNPWAHAPDAANKEIAATCSGTEWGQSSGAASPGLFQAGHRRTPSEADRWLEEVSKSVRAQQPQASAAPLQPVLQPPPPTAISQPASPFQGNAFLTSQPVPVGVVPALQPAFVPAQSYPVANGMPYPAPNVPVVGITPSQMVANVFGTAGHPQAAHPHQSPSLVRQQTFPHYEASSATTSPFFKPPAQHLNGSAAFNGVDDGRLASADRHTEVPTGTCPVDPFEAQWAALENKSKQRTNPSPTNPFSSDLQKTFEIEL

SEQ ID NO: 7030 - protein, 882 aa, Homo sapiens
MSLFKARDWWSTILGDKEEFDQGCLCLANVDNSGNGQDKIIVGSFMGYLRIFSPHPAKTGDGAQAEDLLLEVDLRDPVLQVEVGKFVSGTEMLHLAVLHSRKLCVYSVSGTLGNVEHGNQCQMKLMYEHNLQRTACNMTYGSFGGVKGRDLICIQSMDGMLMVFEQESYAFGRFLPGFLLPGPLAYSSRTDSFLTVSSCQQVESYKYQVLAFATDADKRQETEQQKLGSGKRLVVDWTLNIGEQALDICIVSFNQSASSVFVLGERNFFCLKDNGQIRFMKKLDWSPSCFLPYCSVSEGTINTLIGNHNNMLHIYQDVTLKWATQLPHIPVAVRVGCLHDLKGVIVTLSDDGHLQCSYLGTDPSLFQAPNVQSRELNYDELDVEMKELQKIIKDVNKSQGVWPMTEREDDLNVSVVVSPNFDSVSQATDVEVGTDLVPSVTVKVTLQNRVILQKAKLSVYVQPPLELTCDQFTFEFMTPDLTRTVSFSVYLKRSYTPSELEGNAVVSYSRPTGIPRVIQCKFRLPLKLICLPGQPSKTASHKITIDTNKSPVSLLSLFPGFASQSDDDQVNVMGFHFLGGARITVLASKTSQRYRIQSEQFEDLWLITNELILRLQEYFEKQGVKDFACSFSGSIPLQEYFELIDHHFELRINGEKLEELLSERAVQFRAIQRRLLARFKDKTPAPLQHLDTLLDGTYKQVIALADAVEENQGNLFQSFTRLKSATHLVILLIALWQKLSADQVAILEAAFLPLQEDTQELGWEETVDAAISHLLKTCLSKSSKEQALNLNSQLNIPKDTSQLKKHITLLCDRLSKGGRLCLSTDAAAPQTMVMPGGCTTIPESDLEERSVEQDSTELFTNHRHLTAETPRPEVSPLQGVSE

SEQ ID NO: 7031 - protein, 3142 aa, Homo sapiens
MATLEKLMKAFESLKSFQQQQQQQQQQQQQQQQQQQQQPPPPPPPPPPPQLPQPPPQAQPLLPQPQPPPPPPPPPPGPAVAEEPLHRPKKELSATKKDRVNHCLTICENIVAQSVRNSPEFQKLLGIAMELFLLCSDDAESDVRMVADECLNKVIKALMDSNLPRLQLELYKEIKKNGAPRSLRAALWRFAELAHLVRPQKCRPYLVNLLPCLTRTSKRPEESVQETLAAAVPKIMASFGNFANDNEIKVLLKAFIANLKSSSPTIRRTAAGSAVSICQHSRRTQYFYSWLLNVLLGLLVPVEDEHSTLLILGVLLTLRYLVPLLQQQVKDTSLKGSFGVTRKEMEVSPSAEQLVQVYELTLHHTQHQDHNVVTGALELLQQLFRTPPPELLQTLTAVGGIGQLTAAKEESGGRSRSGSIVELIAGGGSSCSPVLSRKQKGKVLLGEEEALEDDSESRSDVSSSALTASVKDEISGELAASSGVSTPGSAGHDIITEQPRSQHTLQADSVDLASCDLTSSATDGDEEDILSHSSSQVSAVPSDPAMDLNDGTQASSPISDSSQTTTEGPDSAVTPSDSSEIVLDGTDNQYLGLQIGQPQDEDEEATGILPDEASEAFRNSSMALQQAHLLKNMSHCRQPSDSSVDKFVLRDEATEPGDQENKPCRIKGDIGQSTDDDSAPLVHCVRLLSASFLLTGGKNVLVPDRDVRVSVKALALSCVGAAVALHPESFFSKLYKVPLDTTEYPEEQYVSDILNYIDHGDPQVRGATAILCGTLICSILSRSRFHVGDWMGTIRTLTGNTFSLADCIPLLRKTLKDESSVTCKLACTAVRNCVMSLCSSSYSELGLQLIIDVLTLRNSSYWLVRTELLETLAEIDFRLVSFLEAKAENLHRGAHHYTGLLKLQERVLNNVVIHLLGDEDPRVRHVAAASLIRLVPKLFYKCDQGQADPVVAVARDQSSVYLKLLMHETQPPSHFSVSTITRIYRGYNLLPSITDVTMENNLSRVIAAVSHELITSTTRALTFGCCEALCLLSTAFPVCIWSLGWHCGVPPLSASDESRKSCTVGMATMILTLLSSAWFPLDLSAHQDALILAGNLLAASAPKSLRSSWASEEEANPAATKQEEVWPALGDRALVPMVEQLFSHLLKVINICAHVLDDVAPGPAIKAALPSLTNPPSLSPIRRKGKEKEPGEQASVPLSPKKGSEASAASRQSDTSGPVTTSKSSSLGSFYHLPSYLKLHDVLKATHANYKVTLDLQNSTEKFGGFLRSALDVLSQILELATLQDIGKCVEEILGYLKSCFSREPMMATVCVQQLLKTLFGTNLASQFDGLSSNPSKSQGRAQRLGSSSVRPGLYHYCFMAPYTHFTQALADASLRNMVQAEQENDTSGWFDVLQKVSTQLKTNLTSVTKNRADKNAIHNHIRLFEPLVIKALKQYTTTTCVQLQKQVLDLLAQLVQLRVNYCLLDSDQVFIGFVLKQFEYIEVGQFRESEAIIPNIFFFLVLLSYERYHSKQIIGIPKIIQLCDGIMASGRKAVTHAIPALQPIVHDLFVLRGTNKADAGKELETQKEVVVSMLLRLIQYHQVLEMFILVLQQCHKENEDKWKRLSRQIADIILPMLAKQQMHIDSHEALGVLNTLFEILAPSSLRPVDMLLRSMFVTPNTMASVSTVQLWISGILAILRVLISQSTEDIVLSRIQELSFSPYLISCTVINRLRDGDSTSTLEEHSEGKQIKNLPEETFSRFLLQLVGILLEDIVTKQLKVEMSEQQHTFYCQELGTLLMCLIHIFKSGMFRRITAAATRLFRSDGCGGSFYTLDSLNLRARSMITTHPALVLLWCQILLLVNHTDYRWWAEVQQTPKRHSLSSTKLLSPQMSGEEEDSDLAAKLGMCNREIVRRGALILFCDYVCQNLHDSEHLTWLIVNHIQDLISLSHEPPVQDFISAVHRNSAASGLFIQAIQSRCENLSTPTMLKKTLQCLEGIHLSQSGAVLTLYVDRLLCTPFRVLARMVDILACRRVEMLLAANLQSSMAQLPMEELNRIQEYLQSSGLAQRHQRLYSLLDRFRLSTMQDSLSPSPPVSSHPLDGDGHVSLETVSPDKDWYVHLVKSQCWTRSDSALLEGAELVNRIPAEDMNAFMMNSEFNLSLLAPCLSLGMSEISGGQKSALFEAAREVTLARVSGTVQQLPAVHHVFQPELPAEPAAYWSKLNDLFGDAALYQSLPTLARALAQYLVVVSKLPSHLHLPPEKEKDIVKFVVATLEALSWHLIHEQIPLSLDLQAGLDCCCLALQLPGLWSVVSSTEFVTHACSLIYCVHFILEAVAVQPGEQLLSPERRTNTPKAISEEEEEVDPNTQNPKYITAACEMVAEMVESLQSVLALGHKRNSGVPAFLTPLLRNIIISLARLPLVNSYTRVPPLVWKLGWSPKPGGDFGTAFPEIPVEFLQEKEVFKEFIYRINTLGWTSRTQFEETWATLLGVLVTQPLVMEQEESPPEEDTERTQINVLAVQAITSLVLSAMTVPVAGNPAVSCLEQQPRNKPLKALDTRFGRKLSIIRGIVEQEIQAMVSKRENIATHHLYQAWDPVPSLSPATTGALISHEKLLLQINPERELGSMSYKLGQVSIHSVWLGNSITPLREEEWDEEEEEEADAPAPSSPPTSPVNSRKHRAGVDIHSCSQFLLELYSRWILPSSSARRTPAILISEVVRSLLVVSDLFTERNQFELMYVTLTELRRVHPSEDEILAQYLVPATCKAAAVLGMDKAVAEPVSRLLESTLRSSHLPSRVGALHGVLYVLECDLLDDTAKQLIPVISDYLLSNLKGIAHCVNIHSQQHVLVMCATAFYLIENYPLDVGPEFSASIIQMCGVMLSGSEESTPSIIYHCALRGLERLLLSEQLSRLDAESLVKLSVDRVNVHSPHRAMAALGLMLTCMYTGKEKVSPGRTSDPNPAAPDSESVIVAMERVSVLFDRIRKGFPCEARVVARILPQFLDDFFPPQDIMNKVIGEFLSNQQPYPQFMATVVYKVFQTLHSTGQSSMVRDWVMLSLSNFTQRAPVAMATWSLSCFFVSASTSPWVAAILPHVISRMGKLEQVDVNLFCLVATDFYRHQIEEELDRRAFQSVLEVVAAPGSPYHRLLTCLRNVHKVTTC

SEQ ID NO: 7032 - protein, 271 aa, Homo sapiens
METNCRKLVSACVQLEKDKSQQGKNEDVGAEDPSKKKRQRRQRTHFTSQQLQELEATFQRNRYPDMSTREEIAVWTNLTEARVRVWFKNRRAKWRKRERNQQAELCKNGFGPQFNGLMQPYDDMYPGYSYNNWAAKGLTSASLSTKSFPFFNSMNVNPLSSQSMFSPPNSISSMSMSSSMVPSAVTGVPGSSLNSLNNLNNLSSPSLNSAVPTPACPYAPPTPPYVYRDTCNSSLASLRLKAKQHSSFGYASVQNPASNLSACQYAVDRPV

SEQ ID NO: 7033 - protein, 585 aa, Homo sapiens
MHFKCKYSYPALYQMDHTSPTYMLANLTHLHSEQLLQGLNLLRQHHELCDIILRVGDVKIHAHKVVLASVSPYFKAMFTGNLSEKENSEVEFQCIDETALQAIVEYAYTGTVFISQDTVESLLPAANLLQIKLVLKECCAFLESQLDPGNCIGISRFAETYGCRDLYLAATKYICQNFEAVCQTEEFFELTHADLDEIVSNDCLNVATEETVFYALESWIKYDVQERQKYLAQLLNSVRLPLLSVKFLTRLYEANHLIRDDRTCKHLLNEALKYHFMPEHRLSHQTVLMTRPRCAPKVLCAVGGKSGLFACLDSVEMYFPQNDSWIGLAPLNIPRYEFGICVLDQKVYVIGGIATNVRPGVTIRKHENSVECWNPDTNTWTSLERMNESRSTLGVVVLAGELYALGGYDGQSYLQSVEKYIPKIRKWQPVAPMTTTRSCFAAAVLDGMIYAIGGYGPAHMNSVERYDPSKDSWEMVASMADKRIHFGVGVMLGFIFVVGGHNGVSHLSSIERYDPHQNQWTVCRPMKEPRTGVGAAVIDNYLYVVGGHSGSSYLNTVQKYDPISDTWLDSAGMIYCRCNFGLTAL

SEQ ID NO: 7034 - protein, 294 aa, Homo sapiens
MQGPAGNASRGLPGGPPSTVASGAGRCESGALMHSFGIFLQGLLGVVAFSTLMLKRFREPKHERRPWRIWFLDTSKQAIGMLFIHFANVYLADLTEEDPCSLYLINFLLDATVGMLLIYVGVRAVSVLVEWQQWESLRFGEYGDPLQCGAWVGQCALYIVIMIFEKSVVFIVLLILQWKKVALLNPIENPDLKLAIVMLIVPFFVNALMFWVVDNFLMRKGKTKAKLEERGANQDSRNGSKVRYRRAASHEESESEILISADDEMEESDVEEDLRRLTPLKPVKKKKHRFGLPV

SEQ ID NO: 7035 - protein, 1085 aa, Homo sapiens
MSTPSRFKKDKEIIAEYESQVKEIRAQLVEQQKCLEQQTEMRVQLLQDLQDFFRKKAEIETEYSRNLEKLAERFMAKTRSTKDHQQYKKDQNLLSPVNCWYLLLNQVRRESKDHATLSDIYLNNVIMRFMQISEDSTRMFKKSKEIAFQLHEDLMKVLNELYTVMKTYHMYHAESISAESKLKEAEKQEEKQIGRSGDPVFHIRLEERHQRRSSVKKIEKMKEKRQAKYSENKLKSIKARNEYLLTLEATNASVFKYYIHDLSDLIDCCDLGYHASLNRALRTYLSAEYNLETSRHEGLDIIENAVDNLEPRSDKQRFMEMYPAAFCPPMKFEFQSHMGDEVCQVSAQQPVQAELMLRYQQLQSRLATLKIENEEVKKTTEATLQTIQDMVTIEDYDVSECFQHSRSTESVKSTVSETYLSKPSIAKRRANQQETEQFYFMKLREYLEGSNLITKLQAKHDLLQRTLGEGHRAEYMTTRPPNVPPKPQKHRKSRPRSQYNTKLFNGDLETFVKDSGQVIPLIVESCIRFINLYGLQHQGIFRVSGSQVEVNDIKNSFERGENPLADDQSNHDINSVAGVLKLYFRGLENPLFPKERFNDLISCIRIDNLYERALHIRKLLLTLPRSVLIVMRYLFAFLNHLSQYSDENMMDPYNLAICFGPTLMPVPEIQDQVSCQAHVNEIIKTIIIHHETIFPDAKELDGPVYEKCMAGDDYCDSPYSEHGTLEEVDQDAGTEPHTSEDECEPIEAIAKFDYVGRSARELSFKKGASLLLYHRASEDWWEGRHNGIDGLVPHQYIVVQDMDDTFSDTLSQKADSEASSGPVTEDKSSSKDMNSPTDRHPDGYLARQRKRGEPPPPVRRPGRTSDGHCPLHPPHALSNSSVDLGSPSLASHPRGLLQNRGLNNDSPERRRRPGHGSLTNISRHDSLKKIDSPPIRRSTSSGQYTGFNDHKPLDPETIAQDIEETMNTALNELRELERQSTAKHAPDVVLDTLEQVKNSPTPATSTESLSPLHNVALRSSEPQIRRSTSSSSDTMSTFKPMVAPRMGVQLKPPALRPKPAVLPKTNPTIGPAPPPQGPTDKSCTM

SEQ ID NO: 7036 - protein, 427 aa, Homo sapiens
MGVLTFRDVAVEFSPEEWECLDSAQQRLYRDVMLENYGNLVSLGLAIFKPDLMTCLEQRKEPWKVKRQEAVAKHPAGSFHFTAEILPDHDIKDSFQKVILRKYGSCDLNNLHLKKDYQSVGNCKGQKSSYNGLHQCLSATHSKTCQCNKCGRGFQLCSIFTEHKDIFSREKCHKCEECGKDCRLFSDFTRHKKIHTVERCYKCEECGKAFKKFSNLTEHKRVHTGEKPYKCEGCGKTFTCSSTLVKHKRNHTGDRPYKCEECGKAFKCFSDLTNHKRIHTGEKPYKCEECNKAYRWFSDLAKHKIIHTGDKPYTCNECGKAFKWFSALSKHKRIHTGEKPYICEECGKAFTRSSTLFNHKRIHMEERPYKCEECSKTFKCFSDLTNHKRIHTGEKPYKCEECGKASSWFSHLIRHKRIHTREKLHKC

SEQ ID NO: 7037 - protein, 1417 aa, Homo sapiens
MAAVPQNNLQEQLERHSARTLNNKLSLSKPKFSGFTFKKKTSSDNNVSVTNVSVAKTPVLRNKDVNVTEDFSFSEPLPNTTNQQRVKDFFKNAPAGQETQRGGSKSLLPDFLQTPKEVVCTTQNTPTVKKSRDTALKKLEFSSSPDSLSTINDWDDMDDFDTSETSKSFVTPPQSHFVRVSTAQKSKKGKRNFFKAQLYTTNTVKTDLPPPSSESEQIDLTEEQKDDSEWLSSDVICIDDGPIAEVHINEDAQESDSLKTHLEDERDNSEKKKNLEEAELHSTEKVPCIEFDDDDYDTDFVPPSPEEIISASSSSSKCLSTLKDLDTSDRKEDVLSTSKDLLSKPEKMSMQELNPETSTDCDARQISLQQQLIHVMEHICKLIDTIPDDKLKLLDCGNELLQQRNIRRKLLTEVDFNKSDASLLGSLWRYRPDSLDGPMEGDSCPTGNSMKELNFSHLPSNSVSPGDCLLTTTLGKTGFSATRKNLFERPLFNTHLQKSFVSSNWAETPRLGKKNESSYFPGNVLTSTAVKDQNKHTASINDLERETQPSYDIDNFDIDDFDDDDDWEDIMHNLAASKSSTAAYQPIKEGRPIKSVSERLSSAKTDCLPVSSTAQNINFSESIQNYTDKSAQNLASRNLKHERFQSLSFPHTKEMMKIFHKKFGLHNFRTNQLEAINAALLGEDCFILMPTGGGKSLCYQLPACVSPGVTVVISPLRSLIVDQVQKLTSLDIPATYLTGDKTDSEATNIYLQLSKKDPIIKLLYVTPEKICASNRLISTLENLYERKLLARFVIDEAHCVSQWGHDFRQDYKRMNMLRQKFPSVPVMALTATANPRVQKDILTQLKILRPQVFSMSFNRHNLKYYVLPKKPKKVAFDCLEWIRKHHPYDSGIIYCLSRRECDTMADTLQRDGLAALAYHAGLSDSARDEVQQKWINQDGCQVICATIAFGMGIDKPDVRFVIHASLPKSVEGYYQESGRAGRDGEISHCLLFYTYHDVTRLKRLIMMEKDGNHHTRETHFNNLYSMVHYCENITECRRIQLLAYFGENGFNPDFCKKHPDVSCDNCCKTKDYKTRDVTDDVKSIVRFVQEHSSSQGMRNIKHVGPSGRFTMNMLVDIFLGSKSAKIQSGIFGKGSAYSRHNAERLFKKLILDKILDEDLYINANDQAIAYVMLGNKAQTVLNGNLKVDFMETENSSSVKKQKALVAKVSQREEMVKKCLGELTEVCKSLGKVFGVHYFNIFNTVTLKKLAESLSSDPEVLLQIDGVTEDKLEKYGAEVISVLQKYSEWTSPAEDSSPGISLSSSRGPGRSAAEELDEEIPVSSHYFASKTRNERKRKKMPASQRSKRRKTASSGSKAKGGSATCRKISSKTKSSSIIGSSSASHTSQATSGANSKLGIMAPPKPINRPFLKPSYAFS

SEQ ID NO: 7038 - protein, 341 aa, Homo sapiens
MTGSNMSDALANAVCQRCQARFSPAERIVNSNGELYHEHCFVCAQCFRPFPEGLFYEFEGRKYCEHDFQMLFAPCCGSCGEFIIGRVIKAMNNNWHPGCFRCELCDVELADLGFVKNAGRHLCRPCHNREKAKGLGKYICQRCHLVIDEQPLMFRSDAYHPDHFNCTHCGKELTAEARELKGELYCLPCHDKMGVPICGACRRPIEGRVVNALGKQWHVEHFVCAKCEKPFLGHRHYEKKGLAYCETHYNQLFGDVCYNCSHVIEGDVVSALNKAWCVSCFSCSTCNSKLTLKNKFVEFDMKPVCKRCYEKFPLELKKRLKKLSELTSRKAQPKATDLNSA

SEQ ID NO: 7039 - protein, 1697 aa, Homo sapiens
MMAQFPTAMNGGPNMWAITSEERTKHDRQFDNLKPSGGYITGDQARNFFLQSGLPAPVLAEIWALSDLNKDGKMDQQEFSIAMKLIKLKLQGQQLPVVLPPIMKQPPMFSPLISARFGMGSMPNLSIPQPLPPAAPITSLSSATSGTNLPPLMMPTPLVPSVSTSSLPNGTASLIQPLPIPYSSSTLPHGSSYSLMMGGFGGASIQKAQSLIDLGSSSSTSSTASLSGNSPKTGTSEWAVPQPTRLKYRQKFNTLDKSMSGYLSGFQARNALLQSNLSQTQLATIWTLADVDGDGQLKAEEFILAMHLTDMAKAGQPLPLTLPPELVPPSFRGGKQIDSINGTLPSYQKMQEEEPQKKLPVTFEDKRKANYERGNMELEKRRQALMEQQQREAERKAQKEKEEWERKQRELQEQEWKKQLELEKRLEKQRELERQREEERRKDIERREAAKQELERQRRLEWERIRRQELLNQKNREQEEIVRLNSKKKNLHLELEALNGKHQQISGRLQDVRLKKQTQKTELEVLDKQCDLEIMEIKQLQQELQEYQNKLIYLVPEKQLLNERIKNMQFSNTPDSGVSLLHKKSLEKEELCQRLKEQLDALEKETASKLSEMDSFNNQLKCGNMDDSVLQCLLSLLSCLNNLFLLLKELRETYNTQQLALEQLYKIKRDKLKEIERKRLELMQKKKLEDEAARKAKQGKENLWKENLRKEEEEKQKRLQEEKTQEKIQEEERKAEEKQRKDKDTLKAEEKKRETASVLVNYRALYPFEARNHDEMSFNSGDIIQVDEKTVGEPGWLYGSFQGNFGWFPCNYVEKMPSSENEKAVSPKKALLPPTVSLSATSTSSEPLSSNQPASVTDYQNVSFSNLTVNTSWQKKSAFTRTVSPGSVSPIHGQGQVVENLKAQALCSWTAKKDNHLNFSKHDIITVLEQQENWWFGEVHGGRGWFPKSYVKIIPGSEVKREEPEALYAAVNKKPTSAAYSVGEEYIALYPYSSVEPGDLTFTEGEEILVTQKDGEWWTGSIGDRSGIFPSNYVKPKDQESFGSASKSGASNKKPEIAQVTSAYVASGSEQLSLAPGQLILILKKNTSGWWQGELQARGKKRQKGWFPASHVKLLGPSSERATPAFHPVCQVIAMYDYAANNEDELSFSKGQLINVMNKDDPDWWQGEINGVTGLFPSNYVKMTTDSDPSQQWCADLQTLDTMQPIERKRQGYIHELIQTEERYMADLQLVVEVFQKRMAESGFLTEGEMALIFVNWKELIMSNTKLLKALRVRKKTGGEKMPVQMIGDILAAELSHMQAYIRFCSCQLNGAALLQQKTDEDTDFKEFLKKLASDPRCKGMPLSSFLLKPMQRITRYPLLIRSILENTPESHADHSSLKLALERAEELCSQVNEGVREKENSDRLEWIQAHVQCEGLAEQLIFNSLTNCLGPRKLLHSGKLYKTKSNKELHGFLFNDFLLLTYMVKQFAVSSGSEKLFSSKSNAQFKMYKTPIFLNEVLVKLPTDPSSDEPVFHISHIDRVYTLRTDNINERTAWVQKIKAASEQYIDTEKKKREKAYQARSQKTSGIGRLMVHVIEATELKACKPNGKSNPYCEISMGSQSYTTRTIQDTLNPKWNFNCQFFIKDLYQDVLCLTLFDRDQFSPDDFLGRTEIPVAKIRTEQESKGPMTRRLLLHEVPTGEVWVRFDLQLFEQKTLL

SEQ ID NO: 7040 - protein, 1939 aa, Homo sapiens
MAARLLAPPGPDSFKPFTPESLANIERRIAESKLKKPPKADGSHREDDEDSKPKPNSDLEAGKSLPFIYGDIPQGLVAVPLEDFDPYYLTQKTFVVLNRGKTLFRFSATPALYILSPFNLIRRIAIKILIHSVFSMIIMCTILTNCVFMTFSNPPDWSKNVEYTFTGIYTFESLVKIIARGFCIDGFTFLRDPWNWLDFSVIMMAYITEFVNLGNVSALRTFRVLRALKTISVIPGLKTIVGALIQSVKKLSDVMILTVFCLSVFALIGLQLFMGNLRNKCVVWPINFNESYLENGTKGFDWEEYINNKTNFYTVPGMLEPLLCGNSSDAGQCPEGYQCMKAGRNPNYGYTSFDTFSWAFLALFRLMTQDYWENLYQLTLRAAGKTYMIFFVLVIFVGSFYLVNLILAVVAMAYEEQNQATLEEAEQKEAEFKAMLEQLKKQQEEAQAAAMATSAGTVSEDAIEEEGEEGGGSPRSSSEISKLSSKSAKERRNRRKKRKQKELSEGEEKGDPEKVFKSESEDGMRRKAFRLPDNRIGRKFSIMNQSLLSIPGSPFLSRHNSKSSIFSFRGPGRFRDPGSENEFADDEHSTVEESEGRRDSLFIPIRARERRSSYSGYSGYSQGSRSSRIFPSLRRSVKRNSTVDCNGVVSLIGGPGSHIGGRLLPEATTEVEIKKKGPGSLLVSMDQLASYGRKDRINSIMSVVTNTLVEELEESQRKCPPCWYKFANTFLIWECHPYWIKLKEIVNLIVMDPFVDLAITICIVLNTLFMAMEHHPMTPQFEHVLAVGNLVFTGIFTAEMFLKLIAMDPYYYFQEGWNIFDGFIVSLSLMELSLADVEGLSVLRSFRLLRVFKLAKSWPTLNMLIKIIGNSVGALGNLTLVLAIIVFIFAVVGMQLFGKSYKECVCKINQDCELPRWHMHDFFHSFLIVFRVLCGEWIETMWDCMEVAGQAMCLIVFMMVMVIGNLVVLNLFLALLLSSFSADNLAATDDDGEMNNLQISVIRIKKGVAWTKLKVHAFMQAHFKQREADEVKPLDELYEKKANCIANHTGADIHRNGDFQKNGNGTTSGIGSSVEKYIIDEDHMSFINNPNLTVRVPIAVGESDFENLNTEDVSSESDPEGSKDKLDDTSSSEGSTIDIKPEVEEVPVEQPEEYLDPDACFTEGCVQRFKCCQVNIEEGLGKSWWILRKTCFLIVEHNWFETFIIFMILLSSGALAFEDIYIEQRKTIRTILEYADKVFTYIFILEMLLKWTAYGFVKFFTNAWCWLDFLIVAVVVNALVGAIPSIMNVLLVCLIFWLIFSIMGVNLFAGKYHYCFNETSEIRFEIEDVNNKTECEKLMEGNNTEIRWKNVKINFDNVGAGYLALLQVATFKGWMDIMYAAVDSRKPDEQPKYEDNIYMYIYFVIFIIFGSFFTLNLFIGVIIDNFNQQKKKFGGQDIFMTEEQKKYYNAMKKLGSKKPQKPIPRPLNKIQGIVFDFVTQQAFDIVIMMLICLNMVTMMVETDTQSKQMENILYWINLVFVIFFTCECVLKMFALRHYYFTIGWNIFDFVVVILSIVGMFLADIIEKYFVSPTLFRVIRLARIGRILRLIKGAKGIRTLLFALMMSLPALFNIGLLLFLVMFIFSIFGMSNFAYVKHEAGIDDMFNFETFGNSMICLFQITTSAGWDGLLLPILNRPPDCSLDKEHPGSGFKGDCGNPSVGIFFFVSYIIISFLIVVNMYIAIILENFSVATEESADPLSEDDFETFYEIWEKFDPDATQFIEYCKLADFADALEHPLRVPKPNTIELIAMDLPMVSGDRIHCLDILFAFTKRVLGDSGELDILRQQMEERFVASNPSKVSYEPITTTLRRKQEEVSAVVLQRAYRGHLARRGFICKKTTSNKLENGGTHREKKESTPSTASLPSYDSVTKPEKEKQQRAEEGRRERAKRQKEVRESKC

SEQ ID NO: 7041 - protein, 769 aa, Homo sapiens
MLGLRPPLLALVGLLSLGCVLSQECTKFKVSSCRECIESGPGCTWCQKLNFTGPGDPDSIRCDTRPQLLMRGCAADDIMDPTSLAETQEDHNGGQKQLSPQKVTLYLRPGQAAAFNVTFRRAKGYPIDLYYLMDLSYSMLDDLRNVKKLGGDLLRALNEITESGRIGFGSFVDKTVLPFVNTHPDKLRNPCPNKEKECQPPFAFRHVLKLTNNSNQFQTEVGKQLISGNLDAPEGGLDAMMQVAACPEEIGWRNVTRLLVFATDDGFHFAGDGKLGAILTPNDGRCHLEDNLYKRSNEFDYPSVGQLAHKLAENNIQPIFAVTSRMVKTYEKLTEIIPKSAVGELSEDSSNVVHLIKNAYNKLSSRVFLDHNALPDTLKVTYDSFCSNGVTHRNQPRGDCDGVQINVPITFQVKVTATECIQEQSFVIRALGFTDIVTVQVLPQCECRCRDQSRDRSLCHGKGFLECGICRCDTGYIGKNCECQTQGRSSQELEGSCRKDNNSIICSGLGDCVCGQCLCHTSDVPGKLIYGQYCECDTINCERYNGQVCGGPGRGLCFCGKCRCHPGFEGSACQCERTTEGCLNPRRVECSGRGRCRCNVCECHSGYQLPLCQECPGCPSPCGKYISCAECLKFEKGPFGKNCSAACPGLQLSNNPVKGRTCKERDSEGCWVAYTLEQQDGMDRYLIYVDESRECVAGPNIAAIVGGTVAGIVLIGILLLVIWKALIHLSDLREYRRFEKEKLKSQWNNDNPLFKSATTTVMNPKFAES

SEQ ID NO: 7042 - protein, 863 aa, Homo sapiens
MLESYVTPILMSYVNRYIKNLKPSDLQLSLWGGDVVLSKLELKLDVLEQELKLPFTFLSGHIHELRIHVPWTKLGSEPVVITINTMECILKLKDGIQDDHESCGSNSTNRSTAESTKSSIKPRRMQQAAPTDPDLPPGYVQSLIRRVVNNVNIVINNLILKYVEDDIVLSVNITSAECYTVGELWDRAFMDISATDLVLRKVINFSDCTVCLDKRNASGKIEFYQDPLLYKCSFRTRLHFTYENLNSKMPSVIKIHTLVESLKLSITDQQLPMFIRIMQLGIALYYGEIGNFKEGEIEDLTCHNKDMLGNITGSEDETRIDMQYPAQHKGQELYSQQDEEQPQGWVSWAWSFVPAIVSYDDGEEDFVGNDPASTMHQQKAQTLKDPIVSIGFYCTKATVTFKLTEMQVESSYYSPQKVKSKEVLCWEQEGTTVEALMMGEPFFDCQIGFVGCRAMCLKGIMGVKDFEENMNRSETEACFFICGDNLSTKGFTYLTNSLFDYRSPENNGTRAEFILDSTHHKETYTEIAGMQRFGAFYMDYLYTMENTSGKGSTNQQDFSSGKSEDLGTVQEKSTKSLVIGPLDFRLDSSAVHRILKMIVCALEHEYEPYSRLKSDIKDENETILNPEEVALLEEYIPTRHTSVTLLKCTCTISMAEFNLLDHLLPVIMGEKNSSNFMNTTNFQSLRPLPSIRILVDKINLEHSVPMYAEQLVHVVSSLTQPSDNLLHYCYVHCYLKIFGFQAGLTSLDCSGSYCLPVPVIPSFSTALYGKLLKLPTCWTKRSQIAITEGIFELPNLTIQATRAQTLLLQAIYQSWSHLGNVSSSAVIEALINEIFLSIEIGSCYVAQVDLELLASNDPPTSTS

SEQ ID NO: 7043 - protein, 803 aa, Homo sapiens
MGCWGQLLVWFGAAGAILCSSPGSQETFLRSSPLPLASPSPRDPKVSAPPSILEPASPLNSPGTEGSWLFSTCGASGRHGPTQTQCDGAYAGTSVVVTVGAAGQLRGVQLWRVPGPGQYLISAYGAAGGKGAKNHLSRAHGVFVSAIFSLGLGESLYILVGQQGEDACPGGSPESQLVCLGESRAVEEHAAMDGSEGVPGSRRWAGGGGGGGGATYVFRVRAGELEPLLVAAGGGGRAYLRPRDRGRTQASPEKLENRSEAPGSGGRGGAAGGDASETDNLWADGEDGVSFIHPSSELFLQPLAVTENHGEVEIRRHLNCSHCPLRDCQWQAELQLAECLCPEGMELAVDNVTCMDLHKPPGPLVLMVAVVATSTLSLLMVCGVLILVKQKKWQGLQEMRLPSPELELSKLRTSAIRTAPNPYYCQVGLGPAQSWPLPPGVTEVSPANVTLLRALGHGAFGEVYEGLVIGLPGDSSPLQVAIKTLPELCSPQDELDFLMEALIISKFRHQNIVRCVGLSLRATPRLILLELMSGGDMKSFLRHSRPHLGQPSPLVMRDLLQLAQDIAQGCHYLEENHFIHRDIAARNCLLSCAGPSRVAKIGDFGMARDIYRASYYRRGDRALLPVKWMPPEAFLEGIFTSKTDSWSFGVLLWEIFSLGYMPYPGRTNQEVLDFVVGGGRMDPPRGCPGPVYRIMTQCWQHEPELRPSFASILERLQYCTQDPDVLNSLLPMELGPTPEEEGTSGLGNRSLECLRPPQPQELSPEKLKSWGGSPLGPWLSSGLKPLKSRGLQPQNLWNPTYRS

SEQ ID NO: 7044 - protein, 639 aa, Homo sapiens
MEDSQDLNEQSVKKTCTESDVSQSQNSRSMEMQDLASPHTLVGGGDTPGSSKLEKSNLSSTSVTTNGTGGENMTVLNTADWLLSCNTPSSATMSLLAVKTEPLNSSETTATTGDGALDTFTGSVITSSGYSPRSAHQYSPQLYPSKPYPHILSTPAAQTMSAYAGQTQYSGMQQPAVYTAYSQTGQPYSLPTYDLGVMLPAIKTESGLSQTQSPLQSGCLSYSPGFSTPQPGQTPYSYQMPGSSFAPSSTIYANNSVSNSTNFSGSQQDYPSYTAFGQNQYAQYYSASTYGAYMTSNNTADGTPSSTSTYQLQESLPGLTNQPGEFDTMQSPSTPIKDLDERTCRSSGSKSRGRGRKNNPSPPPDSDLERVFVWDLDETIIVFHSLLTGSYAQKYGKDPPMAVTLGLRMEEMIFNLADTHLFFNDLEECDQVHIDDVSSDDNGQDLSTYSFATDGFHAAASSANLCLPTGVRGGVDWMRKLAFRYRRVKELYNTYKNNVGGLLGPAKRDAWLQLRAEIEGLTDSWLTNALKSLSIISTRSNCINVLVTTTQLIPALAKVLLYSLGGAFPIENIYSATKIGKESCFERIVSRFGTNITYVVIGDGRDEEHAANQHNMPFWRISSHSDLLALHQALELEYL

SEQ ID NO: 7045 - protein, 593 aa, Homo sapiens
MEKLSALQEQKGELRKRLSYTTHKLEKLETEFDSTRHYLEIELRRAQEELEKVTEKLRRIQSNYMALQRINQELEDKLYRMGQHYEEEKRALSHEIVALNSHLLEAKVTIDKLSEDNELYRKDCNLAAQLLQCSQTYGRVHKVSELPSDFQERVSLHMEKHGCSLPSPLCHPAYADSVPTCVIAKVLEKPDPASLSSRLSDASARDLAFCDGVEKPGPRPPYKGDIYCSDTALYCPEERRRDRRPSVDAPVTDVGFLRAQNSTDSAAEEEEEAEAAAFPAGFQHEAFPSYAGSLPTSSSYSSFSATSEEKEHAQASTLTASQQAIYLNSRDELFDRKPPATTYEGSPRFAKATAAVAAPLEAEVAPGFGRTMSPYPAETFRFPASPGPQQALMPPNLWSLRAKPGTARLPGEDMRGQWRPLSVEDIGAYSYPVSAAGRASPCSFSERYYGGAGGSPGKKADGRASPLYASYKADSFSEGDDLSQGHLAEPCFLRAGGDLSLSPGRSADPLPGYAPSEGGDGDRLGVQLCGTASSPEPEQGSRDSLEPSSMEASPEMHPAARLSPQQAFPRTGGSGLSRKDSLTKAQLYGTLLN

SEQ ID NO: 7046 - protein, 666 aa, Homo sapiens
MEQEPQNGEPAEIKIIREAYKKAFLFVNKGLNTDELGQKEEAKNYYKQGIGHLLRGISISSKESEHTGPGWESARQMQQKMKETLQNVRTRLEILEKGLATSLQNDLQEVPKLYPEFPPKDMCEKLPEPQSFSSAPQHAEVNGNTSTPSAGAVAAPASLSLPSQSCPAEAPPAYTPQAAEGHYTVSYGTDSGEFSSVGEEFYRNHSQPPPLETLGLDADELILIPNGVQIFFVNPAGEVSAPSYPGYLRIVRFLDNSLDTVLNRPPGFLQVCDWLYPLVPDRSPVLKCTAGAYMFPDTMLQAAGCFVGVVLSSELPEDDRELFEDLLRQMSDLRLQANWNRAEEENEFQIPGRTRPSSDQLKEASGTDVKQLDQGNKDVRHKGKRGKRAKDTSSEEVNLSHIVPCEPVPEEKPKELPEWSEKVAHNILSGASWVSWGLVKGAEITGKAIQKGASKLRERIQPEEKPVEVSPAVTKGLYIAKQATGGAAKVSQFLVDGVCTVANCVGKELAPHVKKHGSKLVPESLKKDKDGKSPLDGAMVVAASSVQGFSTVWQGLECAAKCIVNNVSAETVQTVRYKYGYNAGEATHHAVDSAVNVGVTAYNINNIGIKAMVKKTATQTGHTLLEDYQIVDNSQRENQEGAANVNVRGEKDEQTKEVKEAKKKDK

SEQ ID NO: 7047 - protein, 192 aa, Homo sapiens
MSPRRTLPRPLSLCLSLCLCLCLAAALGSAQSGSCRDKKNCKVVFSQQELRKRLTPLQYHVTQEKGTESAFEGEYTHHKDPGIYKCVVCGTPLFKSETKFDSGSGWPSFHDVINSEAITFTDDFSYGMHRVETSCSQCGAHLGHIFDDGPRPTGKRYCINSAALSFTPADSSGTAEGGSGVASPAQADKAEL

SEQ ID NO: 7048 - protein, 932 aa, Homo sapiens [sequence omitted]

SEQ ID NO: 7049 - protein, 1220 aa, Homo sapiens
MKLKEVDRTAMQAWSPAQNHPIYLATGTSAQQLDATFSTNASLEIFELDLSDPSLDMKSCATFSSSHRYHKLIWGPYKMDSKGDVSGVLIAGGENGNIILYDPSKIIAGDKEVVIAQNDKHTGPVRALDVNIFQTNLVASGANESEIYIWDLNNFATPMTPGAKTQPPEDISCIAWNRQVQHILASASPSGRATVWDLRKNEPIIKVSDHSNRMHCSGLAWHPDVATQMVLASEDDRLPVIQMWDLRFASSPLRVLENHARGILAIAWSMADPELLLSCGKDAKILCSNPNTGEVLYELPTNTQWCFDIQWCPRNPAVLSAASFDGRISVYSIMGGSTDGLRQKQVDKLSSSFGNLDPFGTGQPLPPLQIPQQTAQHSIVLPLKKPPKWIRRPVGASFSFGGKLVTFENVRMPSHQGAEQQQQQHHVFISQVVTEKEFLSRSDQLQQAVQSQGFINYCQKKIDASQTEFEKNVWSFLKVNFEDDSRGKYLELLGYRKEDLGKKIALALNKVDGANVALKDSDQVAQSDGEESPAAEEQLLGEHIKEEKEESEFLPSSGGTFNISVSGDIDGLITQALLTGNFESAVDLCLHDNRMADAIILAIAGGQELLARTQKKYFAKSQSKITRLITAVVMKNWKEIVESCDLKNWREALAAVLTYAKPDEFSALCDLLGTRLENEGDSLLQTQACLCYICAGNVEKLVACWTKAQDGSHPLSLQDLIEKVVILRKAVQLTQAMDTSTVGVLLAAKMSQYANLLAAQGSIAAALAFLPDNTNQPNIMQLRDRLCRAQGEPVAGHESPKIPYEKQQLPKGRPGPVAGHHQMPRVQTQQYYPHGENPPPPGFIMHGNVNPNAAGQLPTSPGHMHTQVPPYPQPQPYQPAQPYPFGTGGSAMYRPQQPVAPPTSNAYPNTPYISSASSYTGQSQLYAAQHQASSPTSSPATSFPPPPSSGASFQHGGPGAPPSSSAYALPPGTTGTLPAASELPASQRTGPQNGWNDPPALNRVPKKKKMPENFMPPVPITSPIMNPLGDPQSQMLQQQPSAPVPLSSQSSFPQPHLPGGQPFHGVQQPLGQTGMPPSFSKPNIEGAPGAPIGNTFQHVQSLPTKKITKKPIPDEHLILKTTFEDLIQRCLSSATDPQTKRKLDDASKRLEFLYDKLREQTLSPTITSGLHNIARSIETRNYSEGLTMHTHIVSTSNFSETSAFMPVLKVVLTQANKLGV

SEQ ID NO: 7050 - protein, 696 aa, Homo sapiens
MSYGSITFGDVAIDFSHQEWEYLSLVQKTLYQEVMMENYDNLVSLAGHSVSKPDLITLLEQGKEPWMIVREETRGECTDLDSRCEIISDGKMQLYRKHSCVTLHQRIHNGQKPYECKQCQKSFSHLTELMVHQTIHTSEEPDQCEKFRKAFSHLTDLRKHQKINAREKPYECEECGKVFSYPANLAQHGKVHVEKPYECKECGEAFRTSRQLTVHHRFHYGEKPYECKECGKAFSVYGRLSRHQSIHTGEKPFECNKCGKSFRLKAGLKVHQSIHTGEKPHECKECGKAFRQFSHLVGHKRIHTGEKPYECKECGKGFTCRYQLTMHQRIYSGEKHYECKENGEAFSSGHQLTAPHTFESVEKPYKCEECGKAFSVHGRLTRHQGIHSGKKPYECNKCGKSFRLNSSLKIHQNIHTGEKPYKCKECGKAFSQRAHLAHHNRIHTGYKPFECKECGKSFRCASYLVIHERIHTGEKPYVCQECGKGFSYSHKLTIHRRVHTGEKPYECKECGKAFSVSGQLTQHLSIHSGKKPFECNKCGKSFRFISVLKAHQNIHSAEKPYECKECGKAFRHATSLIYHDRTHAGEKSYECKECGETFSHASHLIIHERIHTSDKPYECKRCGKAFHCASYLVRHESVHADGNPYMCEECGKAFNSSHELSIHHRVHTGEKPFKCNKCRRSFRLRSILEVHQRIHI

SEQ ID NO: 7051 - protein, 429 aa, Homo sapiens
METQFRRGGLGCSPASIKRKKKREDSGDFGLQVSTMFSEDDFQSTERAPYGPQLQWSQDLPRVQVFREQANLEDRSPRRTQRITGGEQVLWGPITQIFPTVRPADLTRVIMPLEQRSQHCKPEEGLQAQEEDLGLVGAQALQAEEQEAAFFSSTLNVGTLEELPAAESPSPPQSPQEESFSPTAMDAIFGSLSDEGSGSQEKEGPSTSPDLIDPESFSQDILHDKIIDLVHLLLRKYRVKGLITKAEMLGSVIKNYEDYFPEIFREASVCMQLLFGIDVKEVDPTSHSYVLVTSLNLSYDGIQCNEQSMPKSGLLIIVLGVIFMEGNCIPEEVMWEVLSIMGVYAGREHFLFGEPKRLLTQNWVQEKYLVYRQVPGTDPACYEFLWGPRAHAETSKMKVLEYIANANGRDPTSYPSLYEDALREEGEGV

SEQ ID NO: 7052 - protein, 465 aa, Homo sapiens
MTKMDIRGAVDAAVPTNIIAAKAAEVRANKVNWQSYLQGQMISAEDCEFIQRFEMKRSPEEKQEMLQTEGSQCAKTFINLMTHICKEQTVQYILTMVDDMLQENHQRVSIFFDYARCSKNTAWPYFLPMLNRQDPFTVHMAARIIAKLAAWGKELMEGSDLNYYFNWIKTQLSSQSSQYVQCVAGCLQLMLRVNEYRFAWVEADGVNCIMGVLSNKCGFQLQYQMIFSIWLLAFSPQMCEHLRRYNIIPVLSDILQESVKEKVTRIILAAFRNFLEKSTERETRQEYALAMIQCKVLKQLENLEQQKYDDEDISEDIKFLLEKLGESVQDLSSFDEYSSELKSGRLEWSPVHKSEKFWRENAVRLNEKNYELLKILTKLLEVSDDPQVLAVAAHDVGEYVRHYPRGKRVIEQLGGKQLVMNHMHHEDQQVRYNALLAVQKLMVHNWEYLGKQLQSEQPQTAAARS

SEQ ID NO: 7053 - protein, 1506 aa, Homo sapiens
MVHVARLLLLLLTFFLRTDAETPPRFTRTPVDQTGVSGGVASFICQATGDPRPKIVWNKKGKKVSNQRFEVIEFDDGSGSVLRIQPLRTPRDEAIYECVASNNVGEISVSTRLTVLREDQIPRGFPTIDMGPQLKVVERTRTATMLCAASGNPDPEITWFKDFLPVDTSNNNGRIKQLRSESIGGTPIRGALQIEQSEESDQGKYECVATNSAGTRYSAPANLYVRELREVRRVPPRFSIPPTNHEIMPGGSVNITCVAVGSPMPYVKWMLGAEDLTPEDDMPIGRNVLELNDVRQSANYTCVAMSTLGVIEAIAQITVKALPKPPGTPVVTESTATSITLTWDSGNPEPVSYYIIQHKPKNSEELYKEIDGVATTRYSVAGLSPYSDYEFRVVAVNNIGRGPPSEPVLTQTSEQAPSSAPRDVQARMLSSTTILVQWKEPEEPNGQIQGYRVYYTMDPTQHVNNWMKHNVADSQITTIGNLVPQKTYSVKVLAFTSIGDGPLSSDIQVITQTGVPGQPLNFKAEPESETSILLSWTPPRSDTIANYELVYKDGEHGEEQRITIEPGTSYRLQGLKPNSLYYFRLAARSPQGLGASTAEISARTMQSMFAKNFHVKAVMKTSVLLSWEIPENYNSAMPFKILYDDGKMVEEVDGRATQKLIVNLKPEKSYSFVLTNRGNSAGGLQHRVTAKTAPDVLRTKPAFIGKTNLDGMITVQLPEVPANENIKGYYIIIVPLKKSRGKFIKPWESPDEMELDELLKEISRKRRSIRYGREVELKPYIAAHFDVLPTEFTLGDDKHYGGFTNKQLQSGQEYVFFVLAVMEHAESKMYATSPYSDPVVSMDLDPQPITDEEEGLIWVVGPVLAVVFIICIVIAILLYKSSKPDRKRAESDSRKSSIPNNKEIPSHHPTDPVELRRLNFQTPGMASHPPIPILELADHIERLKANDNLKFSQEYESIDPGQQFTWEHSNLEVNKPKNRYANVIAYDHSRVLLSAIEGIPGSDYVNANYIDGYRKQNAYIATQGSLPETFGDFWRMIWEQRSATVVMMTKLEERSRVKCDQYWPSRGTETHGLVQVTLLDTVELATYCVRTFALYKNGSSEKREVRQFQFTAWPDHGVPEHPTPFLAFLRRVKTCNPPDAGPMVVHCSAGVGRTGCFIVIDAMLERIKHEKTVDIYGHVTLMRAQRNYMVQTEDQYIFIHDALLEAVTCGNTEVPARNLYAYIQKLTQIETGENVTGMELEFKRLASSKAHTSRFISANLPCNKFKNRLVNIMPYESTRVCLQPIRGVEGSDYINASFIDGYRQQKAYIATQGPLAETTEDFWRMLWEHNSTIVVMLTKLREMGREKCHQYWPAERSARYQYFVVDPMAEYNMPQYILREFKVTDARDGQSRTVRQFQFTDWPEQGVPKSGEGFIDFIGQVHKTKEQFGQDGPISVHCSAGVGRTGVFITLSIVLERMRYEGVVDIFQTVKMLRTQRPAMVQTEDQYQFSYRAALEYLGSFDHYAT

SEQ ID NO: 7054 - protein, 1233 aa, Homo sapiens
MWLSPEEVLVANALWVTERANPFFVLQRRRGHGRGGGLTGLLVGTLDVVLDSSARVAPYRILHQTQDSQVYWTVACGSSRKEITKHWEWLENNLLQTLSIFDSEEDITTFVKGKIHGIIAEENKNLQPQGDEDPGKFKEAELKMRKQFGMPEGEKLVNYYSCSYWKGRVPRQGWLYLTVNHLCFYSFLLGKEVSLVVQWVDITRLEKNATLLFPESIRVDTRDQELFFSMFLNIGETFKLMEQLANLAMRQLLDSEGFLEDKALPRPIRPHRNISALKRDLDARAKNECYRATFRLPRDERLDGHTSCTLWTPFNKLHIPGQMFISNNYICFASKEEDACHLIIPLREVTIVEKADSSSVLPSPLSISTKSKMTFLFANLKDRDFLVQRISDFLQKTPSKQPGSIGSRKASVVDPSTESSPAPQEGSEQPASPASPLSSRQSFCAQEAPTASQGLLKLFQKNSPMEDLGAKGAKEKMKEESWHIHFFEYGRGVCMYRTAKTRALVLKGIPESLRGELWLLFSGAWNEMVTHPGYYAELVEKSTGKYSLATEEIERDLHRSMPEHPAFQNELGIAALRRVLTAYAFRNPTIGYCQAMNIVTSVLLLYGSEEEAFWLLVALCERMLPDYYNTRVVGALVDQGIFEELTRDFLPQLSEKMQDLGVISSISLSWFLTLFLSVMPFESAVVIVDCFFYEGIKVILQVALAVLDANMEQLLGCSDEGEAMTMLGRYLDNVVNKQSVSPPIPHLRALLSSSDDPPAEVDIFELLKVSYEKFSSLRAEDIEQMRFKQRLKVIQSLEDTAKRSVVRAIPVDIGFSIEELEDLYMVFKAKHLASQYWGCSRTMAGRRDPSLPYLEQYRIDASQFRELFASLTPWACGSHTPLLAGRMFRLLDENKDSLINFKEFVTGMSGMYHGDLTEKLKVLYKLHLPPALSPEEAESALEAAHYFTEDSSSEEALPQEEQEGSGSEERGEEKGTSSPDYRHYLRMWAKEKEAQKETIKDLPKMNQEQFIELCKTLYNMFSEDPMEQDLYHAIATVASLLLRIGEVGKKFSARTGRKPRDCATEEDEPPAPELHQDAARELQPPAAGDPQAKAGGDTHLGKAPQESQVVVEGGSGEGQGSPSQLLSDDETKDDMSMSSYSVVSTGSLQCEDLADDTVLVGGEACSPTARIGGTVDTDWCISFEQILASILTESVLVNFFEKRVDIGLKIKDQKKVERQFSTASDHEQPGVSG

SEQ ID NO: 7055 - protein, 562 aa, Homo sapiens
MATEHVNGNGTEEPMDTTSAVIHSENFQTLLDAGLPQKVAEKLDEIYVAGLVAHSDLDERAIEALKEFNEDGALAVLQQFKDSDLSHVQNKSAFLCGVMKTYRQREKQGTKVADSSKGPDEAKIKALLERTGYTLDVTTGQRKYGGPPPDSVYSGQQPSVGTEIFVGKIPRDLFEDELVPLFEKAGPIWDLRLMMDPLTGLNRGYAFVTFCTKEAAQEAVKLYNNHEIRSGKHIGVCISVANNRLFVGSIPKSKTKEQILEEFSKVTEGLTDVILYHQPDDKKKNRGFCFLEYEDHKTAAQARRRLMSGKVKVWGNVGTVEWADPIEDPDPEVMAKVKVLFVRNLANTVTEEILEKAFSQFGKLERVKKLKDYAFIHFDERDGAVKAMEEMNGKDLEGENIEIVFAKPPDQKRKERKAQRQAAKNQMYDDYYYYGPPHMPPPTRGRGRGGRGGYGYPPDYYGYEDYYDYYGYDYHNYRGGYEDPYYGYEDFQVGARGRGGRGARGAAPSRGRGAAPPRGRAGYSQRGGPGSARGVRGARGGAQQQRGRGQGKGVEAGPDLLQ

SEQ ID NO: 7056 - protein, 394 aa, Homo sapiens
MDMHCKADPFSAMHPGHGGVNQLGGVFVNGRPLPDVVRQRIVELAHQGVRPCDISRQLRVSHGCVSKILGRYYETGSIKPGVIGGSKPKVATPKVVDKIAEYKRQNPTMFAWEIRDRLLAEGICDNDTVPSVSSINRIIRTKVQQPFHPTPDGAGTGVTAPGHTIVPSTASPPVSSASNDPVGSYSINGILGIPRSNGEKRKRDEDVSEGSVPNGDSQSGVDSLRKHLRADTFTQQQLEALDRVFERPSYPDVFQASEHIKSEQGNEYSLPALTPGLDEVKSSLSASTNPELGSNVSGTQTYPVVTGRDMASTTLPGYPPHVPPTGQGSYPTSTLAGMVPGSEFSGNPYSHPQYTAYNEAWRFSNPALLSSPYYYSAAPRGSAPAAAAAAYDRH

SEQ ID NO: 7057 - protein, 817 aa, Homo sapiens
MDVSLCPAKCSFWRIFLLGSVWLDYVGSVLACPANCVCSKTEINCRRPDDGNLFPLLEGQDSGNSNGNASINITDISRNITSIHIENWRSLHTLNAVDMELYTGLQKLTIKNSGLRSIQPRAFAKNPHLRYINLSSNRLTTLSWQLFQTLSLRELQLEQNFFNCSCDIRWMQLWQEQGEAKLNSQNLYCINADGSQLPLFRMNISQCDLPEISVSHVNLTVREGDNAVITCNGSGSPLPDVDWIVTGLQSINTHQTNLNWTNVHAINLTLVNVTSEDNGFTLTCIAENVVGMSNASVALTVYYPPRVVSLEEPELRLEHCIEFVVRGNPPPTLHWLHNGQPLRESKIIHVEYYQEGEISEGCLLFNKPTHYNNGNYTLIAKNPLGTANQTINGHFLKEPFPVDEVSPTPPITVTHKPEEDTFGVSIAVGLAAFACVLLVVLFVMINKYGRRSKFGMKGPVAVISGEEDSASPLHHINHGITTPSSLDAGPDTVVIGMTRIPVIENPQYFRQGHNCHKPDTYVQHIKRRDIVLKRELGEGAFGKVFLAECYNLSPTKDKMLVAVKALKDPTLAARKDFQREAELLTNLQHEHIVKFYGVCGDGDPLIMVFEYMKHGDLNKFLRAHGPDAMILVDGQPRQAKGELGLSQMLHIASQIASGMVYLASQHFVHRDLATRNCLVGANLLVKIGDFGMSRDVYSTDYYRVGGHTMLPIRWMPPESIMYRKFTTESDVWSFGVILWEIFTYGKQPWFQLSNTEVIECITQGRVLERPRVCPKEVYDVMLGCWQREPQQRLNIKEIYKILHALGKATPIYLDILG

SEQ ID NO: 7058 - protein, 1726 aa, Homo sapiens
MFNKSFGTPFGGGTGGFGTTSTFGQNTGFGTTSGGAFGTSAFGSSNNTGGLFGNSQTKPGGLFGTSSFSQPATSTSTGFGFGTSTGTANTLFGTASTGTSLFSSQNNAFAQNKPTGFGNFGTSTSSGGLFGTTNTTSNPFGSTSGSLFGPSSFTAAPTGTTIKFNPPTGTDTMVKAGVSTNISTKHQCITAMKEYESKSLEELRLEDYQANRKGPQNQVGAGTTTGLFGSSPATSSATGLFSSSTTNSGFAYGQNKTAFGTSTTGFGTNPGGLFGQQNQQTTSLFSKPFGQATTTQNTGFSFGNTSTIGQPSTNTMGLFGVTQASQPGGLFGTATNTSTGTAFGTGTGLFGQTNTGFGAVGSTLFGNNKLTTFGSSTTSAPSFGTTSGGLFGFGTNTSGNSIFGSKPAPGTLGTGLGAGFGTALGAGQASLFGNNQPKIGGPLGTGAFGAPGFNTTTATLGFGAPQAPVALTDPNASAAQQAVLQQHINSLTYSPFGDSPLFRNPMSDPKKKEERLKPTNPAAQKALTTPTHYKLTPRPATRVRPKALQTTGTAKSHLFDGLDDDEPSLANGAFMPKKSIKKLVLKNLNNSNLFSPVNRDSENLASPSEYPENGERFSFLSKPVDENHQQDGDEDSLVSHFYTNPIAKPIPQTPESAGNKHSNSNSVDDTIVALNMRAALRNGLEGSSEETSFHDESLQDDREEIENNSYHMHPAGIILTKVGYYTIPSMDDLAKITNEKGECIVSDFTIGRKGYGSIYFEGDVNLTNLNLDDIVHIRRKEVVVYLDDNQKPPVGEGLNRKAEVTLDGVWPTDKTSRCLIKSPDRLADINYEGRLEAVSRKQGAQFKEYRPETGSWVFKVSHFSKYGLQDSDEEEEEHPSKTSTKKLKTAPLPPASQTTPLQMALNGKPAPPPQSQSPEVEQLGRVVELDSDMVDITQEPVLDTMLEESMPEDQEPVSASTHIASSLGINPHVLQIMKASLLTDEEDVDMALDQRFSRLPSKADTSQEICSPRLPISASHSSKTRSLVGGLLQSKFTSGAFLSPSVSVQECRTPRAASLMNIPSTSSWSVPPPLTSVFTMPSPAPEVPLKTVGTRRQLGLVPREKSVTYGKGKLLMDMALFMGRSFRVGWGPNWTLANSGEQLNGSHELENHQIADSMEFGFLPNPVAVKPLTESPFKVHLEKLSLRQRKPDEDMKLYQTPLELKLKHSTVHVDELCPLIVPNLGVAVIHDYADWVKEASGDLPEAQIVKHWSLTWTLCEALWGHLKELDSQLNEPREYIQILERRRAFSRWLSCTATPQIEEEVSLTQKNSPVEAVFSYLTGKRISEACSLAQQSGDHRLALLLSQFVGSQSVRELLTMQLVDWHQLQADSFIQDERLRIFALLAGKPVWQLSEKKQINVCSQLDWKRSLAIHLWYLLPPTASISRALSMYEEAFQNTSDSDRYACSPLPSYLEGSGCVIAEEQNSQTPLRDVCFHLLKLYSDSIREKAVRELLTRHCQLLETPESWAKETFLTQKLRVPAKWIHEAKAVRAHMESDKHLEALCLFKAEHWNRCHKLIIRHLASDAIINENYDYLKGFLEDLAPPERSSLIQDWETSGLVYLDYIRVIEMLRHIQQVDCSGNDLEQLHIKVTSLCSRIEQIQCYSAKDRLAQSDMAKRVANLLRVVLSLHHPPDRTSDSTPDPQRVPLRLLAPHIGRLPMPEDYAMDELRSLTQSYLRELAVGSL

SEQ ID NO: 7059 - protein, 732 aa, Homo sapiens
MEGGDQSEEEPRERSQAGGMGTLWSQESTPEERLPVEGSRPWAVARRVLTAILILGLLLCFSVLLFYNFQNCGPRPCETSVCLDLRDHYLASGNTSVAPCTDFFSFACGRAKETNNSFQELATKNKNRLRRILEVQNSWHPGSGEEKAFQFYNSCMDTLAIEAAGTGPLRQVIEELGGWRISGKWTSLNFNRTLRLLMSQYGHFPFFRAYLGPHPASPHTPVIQIDQPEFDVPLKQDQEQKIYAQIFREYLTYLNQLGTLLGGDPSKVQEHSSLSISITSRLFQFLRPLEQRRAQGKLFQMVTIDQLKEMAPAIDWLSCLQATFTPMSLSPSQSLVVHDVEYLKNMSQLVEEMLLKQRDFLQSHMILGLVVTLSPALDSQFQEARRKLSQKLRELTEQPPMPARPRWMKCVEETGTFFEPTLAALFVREAFGPSTRSAAMKLFTAIRDALITRLRNLPWMNEETQNMAQDKVAQLQVEMGASEWALKPELARQEYNDIQLGSSFLQSVLSCVRSLRARIVQSFLQPHPQHRWKVSPWDVNAYYSVSDHVVVFPAGLLQPPFFHPGYPRAVNFGAAGSIMAHELLHIFYQLLLPGGCLACDNHALQEAHLCLKRHYAAFPLPSRTSFNDSLTFLENAADVGGLAIALQAYSKRLLRHHGETVLPSLDLSPQQIFFRSYAQVMCRKPSPQDSHDTHSPPHLRVHGPLSSTPAFARYFRCARGALLNPSSRCQLW

SEQ ID NO: 7060 - protein, 1332 aa, Homo sapiens
MGDPAPARSLDDIDLSALRDPAGIFELVEVVGNGTYGQVYKGRHVKTGQLAAIKVMDVTEDEEEEIKQEINMLKKYSHHRNIATYYGAFIKKSPPGNDDQLWLVMEFCGAGSVTDLVKNTKGNALKEDCIAYICREILRGLAHLHAHKVIHRDIKGQNVLLTENAEVKLVDFGVSAQLDRTVGRRNTFIGTPYWMAPEVIACDENPDATYDYRSDIWSLGITAIEMAEGAPPLCDMHPMRALFLIPRNPPPRLKSKKWSKKFIDFIDTCLIKTYLSRPPTEQLLKFPFIRDQPTERQVRIQLKDHIDRSRKKRGEKEETEYEYSGSEEEDDSHGEEGEPSSIMNVPGESTLRREFLRLQQENKSNSEALKQQQQLQQQQQRDPEAHIKHLLHQRQRRIEEQKEERRRVEEQQRREREQRKLQEKEQQRRLEDMQALRREEERRQAEREQEYKRKQLEEQRQSERLQRQLQQEHAYLKSLQQQQQQQQLQKQQQQQLLPGDRKPLYHYGRGMNPADKPAWAREVEERTRMNKQQNSPLAKSKPGSTGPEPPIPQASPGPPGPLSQTPPMQRPVEPQEGPHKSLVAHRVPLKPYAAPVPRSQSLQDQPTRNLAAFPASHDPDPAIPAPTATPSARGAVIRQNSDPTSEGPGPSPNPPAWVRPDNEAPPKVPQRTSSIATALNTSGAGGSRPAQAVRARPRSNSAWQIYLQRRAERGTPKPPGPPAQPPGPPNASSNPDLRRSDPGWERSDSVLPASHGHLPQAGSLERNRVGVSSKPDSSPVLSPGNKAKPDDHRSRPGRPADFVLLKERTLDEAPRPPKKAMDYSSSSEEVESSEDDEEEGEGGPAEGSRDTPGGRSDGDTDSVSTMVVHDVEEITGTQPPYGGGTMVVQRTPEEERNLLHADSNGYTNLPDVVQPSHSPTENSKGQSPPSKDGSGDYQSRGLVKAPGKSSFTMFVDLGIYQPGGSGDSIPITALVGGEGTRLDQLQYDVRKGSVVNVNPTNTRAHSETPEIRKYKKRFNSEILCAALWGVNLLVGTENGLMLLDRSGQGKVYGLIGRRRFQQMDVLEGLNLLITISGKRNKLRVYYLSWLRNKILHNDPEVEKKQGWTTVGDMEGCGHYRVVKYERIKFLVIALKSSVEVYAWAPKPYHKFMAFKSFADLPHRPLLVDLTVEEGQRLKVIYGSSAGFHAVDVDSGNSYDIYIPVHIQSQITPHAIIFLPNTDGMEMLLCYEDEGVYVNTYGRIIKDVVLQWGEMPTSVAYICSNQIMGWGEKAIEIRSVETGHLDGVFMHKRAQRLKFLCERNDKVFFASVRSGGSSQVYFMTLNRNCIMNW

SEQ ID NO: 7061 - protein, 312 aa, Homo sapiens
MENYNQTSTDFILLGLFPPSKIGLFLFILFVLIFLMALIGNLSMILLIFLDTHLHTPMYFLLSQLSLIDLNYISTIVPKMASDFLYGNKSISFIGCGIQSFFFMTFAGAEALLLTSMAYDRYVAICFPLHYPIRMSKRMYVLMITGSWMIGSINSCAHTVYAFRIPYCKSRAINHFFCDVPAMLTLACTDTWVYEYTVFLSSTIFLVFPFTGIACSYGWVLLAVYRMHSAEGRKKAYSTCSTHLTVVTFYYAPFAYTYLCPRSLRSLTEDKVLAVFYTILTPMLNPIIYSLRNKEVMGALTRVIQNIFSVKM

SEQ ID NO: 7062 - protein, 336 aa, Homo sapiens
MKERKRHLGDTKHFCPVVLKENFILQPGNTEEAAKYREKIYYFSSAEAKEKFLEHPEDYVAHEEPLKAPPLRICLVGPQGSGKTMCGRQLAEKLNIFHIQFEEVLQEKLLLKTEKKVGPEFEEDSENEQAAKQELEELAIQANVKVEEENTKKQLPEVQLTEEEEVIKSSLMENEPLPPEILEVILSEWWLKEPIRSTGFILDGFPRYPEEAQFLGDRGFFPDAAVFIQVDDQDIFDRLLPAQIEKWKLKQKKKLERKKLIKDMKAKIRVDTIAKRRAELILERDKKRREVSSFVFFFKTGSHSVAQGRVQWHNHSSLQPRTPGLKGSSHLSLSKC

SEQ ID NO: 7063 - protein, 639 aa, Homo sapiens
MEDSQDLNEQSVKKTCTESDVSQSQNSRSMEMQDLASPHTLVGGGDTPGSSKLEKSNLSSTSVTTNGTGGENMTVLNTADWLLSCNTPSSATMSLLAVKTEPLNSSETTATTGDGALDTFTGSVITSSGYSPRSAHQYSPQLYPSKPYPHILSTPAAQTMSAYAGQTQYSGMQQPAVYTAYSQTGQPYSLPTYDLGVMLPAIKTESGLSQTQSPLQSGCLSYSPGFSTPQPGQTPYSYQMPGSSFAPSSTIYANNSVSNSTNFSGSQQDYPSYTAFGQNQYAQYYSASTYGAYMTSNNTADGTPSSTSTYQLQESLPGLTNQPGEFDTMQSPSTPIKDLDERTCRSSGSKSRGRGRKNNPSPPPDSDLERVFVWDLDETIIVFHSLLTGSYAQKYGKDPPMAVTLGLRMEEMIFNLADTHLFFNDLEECDQVHIDDVSSDDNGQDLSTYSFATDGFHAAASSANLCLPTGVRGGVDWMRKLAFRYRRVKELYNTYKNNVGGLLGPAKRDAWLQLRAEIEGLTDSWLTNALKSLSIISTRSNCINVLVTTTQLIPALAKVLLYSLGGAFPIENIYSATKIGKESCFERIMQRFGRKVVYVVIGDGVEEEQAAKKHNMPFWRISSHSDLLALHQALELEYL

SEQ ID NO: 7064 - protein, 1001 aa, Homo sapiens
MALPQSEDAMTGDTDKYLGPQDLKELGDDSLPAEGYMGFSLGARSASLRSFSSDRSYTLNRSSYARDSMMIEELLVPSKEQHLTFTREFDSDSLRHYSWAADTLDNVNLVSSPIHSGFLVSFMVDARGGSMRGSRHHGMRIIIPPRKCTAPTRITCRLVKRHKLANPPPMVEGEGLASRLVEMGPAGAQFLGPVIVEIPHFGSMRGKERELIVLRSENGETWKEHQFDSKNEDLTELLNGMDEELDSPEELGKKRICRIITKDFPQYFAVVSRIKQESNQIGPEGGILSSTTVPLVQASFPEGALTKRIRVGLQAQPVPDEIVKKILGNKATFSPIVTVEPRRRKFHKPITMTIPVPPPSGEGVSNGYKGDTTPNLRLLCSITGGTSPAQWEDITGTTPLTFIKDCVSFTTNVSARFWLADCHQVLETVGLATQLYRELICVPYMAKFVVFAKMNDPVESSLRCFCMTDDKVDKTLEQQENFEEVARSKDIEVLEGKPIYVDCYGNLAPLTKGGQQLVFNFYSFKENRLPFSIKIRDTSQEPCGRLSFLKEPKTTKGLPQTAVCNLNITLPAHKKIEKTDRRQSFASLALRKRYSYLTEPGMSPQSPCERTDIRMAIVADHLGLSWTELARELNFSVDEINQIRVENPNSLISQSFMLLKKWVTRDGKNATTDALTSVLTKINRIDIVTLLEGPIFDYGNISGTRSFADENNVFHDPVDGYPSLQVELETPTGLHYTPPTPFQQDDYFSDISSIESPLRTPSRLSDGLVPSQGNIEHSADGPPVVTAEDASLEDSKLEDSVPLTEMPEAVDVDESQLENVCLSWQNETSSGNLESCAQARRVTGGLLDRLDDSPDQCRDSITSYLKGEAGKFEANGSHTEITPEAKTKSYFPESQNDVGKQSTKETLKPKIHGSGHVEEPASPLAAYQKSLEETSKLIIEETKPCVPVSMKKMSRTSPADGKPRLSLHEEEGSSGSEQKQGEGFKVKTKKEIRHVEKKSHS

SEQ ID NO: 7065 - protein, 908 aa, Homo sapiens
MVGLLLFFFPAIFLEVSLLPRSPGRKVLLAGASSQRSVARMDGDVIIGALFSVHHQPPAEKVPERKCGEIREQYGIQRVEAMFHTLDKINADPVLLPNITLGSEIRDSCWHSSVALEQSIEFIRDSLISIRDEKDGINRCLPDGQSLPPGRTKKPIAGVIGPGSSSVAIQVQNLLQLFDIPQIAYSATSIDLSDKTLYKYFLRVVPSDTLQARAMLDIVKRYNWTYVSAVHTEGNYGESGMDAFKELAAQEGLCIAHSDKIYSNAGEKSFDRLLRKLRERLPKARVVVCFCEGMTVRGLLSAMRRLGVVGEFSLIGSDGWADRDEVIEGYEVEANGGITIKLQSPEVRSFDDYFLKLRLDTNTRNPWFPEFWQHRFQCRLPGHLLENPNFKRICTGNESLEENYVQDSKMGFVINAIYAMAHGLQNMHHALCPGHVGLCDAMKPIDGSKLLDFLIKSSFIGVSGEEVWFDEKGDAPGRYDIMNLQYTEANRYDYVHVGTWHEGVLNIDDYKIQMNKSGVVRSVCSEPCLKGQIKVIRKGEVSCCWICTACKENEYVQDEFTCKACDLGWWPNADLTGCEPIPVRYLEWSNIESIIAIAFSCLGILVTLFVTLIFVLYRDTPVVKSSSRELCYIILAGIFLGYVCPFTLIAKPTTTSCYLQRLLVGLSSAMCYSALVTKTNRIARILAGSKKKICTRKPRFMSAWAQVIIASILISVQLTLVVTLIIMEPPMPILSYPSIKEVYLICNTSNLGVVAPLGYNGLLIMSCTYYAFKTRNVPANFNEAKYIAFTMYTTCIIWLAFVPIYFGSNYKIITTCFAVSLSVTVALGCMFTPKMYIIIAKPERNVRSAFTTSDVVRMHVGDGKLPCRSNTFLNIFRRKKAGAGNAKWRTGAQGTAYVAPPLCAREDQ

SEQ ID NO: 7066 - protein, 1098 aa, Homo sapiens
MLEGDLVSKMLRAVLQSHKNGVALPRLQGEYRSLTGDWIPFKQLGFPTLEAYLRSVPAVVRIETSRSGEITCYAMACTETARIAQLVARQRSSKRKTGRQVNCQMRVKKTMPFFLEGKPKATLRQPGFASNFSVGKKPNPAPLRDKGNSVGVKPDAEMSPYMLHTTLGNEAFKDIPVQRHVTMSTNNRFSPKASLQPPLQMHLSRTSTKEMSDNLNQTVEKPNVKPPASYTYKMDEVQNRIKEILNKHNNGIWISKLPHFYKELYKEDLNQGILQQFEHWPHICTVEKPCSGGQDLLLYPAKRKQLLRSELDTEKVPLSPLPGPKQTPPLKGCPTVMAGDFKEKVADLLVKYTSGLWASALPKAFEEMYKVKFPEDALKNLASLSDVCSIDYISGNPQKAILYAKLPLPTDKIQKDAGQAHGDNDIKAMVEQEYLQVEESIAESANTFMEDITVPPLMIPTEASPSVLVVELSNTNEVVIRYVGKDYSAAQELMEDEMKEYYSKNPKITPVQAVNVGQLLAVNAEEDAWLRAQVISTEENKIKVCYVDYGFSENVEKSKAYKLNPKFCSLSFQATKCKLAGLEVLSDDPDLVKVVESLTCGKIFAVEILDKADIPLVVLYDTSGEDDININATCLKAICDKSLEVHLQVDAMYTNVKVTNICSDGTLYCQVPCKGLNKLSDLLRKIEDYFHCKHMTSECFVSLPFCGKICLFHCKGKWLRVEITNVHSSRALDVQFLDSGTVTSVKVSELREIPPRFLQEMIAIPPQAIKCCLADLPQSIGMWTPDAVLWLRDSVLNCSDCSIKVTKVDETRGIAHVYLFTPKNFPDPHRSINRQITNADLWKHQKDVFLSAISSGADSPNSKNGNMPMSGNTGENFRKNLTDVIKKSMVDHTSAFSTEELPPPVHLSKPGEHMDVYVPVACHPGYFVIQPWQEIHKLEVLMEEMILYYSVSEERHIAVEKDQVYAAKVENKWHRVLLKGILTNGLVSVYELDYGKHELVNIRKVQPLVDMFRKLPFQAVTAQLAGVKCNQWSEEASMVFRNHVEKKPLVALVQTVIENANPWDRKVVVYLVDTSLPDTDTWIHDFMSEYLIELSKVN

SEQ ID NO: 7067 - protein, 348 aa, Homo sapiens
MPHIDNDVKLDFKDVLLRPKRSTLKSRSEVDLTRSFSFRNSKQTYSGVPIIAANMDTVGTFEMAKVLCKFSLFTAVHKHYSLVQWQEFAGQNPDCLEHLAASSGTGSSDFEQLEQILEAIPQVKYICLDVANGYSEHFVEFVKDVRKRFPQHTIMAGNVVTGEMVEELILSGADIIKVGIGPGSVCTTRKKTGVGYPQLSAVMECADAAHGLKGHIISDGGCSCPGDVAKAFGAGADFVMLGGMLAGHSESGGELIERDGKKYKLFYGMSSEMAMKKYAGGVAEYRASEGKTVEVPFKGDVEHTIRDILGGIRSTCTYVGAAKLKELSRRTTFIRVTQQVNPIFSEAC

SEQ ID NO: 7068 - protein, 620 aa, Homo sapiens
MQVSKRMLAGGVRSMPSPLLACWQPILLLVLGSVLSGSATGCPPRCECSAQDRAVLCHRKRFVAVPEGIPTETRLLDLGKNRIKTLNQDEFASFPHLEELELNENIVSAVEPGAFNNLFNLRTLGLRSNRLKLIPLGVFTGLSNLTKLDISENKIVILLDYMFQDLYNLKSLEVGDNDLVYISHRAFSGLNSLEQLTLEKCNLTSIPTEALSHLHGLIVLRLRHLNINAIRDYSFKRLYRLKVLEISHWPYLDTMTPNCLYGLNLTSLSITHCNLTAVPYLAVRHLVYLRFLNLSYNPISTIEGSMLHELLRLQEIQLVGGQLAVVEPYAFRGLNYLRVLNVSGNQLTTLEESVFHSVGNLETLILDSNPLACDCRLLWVFRRRWRLNFNRQQPTCATPEFVQGKEFKDFPDVLLPNYFTCRRARIRDRKAQQVFVDEGHTVQFVCRADGDPPPAILWLSPRKHLVSAKSNGRLTVFPDGTLEVRYAQVQDNGTYLCIAANAGGNDSMPAHLHVRSYSPDWPHQPNKTFAFISNQPGEGEANSTRATVPFPFDIKTLIIATTMGFISFLGVVLFCLVLLFLWSRGKGNTKHNIEIEYVPRKSDAGISSADAPRKFNMKMI

SEQ ID NO: 7069 - protein, 986 aa, Homo sapiens
MRVNEKYSTLPAEDRSVHIINICAIEDIGYLPSEGTLLNSLSVDPDAECKYGLYFRDGRRKVDYILVYHHKRPSGNRTLVRRVQHSDTPSGARSVKQDHPLPGKGASLDAGSGEPPMDYHEDDKRFRREEYEGNLLEAGLELERDEDTKIHGVGFVKIHAPWNVLCREAEFLKLKMPTKKMYHINETRGLLKKINSVLQKITDPIQPKVAEHRPQTMKRLSYPFSREKQHLFDLSDKDSFFDSKTRSTIVYEILKRTTCTKAKYSMGITSLLANGVYAAAYPLHDGDYNGENVEFNDRKLLYEEWARYGVFYKYQPIDLVRKYFGEKIGLYFAWLGVYTQMLIPASIVGIIVFLYGCATMDENIPSMEMCDQRHNITMCPLCDKTCSYWKMSSACATARASHLFDNPATVFFSVFMALWAATFMEHWKRKQMRLNYRWDLTGFEEEEEAVKDHPRAEYEARVLEKSLKKESRNKEKRRHIPEESTNKWKQRVKTAMAGVKLTDKVKLTWRDRFPAYLTNLVSIIFMIAVTFAIVLGVIIYRISMAAALAMNSSPSVRSNIRVTVTATAVIINLVVIILLDEVYGCIARWLTKIEVPKTEKSFEERLIFKAFLLKFVNSYTPIFYVAFFKGRFVGRPGDYVYIFRSFRMEECAPGGCLMELCIQLSIIMLGKQLIQNNLFEIGIPKMKKLIRYLKLKQQSPPDHEECVKRKQRYEVDYNLEPFAGLTPEYMEMIIQFGFVTLFVASFPLAPLFALLNNIIEIRLDAKKFVTELRRPVAVRAKDIGIWYNILRGIGKLAVIINAFVISFTSDFIPRLVYLYMYSKNGTMHGFVNHTLSSFNVSDFQNGTAPNDPLDLGYEVQICRYKDYREPPWSENKYDISKDFWAVLAARLAFVIVFQNLVMFMSDFVDWVIPDIPKDISQQIHKEKVLMVELFMREEQDKQQLLETWMEKERQKDEPPCNHHNTKACPDSLGSPAPSHAYHGGVL

SEQ ID NO: 7070 - protein, 869 aa, Homo sapiens
MGNREMEELIPLVNRLQDAFSALGQSCLLELPQIAVVGGQSAGKSSVLENFVGRDFLPRGSGIVTRRPLVLQLVTSKAEYAEFLHCKGKKFTDFDEVRLEIEAETDRVTGMNKGISSIPINLRVYSPHVLNLTLIDLPGITKVPVGDQPPDIEYQIREMIMQFITRENCLILAVTPANTDLANSDALKLAKEVDPQGLRTIGVITKLDLMDEGTDARDVLENKLLPLRRGYVGVVNRSQKDIDGKKDIKAAMLAERKFFLSHPAYRHIADRMGTPHLQKVLNQQLTNHIRDTLPNFRNKLQGQLLSIEHEVEAYKNFKPEDPTRKTKALLQMVQQFAVDFEKRIEGSGDQVDTLELSGGAKINRIFHERFPFEIVKMEFNEKELRREISYAIKNIHGIRTGLFTPDMAFEAIVKKQIVKLKGPSLKSVDLVIQELINTVKKCTKKLANFPRLCEETERIVANHIREREGKTKDQVLLLIDIQVSYINTNHEDFIGFANAQQRSSQVHKKTTVGNQGTNLPPSRQIVIRKGWLTISNIGIMKGGSKGYWFVLTAESLSWYKDDEEKEKKYMLPLDNLKVRDVEKSFMSSKHIFALFNTEQRNVYKDYRFLELACDSQEDVDSWKASLLRAGVYPDKSVAENDENGQAENFSMDPQLERQVETIRNLVDSYMSIINKCIRDLIPKTIMHLMINNVKDFINSELLAQLYSSEDQNTLMEESAEQAQRRDEMLRMYQALKEALGIIGDISTATVSTPAPPPVDDSWIQHSRRSPPPSPTTQRRPTLSAPLARPTSGRGPAPAIPSPGPHSGAPPVPFRPGPLPPFPSSSDSFGAPPQVPSRPTRAPPSVPSRRPPPSPTRPTIIRPLESSLLD

SEQ ID NO: 7071 - protein, 596 aa, Homo sapiens
MFGIQENIPRGGTTMKEEPLGSGMNPVRSWMHTAGVVDANTAAQSGVGLARAHFEKQPPSNLRKSNFFHFVLALYDRQGQPVEIERTAFVDFVEKEKEPNNEKTNNGIHYKLQLLYSNGVRTEQDLYVRLIDSMTKQAIVYEGQDKNPEMCRVLLTHEIMCSRCCDKKSCGNRNETPSDPVIIDRFFLKFFLKCNQNCLKNAGNPRDMRRFQVVVSTTVNVDGHVLAVSDNMFVHNNSKHGRRARRLDPSEGTAPSYLENATPCIKAISPSEGWTTGGATVIIIGDNFFDGLQVVFGTMLVWSELITPHAIRVQTPPRHIPGVVEVTLSYKSKQFCKGAPGRFVYTALNEPTIDYGFQRLQKVIPRHPGDPERLPKEVLLKRAADLVEALYGMPHNNQEIILKRAADIAEALYSVPRNHNQIPTLGNNPAHTGMMGVNSFSSQLAVNVSETSQANDQVGYSRNTSSVSPRGYVPSSTPQQSNYNTVSTSMNGYGSGAMASLGVPGSPGFLNGSSANSPYGIVPSSPTMAASSVTLPSNCSSTHGIFSFSPANVISAVKQKSAFAPVVRPQASPPPSCTSANGNGLQAMSGLVVPPM

SEQ ID NO: 7072 - protein, 759 aa, Homo sapiens
MSKRLRSSEVCADCSGPDPSWASVNRGTFLCDECCSVHRSLGRHISQVRHLKHTPWPPTLLQMVETLYNNGANSIWEHSLLDPASIMSGRRKANPQDKVHPNKAEFIRAKYQMLAFVHRLPCRDDDSVTAKDLSKQLHSSVRTGNLETCLRLLSLGAQANFFHPEKGNTPLHVASKAGQILQAELLAVYGADPGTQDSSGKTPVDYARQGGHHELAERLVEIQYELTDRLAFYLCGRKPDHKNGQHFIIPQMADSSLDLSELAKAAKKKLQSLSNHLFEELAMDVYDEVDRRETDAVWLATQNHSALVTETTVVPFLPVNPEYSSTRNQGRQKLARFNAHEFATLVIDILSDAKRRQQGSSLSGSKDNVELILKTINNQHSVESQDNDQPDYDSVASDEDTDLETTASKTNRQKSLDSDLSDGPVTVQEFMEVKNALVASEAKIQQLMKVNNNLSDELRIMQKKLQTLQSENSNLRKQATTNVYQVQTGSEYTDTSNHSSLKRRPSARGSRPMSMYETGSGQKPYLPMGEASRPEESRMRLQPFPAHIGRSALVTSSSSLPSFPSTLSWSRDESARRASRLEKQNSTPESDYDNTPNDMEPDGMGSSRKGRQRSMVWPGDGLVPDTAEPHVAPSPTLPSTEDVIRKTEQITKNIQELLRAAQENKHDSYIPCSERIHVAVTEMAALFPKKPKSDMVRTSLRLLTSSAYRLQSECKKTLPGDPGSPTDVQLVTQQVIQCAYDIAKAAKQLVTITTKENNN

SEQ ID NO: 7073 - protein, 85 aa, Homo sapiens
MPSVTQRLRDPDINPCLSESDASTRCLDENNYDRERCSTYFLRYKNCRRFWNSIVMQRRKNGVKPFMPTAAERDEILRAVGNMPY

SEQ ID NO: 7074 - protein, 1018 aa, Homo sapiens
MVSHFMGSLSVLCFLLLLGFQFVCPQPSTQHRKVPQRMAAEGAPEDDGGGGAPGVWGAWGPWSACSRSCSGGVMEQTRPCLPRSYRLRGGQRPGAPARAFADHVVSAVRTSVPLHRSRDETPALAGTDASRQGPTVLRGSRHPQPQGLEVTGDRRSRTRGTIGPGKYGYGKAPYILPLQTDTAHTPQRLRRQKLSSRHSRSQGASSARHGYSSPAHQVPQHGPLYQSDSGPRSGLQAAEAPIYQLPLTHDQGYPAASSLFHSPETSNNHGVGTHGATQSFSQPARSTAISCIGAYRQYKLCNTNVCPESSRSIREVQCASYNNKPFMGRFYEWEPFAEVKGNRKCELNCQAMGYRFYVRQAEKVIDGTPCDQNGTAICVSGQCKSIGCDDYLGSDKVVDKCGVCGGDNTGCQVVSGVFKHALTSLGYHRVVEIPEGATKINITEMYKSNNYLALRSRSGRSIINGNWAIDRPGKYEGGGTMFTYKRPNEISSTAGESFLAEGPTNEILDVYMIHQQPNPGVHYEYVIMGTNAISPQVPPHRRPGEPFNGQMVTEGRSQEEGEQKGRNEEKEDLRGEAPEMFTSESAQTFPVRHPDRFSPHRPDNLVPPAPQPPRRSRDHNWKQLGTTECSTTCGKGSQYPIFRCVHRSTHEEAPESYCDSSMKPTPEEEPCNIFPCPAFWDIGEWSECSKTCGLGMQHRQVLCRQVYANRSLTVQPYRCQHLEKPETTSTCQLKICSEWQIRTDWTSCSVPCGVGQRTRDVKCVSNIGDVVDDEECNMKLRPNDIENCDMGPCAKSWFLTEWSERCSAECGAGVRTRSVVCMTNHVSSLPLEGCGNNRPAEATPCDNGPCTGKVEWFAGSWSQCSIECGSGTQQREVICVRKNADTFEVLDPSECSFLEKPPSQQSCHLKPCGAKWFSTEWSMCSKSCQGGFRVREVRCLSDDMTLSNLCDPQLKPEERESCNPQDCVPEVDENCKDKYYNCNVVVQARLCVYNYYKTACCASCTRVANRQTGFLGSR

SEQ ID NO: 7075 - protein, 471 aa, Homo sapiens
MPNSEPASLLELFNSIATQGELVRSLKAGNASKDEIDSAVKMLVSLKMSYKAAAGEDYKADCPPGNPAPTSNHGPDATEAEEDFVDPWTVQTSSAKGIDYDKLIVRFGSSKIDKELINRIERATGQRPHHFLRRGIFFSHRDMNQVLDAYENKKPFYLYTGRGPSSEAMHVGHLIPFIFTKWLQDVFNVPLVIQMTDDEKYLWKDLTLDQAYSYAVENAKDIIACGFDINKTFIFSDLDYMGMSSGFYKNVVKIQKHVTFNQVKGIFGFTDSDCIGKISFPAIQAAPSFSNSFPQIFRDRTDIQCLIPCAIDQDPYFRMTRDVAPRIGYPKPALLHSTFFPALQGAQTKMSASDPNSSIFLTDTAKQIKTKVNKHAFSGGRDTIEEHRQFGGNCDVDVSFMYLTFFLEDDDKLEQIRKDYTSGAMLTGELKKALIEVLQPLIAEHQARRKEVTDEIVKEFMTPRKLSFDFQ

SEQ ID NO: 7076 - protein, 1935 aa, Homo sapiens
MGDSEMAVFGAAAPYLRKSEKERLEAQTRPFDLKKDVFVPDDKQEFVKAKIVSREGGKVTAETEYGKTVTVKEDQVMQQNPPKFDKIEDMAMLTFLHEPAVLYNLKDRYGSWMIYTYSGLFCVTVNPYKWLPVYTPEVVAAYRGKKRSEAPPHIFSISDNAYQYMLTDRENQSILITGESGAGKTVNTKRVIQYFAVIAAIGDRSKKDQSPGKGTLEDQIIQANPALEAFGNAKTVRNDNSSRFGKFIRIHFGATGKLASADIETYLLEKSRVIFQLKAERDYHIFYQILSNKKPELLDMLLITNNPYDYAFISQGETTVASIDDAEELMATDNAFDVLGFTSEEKNSMYKLTGAIMHFGNMKFKLKQREEQAEPDGTEEADKSAYLMGLNSADLLKGLCHPRVKVGNEYVTKGQNVQQVIYATGALAKAVYERMFNWMVTRINATLETKQPRQYFIGVLDIAGFEIFDFNSFEQLCINFTNEKLQQFFNHHMFVLEQEEYKKEGIEWTFIDFGMDLQACIDLIEKPMGIMSILEEECMFPKATDMTFKAKLFDNHLGKSANFQKPRNIKGKPEAHFSLIHYAGIVDYNIIGWLQKNKDPLNETVVGLYQKSSLKLLSTLFANYAGADAPIEKGKGKAKKGSSFQTVSALHRENLNKLMTNLRSTHPHFVRCIIPNETKSPGVMDNPLVMHQLRCNGVLEGIRICRKGFPNRILYGDFRQRYRILNPAAIPEGQFIDSRKGAEKLLSSLDIDHNQYKFGHTKVFFKAGLLGLLEEMRDERLSRIITRIQAQSRGVLARMEYKKLLERRDSLLVIQWNIRAFMGVKNWPWMKLYFKIKPLLKSAEREKEMASMKEEFTRLKEALEKSEARRKELEEKMVSLLQEKNDLQLQVQAEQDNLADAEERCDQLIKNKIQLEAKVKEMNERLEDEEEMNAELTAKKRKLEDECSELKRDIDDLELTLAKVEKEKHATENKVKNLTEEMAGLDEIIAKLTKEKKALQEAHQQALDDLQAEEDKVNTLTKAKVKLEQQVDDLEGSLEQEKKVRMDLERAKRKLEGDLKLTQESIMDLENDKQQLDERLKKKDFELNALNARIEDEQALGSQLQKKLKELQARIEELEEELEAERTARAKVEKLRSDLSRELEEISERLEEAGGATSVQIEMNKKREAEFQKMRRDLEEATLQHEATAAALRKKHADSVAELGEQIDNLQRVKQKLEKEKSEFKLELDDVTSNMEQIIKAKANLEKMCRTLEDQMNEHRSKAEETQRSVNDLTSQRAKLQTENGELSRQLDEKEALISQLTRGKLTYTQQLEDLKRQLEEEVKAKNALAHALQSARHDCDLLREQYEEETEAKAELQRVLSKANSEVAQWRTKYETDAIQRTEELEEAKKKLAQRLQEAEEAVEAVNAKCSSLEKTKHRLQNEIEDLMVDVERSNAAAAALDKKQRNFDKILAEWKQKYEESQSELESSQKEARSLSTELFKLKNAYEESLEHLETFKRENKNLQEEISDLTEQLGSSGKTIHELEKVRKQLEAEKMELQSALEEAEASLEHEEGKILRAQLEFNQIKAEIERKLAEKDEEMEQAKRNHLRVVDSLQTSLDAETRSRNEALRVKKKMEGDLNEMEIQLSHANRMAAEAQKQVKSLQSLLKDTQIQLDDAVRANDDLKENIAIVERRNNLLQAELEELRAVVEQTERSRKLAEQELIETSERVQLLHSQNTSLINQKKKMDADLSQLQTEVEEAVQECRNAEEKAKKAITDAAMMAEELKKEQDTSAHLERMKKNMEQTIKDLQHRLDEAEQIALKGGKKQLQKLEARVRELENELEAEQKRNAESVKGMRKSERRIKELTYQTEEDRKNLLRLQDLVDKLQLKVKAYKRQAEEAEEQANTNLSKFRKVQHELDEAEERADIAESQVNKLRAKSRDIGTKGLNEE

SEQ ID NO: 7077 - protein, 631 aa, Homo sapiens
MNSSDEEKQLQLITSLKEQAIGEYEDLRAENQKTKEKCDKIRQERDEAVKKLEEFQKISHMVIEEVNFMQNHLEIEKTCRESAEALATKLNKENKTLKRISMLYMAKLGPDVITEEINIDDEDSTTDTDGAAETCVSVQCQKQIKELRDQIVSVQEEKKILAIELENLKSKLVEVIEEVNKVKQEKTVLNSEVLEQRKVLEKCNRVSMLAVEEYEEMQVNLELEKDLRKKAESFAQEMFIEQNKLKRQSHLLLQSSIPDQQLLKALDENAKLTQQLEEERIQHQQKVKELEEQLENETLHKEIHNLKQQLELLEEDKKELELKYQNSEEKARNLKHSVDELQKRVNQSENSVPPPPPPPPPLPPPPPNPIRSLMSMIRKRSHPSGSGAKKEKATQPETTEEVTDLKRQAVEEMMDRIKKGVHLRPVNQTARPKTKPESSKGCESAVDELKGILGTLNKSTSSRSLKSLDPENSETELERILRRRKVTAEADSSSPTGILATSESKSMPVLGSVSSVTKTALNKKTLEAEFNSPSPPTPEPGEGPRKLEGCTSSKVTFQPPSSIGCRKKYIDGEKQAEPVVVLDPVSTHEPQTKDQVAEKDPTQHKEDEGEIQPENKEDSIENVRETDSSNC

SEQ ID NO: 7078 - protein, 474 aa, Homo sapiens
MAYIQLEPLNEGFLSRISGLLLCRWTCRHCCQKCYESSCCQSSEDEVEILGPFPAQTPPWLMASRSSDKDGDSVHTASEVPLTPRTNSPDGRRSSSDTSKSTYSLTRRISSLESRRPSSPLIDIKPIEFGVLSAKKEPIQPSVLRRTYNPDDYFRKFEPHLYSLDSNSDDVDSLTDEEILSKYQLGMLHFSTQYDLLHNHLTVRVIEARDLPPPISHDGSRQDMAHSNPYVKICLLPDQKNSKQTGVKRKTQKPVFEERYTFEIPFLEAQRRTLLLTVVDFDKFSRHCVIGKVSVPLCEVDLVKGGHWWKALIPSSQNEVELGELLLSLNYLPSAGRLNVDVIRAKQLLQTDVSQGSDPFVKIQLVHGLKLVKTKKTSFLRGTIDPFYNESFSFKVPQEELENASLVFTVFGHNMKSSNDFIGRIVIGQYSSGPSETNHWRRMLNTHRTAVEQWHSLRSRAECDRVSPASLEVT

SEQ ID NO: 7079 - protein, 320 aa, Homo sapiens
MKRSLNENSARSTADWAWEAVNPELAPVMKTVDTGQIPHSVSRPLRSQDSVFNSIQSNTGRSQGGWSYRDGNKNTSLKTWNKNDFKPQCKRTNLVANDGKNSCPVSSGAQQQKQLRIPEPPNLSRNKETELLRQTHSSKISGCTMRGLDKNSALQTLKPNFQQNQYKKQMLDDIPEDNTLKETSLYQLQFKEKASSLRIISAVIESMKYWREHAQKTVLLFEVLAVLDSAVTPGPYYSKTFLMRDGKNTLPCVFYEIDRELPRLIRGRVHRCVGNYDQKKNIFQCVSVRPASVSEQKTFQAFVKIADVEMQYYINVMNET

SEQ ID NO: 7080 - protein, 1114 aa, Homo sapiens
MLRGTMTAWRGMRPEVTLACLLLATAGCFADLNEVPQVTVQPASTVQKPGGTVILGCVVEPPRMNVTWRLNGKELNGSDDALGVLITHGTLVITALNNHTVGRYQCVARMPAGAVASVPATVTLANLQDFKLDVQHVIEVDEGNTAVIACHLPESHPKAQVRYSVKQEWLEASRGNYLIMPSGNLQIVNASQEDEGMYKCAAYNPVTQEVKTSGSSDRLRVRRSTAEAARIIYPPEAQTIIVTKGQSLILECVASGIPPPRVTWAKDGSSVTGYNKTRFLLSNLLIDTTSEEDSGTYRCMADNGVGQPGAAVILYNVQVFEPPEVTMELSQLVIPWGQSAKLTCEVRGNPPPSVLWLRNAVPLISSQRLRLSRRALRVLSMGPEDEGVYQCMAENEVGSAHAVVQLRTSRPSITPRLWQDAELATGTPPVSPSKLGNPEQMLRGQPALPRPPTSVGPASPQCPGEKGQGAPAEAPIILSSPRTSKTDSYELVWRPRHEGSGRAPILYYVVKHRKVTNSSDDWTISGIPANQHRLTLTRLDPGSLYEVEMAAYNCAGEGQTAMVTFRTGRRPKPEIMASKEQQIQRDDPGASPQSSSQPDHGRLSPPEAPDRPTISTASETSVYVTWIPRGNGGFPIQSFRVEYKKLKKVGDWILATSAIPPSRLSVEITGLEKGTSYKFRVRALNMLGESEPSAPSRPYVVSGYSGRVYERPVAGPYITFTDAVNETTIMLKWMYIPASNNNTPIHGFYIYYRPTDSDNDSDYKKDMVEGDKYWHSISHLQPETSYDIKMQCFNEGGESEFSNVMICETKARKSSGQPGRLPPPTLAPPQPPLPETIERPVGTGAMVARSSDLPYLIVGVVLGSIVLIIVTFIPFCLWRAWSKQKHTTDLGFPRSALPPSCPYTMVPLGGLPGHQASGQPYLSGISGRACANGIHMNRGCPSAAVGYPGMKPQQHCPGELQQQSDTSSLLRQTHLGNGYDPQSHQITRGPKSSPDEGSFLYTLPDDSTHQLLQPHHDCCQRQEQPAAVGQSGVRRAPDSPVLEAVWDPPFHSGPPCCLGLVPVEEVDSPDSCQVSGGDWCPQHPVGAYVGQEPGMQLSPGPLVRVSFETPPLTI

SEQ ID NO: 7081 - protein, 566 aa, Homo sapiens
MDLHRAAFKMENSSYLPNPLASPALMVLASTAEASRDASIPCQQPRPFGVPVSVDKDVHIPFTNGSYTFASMYHRQGGVPGTFANRDFPPSLLHLHPQFAPPNLDCTPISMLNHSGVGAFRPFASTEDRESYQSAFTPAKRLKNCHDTESPHLRFSDADGKEYDFGTQLPSSSPGSLKVDDTGKKIFAVSGLISDREASSSPEDRNDRCKKKAAALFDSQAPICPICQVLLRPSELQEHMEQELEQLAQLPSSKNSLLKDAMAPGTPKSLLLSASIKREGESPTASPHSSATDDLHHSDRYQTFLRVRANRQTRLNARIGKMKRRKQDEGQREGSCMAEDDAVDIEHENNNRFEEYEWCGQKRIRATTLLEGGFRGSGFIMCSGKENPDSDADLDVDGDDTLEYGKPQYTEADVIPCTGEEPGEAKEREALRGAVLNGGPPSTRITPEFSKWASDEMPSTSNGESSKQEAMQKTCKNSDIEKITEDSAVTTFEALKARVRELERQLSRGDRYKCLICMDSYSMPLTSIQCWHVHCEECWLRTLGAKKLCPQCNTITAPGDLRRIYL

SEQ ID NO: 7082 - protein, 705 aa, Homo sapiens
LLLLGLARGAAGAPGPDGLDVCATCHEHATCQQREGKKICICNYGFVGNGRTQCVDKNECQFGATLVCGNHTSCHNTPGGFYCICLEGYRATNNNKTFIPNDGTFCTDIDECEVSGLCRHGGRCVNTHGSFECYCMDGYLPRNGPEPFHPTTDATSCTEIDCGTPPEVPDGYIIGNYTSSLGSQVRYACREGFFSVPEDTVSSCTGLGTWESPKLHCQEINCGNPPEMRHAILVGNHSSRLGGVARYVCQEGFESPGGKITSVCTEKGTWRESTLTCTEILTKINDVSLFNDTCVRWQINSRRINPKISYVISIKGQRLDPMESVREETVNLTTDSRTPEVCLALYPGTNYTVNISTAPPRRSMPAVIGFQTAEVDLLEDDGSFNISIFNETCLKLNRRSRKVGSEHMYQFTVLGQRWYLANFSHATSFNFTTREQVPVVCLDLYPTTDYTVNVTLLRSPKRHSVQITIATPPAVKQTISNISGFNETCLRWRSIKTADMEEMYLFHIWGQRWYQKEFAQEMTFNISSSSRDPEVCLDLRPGTNYNVSLRALSSELPVVISLTTQITEPPLPEVEFFTVHRGPLPRLRLRKAKEKNGPISSYQVLVLPLALQSTFSCDSEGASSFFSNASDADGYVAAELLAKDVPDDAMEIPIGDRLYYGEYYNAPLKRGSDYCIILRITSEWNKIRHSCCCRWRVLDWVPWLL

SEQ ID NO: 7083 - protein, 465 aa, Homo sapiens
MFLATLYFALPLLDLLLSAEVSGGDRLDCVKASDQCLKEQSCSTKYRTLRQCVAGKETNFSLASGLEAKDECRSAMEALKQKSLYNCRCKRGMKKEKNCLRIYWSMYQSLQGNDLLEDSPYEPVNSRLSDIFRVVPFISDVFQQVEHIPKGNNCLDAAKACNLDDICKKYRSAYITPCTTSVSNDVCNRRKCHKALRQFFDKVPAKHSYGMLFCSCRDIACTERRRQTIVPVCSYEEREKPNCLNLQDSCKTNYICRSRLADFFTNCQPESRSVSSCLKENYADCLLAYSGLIGTVMTPNYIDSSSLSVAPWCDCSNSGNDLEECLKFLNFFKDNTCLKNAIQAFGNGSDVTVWQPAFPVQTTTATTTTALRVKNKPLGPAGSENEIPTHVLPPCANLQAQKLKSNVSGNTHLCISNGNYEKEGLGASSHITTKSMAAPPSCGLSPLLVLVVTALSTLLSLTETS

SEQ ID NO: 7084 - protein, 493 aa, Homo sapiens
MLKALFLTMLTLALVKSQDTEETITYTQCTDGYEWDPVRQQCKDIDECDIVPDACKGGMKCVNHYGGYLCLPKTAQIIVNNEQPQQETQPAEGTSGATTGVVAASSMATSGVLPGGGFVASAAAVAGPEMQTGRNNFVIRRNPADPQRIPSNPSHRIQCAAGYEQSEHNVCQDIDECTAGTHNCRADQVCINLRGSFACQCPPGYQKRGEQCVDIDECTIPPYCHQRCVNTPGSFYCQCSPGFQLAANNYTCVDINECDASNQCAQQCYNILGSFICQCNQGYELSSDRLNCEDIDECRTSSYLCQYQCVNEPGKFSCMCPQGYQVVRSRTCQDINECETTNECREDEMCWNYHGGFRCYPRNPCQDPYILTPENRCVCPVSNAMCRELPQSIVYKYMSIRSDRSVPSDIFQIQATTIYANTINTFRIKSGNENGEFYLRQTSPVSAMLVLVKSLSGPREHIVDLEMLTVSSIGTFRTSSVLRLTIIVGPFSF

SEQ ID NO: 7085 - protein, 1257 aa, Homo sapiens
MKAADEPAYLTVGTDVSAKYRGAFCEAKIKTVKRLVKVKVLLKQDNTTQLVQDDQVKGPLRVGAIVETRTSDGSFQEAIISKLTDASWYTVVFDDGDERTLRRTSLCLKGERHFAESETLDQLPLTNPEHFGTPVIAKKTNRGRRSSLPVTEDEKEEESSEEEDEDKRRLNDELLGKVVSVVSATERTEWYPALVISPSCNDDITVKKDQCLVRSFIDSKFYSIARKDIKEVDILNLPESELSTKPGLQKASIFLKTRVVPDNWKMDISEILESSSSDDEDGPAEENDEEKEKEAKKTEEEVPEEELDPEERDNFLQQLYKFMEDRGTPINKPPVLGYKDLNLFKLFRLVYHQGGCDNIDSGAVWKQIYMDLGIPILNSAASYNVKTAYRKYLYGFEEYCRSANIQFRTVHHHEPKVKEEKKDLEESMEEALKLDQEMPLTEVKSEPEENIDSNSESEREEIELKSPRGRRRIARDVNSIKKEIEEEKTEDKLKDNDTENKDVDDDYETAEKKENELLLGRKNTPKQKEKKIKKQEDSDKDSDEEEEKSQEREETESKCDSEGEEDEEDMEPCLTGTKVKVKYGRGKTQKIYEASIKSTEIDDGEVLYLVHYYGWNVRYDEWVKADRIIWPLDKGGPKKKQKKKAKNKEDSEKDEKRDEERQKSKRGRPPLKSTLSSNMPYGLSKTANSEGKSDSCSSDSETEDALEKNLINEELSLKDELEKNENLNDDKLDEENPKISAHILKENDRTQMQPLETLKLEVGENEQIVQIFGNKMEKTEEVKKEAEKSPKGKGRRSKTKDLSLEIIKISSFGQNEAGSEPHIEAHSLELSSLDNKNFSSATEDEIDQCVKEKKLKRKILGQSSPEKKIRIENGMEMTNTVSQERTSDCIGSEGMKNLNFEQHFERENEGMPSLIAESNQCIQQLTSERFDSPAEETVNIPLKEDEDAMPLIGPETLVCHEVDLDDLDEKDKTSIEDVAVESSESNSLVSIPPALPPVVQHNFSVASPLTLSQDESRSVKSESDITIEVDSIAEESQEGLCERESANGFETNVASGTCSIIVQERESREKGQKRPSDGNSGLMAKKQKRTPKRTSAAAKNEKNGTGQSSDSEDLPVLDNSSKCTPVKHLNVSKPQKLARSPARISPHIKDGEKDKHREKHPNSSPRTYKWSFQLNELDNMNSTERISFLQEKLQEIRKYYMSLKSEVATIDRRRKRLKKKDREVSHAGASMSSASSDTGMSPSSSSPPQNVLAVECR

SEQ ID NO: 7086 - protein, 377 aa, Homo sapiens
MLLLVTSLLLCELPHPAFLLIPEKSDLRTVAPASSLNVRFDSRTMNLSWDCQENTTFSKCFLTDKKNRVVEPRLSNNECSCTFREICLHEGVTFEVHVNTSQRGFQQKLLYPNSGREGTAAQNFSCFIYNADLMNCTWARGPTAPRDVQYFLYIRNSKRRREIRCPYYIQDSGTHVGCHLDNLSGLTSRNYFLVNGTSREIGIQFFDSLLDTKKIERFNPPSNVTVRCNTTHCLVRWKQPRTYQKLSYLDFQYQLDVHRKNTQPGTENLLINVSGDLENRYNFPSSEPRAKHSVKIRAADVRILNWSSWSEAIEFDHLGGIHPRGRERLPRRGLDREGNYLRPRGCRNGMDISASATRGNCFLDDAVNLYIIFYVFI

SEQ ID NO: 7087 - protein, 361 aa, Homo sapiens
METGAAELYDQALLGILQHVGNVQDFLRVLFGFLYRKTDFYRLLRHPSDRMGFPPGAAQALVLQVFKTFDHMARQDDEKRRQELEEKIRRKEEEEAKTVSAAAAEKEPVPVPVQEIEIDSTTELDGHQEVEKVQPPGPVKEMAHGSQEAEAPGAVAGAAEVPREPPILPRIQEQFQKNPDSYNGAVRENYTWSQDYTDLEVRVPVPKHVVKGKQVSVALSSSSIRVAMLEENGERVLMEGKLTHKINTESSLWSLEPGKCVLVNLSKVGEYWWNAILEGEEPIDIDKINKERSMATVDEEEQAVLDRLTFDYHQKLQGKPQSHELKVHEMLKKGWDAEGSPFRGQRFDPAMFNISPGAVQF

SEQ ID NO: 7088 - protein, 576 aa, Homo sapiens
MELENIVANTVLLKAREGGGGNRKGKSKKWRQMLQFPHISQCEELRLSLERDYHSLCERQPIGRLLFREFCATRPELSRCVAFLDGVAEYEVTPDDKRKACGRQLTQNFLSHTGPDLIPEVPRQLVTNCTQRLEQGPCKDLFQELTRLTHEYLSVAPFADYLDSIYFNRFLQWKWLERQPVTKNTFRQYRVLGKGGFGEVCACQVRATGKMYACKKLEKKRIKKRKGEAMALNEKQILEKVNSRFVVSLAYAYETKDALCLVLTLMNGGDLKFHIYHMGQAGFPEARAVFYAAEICCGLEDLHRERIVYRDLKPENILLDDHGHIRISDLGLAVHVPEGQTIKGRVGTVGYMAPEVVKNERYTFSPDWWALGCLLYEMIAGQSPFQQRKKKIKREEVERLVKEVPEEYSERFSPQARSLCSQLLCKDPAERLGCRGGSAREVKEHPLFKKLNFKRLGAGMLEPPFKPDPQAIYCKDVLDIEQFSTVKGVELEPTDQDFYQKFATGSVPIPWQNEMVETECFQELNVFGLDGSVPPDLDWKGQPPAPPKKGLLQRLFSRQDCCGNCSDSEEELPTRL

SEQ ID NO: 7089 - protein, 390 aa, Homo sapiens
MGGCAGSRRRFSDSEGEETVPEPRLPLLDHQGAHWKNAVGFWLLGLCNNFSYVVMLSAAHDILSHKRTSGNQSHVDPGPTPIPHNSSSRFDCNSVSTAAVLLADILPTLVIKLLAPLGLHLLPYSPRVLVSGICAAGSFVLVAFSHSVGTSLCGVVFASISSGLGEVTFLSLTAFYPSYFLLLTSPEAQDPGGEEEAESAARQPLIRTEAPESKPGSSSSLSLRERWTVFKGLLWYIVPLVVVYFAEYFINQGLFELLFFWNTSLSHAQQYRWYQMLYQAGVFASRSSLRCCRIRFTWALALLQCLNLVFLLADVWFGFLPSIYLVFLIILYEGLLGGAAYVNTFHNIALETSDEHREFAMAATCISDTLGISLSGLLALPLHDFLCQLS

SEQ ID NO: 7090 - protein, 1519 aa, Homo sapiens
MAPYPCGCHILLLLFCCLAAARANLLNLNWLWFNNEDTSHAATTIPEPQGPLPVQPTADTTTHVTPRNGSTEPATAPGSPEPPSELLEDGQDTPTSAESPDAPEENIAGVGAEILNVAKGIRSFVQLWNDTVPTESLARAETLVLETPVGPLALAGPSSTPQENGTTLWPSRGIPSSPGAHTTEAGTLPAPTPSPPSLGRPWAPLTGPSVPPPSSERISEEVGLLQLLGDPPPQQVTQTDDPDVGLAYVFGPDANSGQVARYHFPSLFFRDFSLLFHIRPATEGPGVLFAITDSAQAMVLLGVKLSGVQDGHQDISLLYTEPGAGQTHTAASFRLPAFVGQWTHLALSVAGGFVALYVDCEEFQRMPLARSSRGLELEPGAGLFVAQAGGADPDKFQGVIAELKVRRDPQVSPMHCLDEEGDDSDGASGDSGSGLGDARELLREETGAALKPRLPAPPPVTTPPLAGGSSTEDSRSEEVEEQTTVASLGAQTLPGSDSVSTWDGSVRTPGGRVKEGGLKGQKGEPGVPGPPGRAGPPGSPCLPGPPGLPCPVSPLGPAGPALQTVPGPQGPPGPPGRDGTPGRDGEPGDPGEDGKPGDTGPQGFPGTPGDVGPKGDKGDPGVGERGPPGPQGPPGPPGPSFRHDKLTFIDMEGSGFGGDLEALRGPRGFPGPPGPPGVPGLPGEPGRFGVNSSDVPGPAGLPGVPGREGPPGFPGLPGPPGPPGREGPPGRTGQKGSLGEAGAPGHKGSKGAPGPAGARGESGLAGAPGPAGPPGPPGPPGPPGPGLPAGFDDMEGSGGPFWSTARSADGPQGPPGLPGLKGDPGVPGLPGAKGEVGADGVPGFPGLPGREGIAGPQGPKGDRGSRGEKGDPGKDGVGQPGLPGPPGPPGPVVYVSEQDGSVLSVPGPEGRPGFAGFPGPAGPKGNLGSKGERGSPGPKGEKGEPGSIFSPDGGALGPAQKGAKGEPGFRGPPGPYGRPGYKGEIGFPGRPGRPGMNGLKGEKGEPGDASLGFGMRGMPGPPGPPGPPGPPGTPVYDSNVFAESSRPGPPGLPGNQGPPGPKGAKGEVGPPGPPGQFPFDFLQLEAEMKGEKGDRGDAGQKGERGEPGGGGFFGSSLPGPPGPPGPPGPRGYPGIPGPKGESIRGQPGPPGPQGPPGIGYEGRQGPPGPPGPPGPPSFPGPHRQTISVPGPPGPPGPPGPPGTMGASSGVRLWATRQAMLGQVHEVPEGWLIFVAEQEELYVRVQNGFRKVQLEARTPLPRGTDNEVAALQPPVVQLHDSNPYPRREHPHPTARPWRADDILASPPRLPEPQPYPGAPHHSSYVHLRPARPTSPPAHSHRDFQPVLHLVALNSPLSGGMRGIRGADFQCFQQARAVGLAGTFRAFLSSRLQDLYSIVRRADRAAVPIVNLKDELLFPSWEALFSGSEGPLKPGARIFSFDGKDVLRHPTWPQKSVWHGSDPNGRRLTESYCETWRTEAPSATGQASSLLGGRLLGQSAASCHHAYIVLCIENSFMTASK

SEQ ID NO: 7091 - protein, 5033 aa, Homo sapiens
MGDAEGEDEVQFLRTDDEVVLQCSATVLKEQLKLCLAAEGFGNRLCFLEPTSNAQNVPPDLAICCFVLEQSLSVRALQEMLANTVEAGVESSQGGGHRTLLYGHAILLRHAHSRMYLSCLTTSRSMTDKLAFDVGLQEDATGEACWWTMHPASKQRSEGEKVRVGDDIILVSVSSERYLHLSTASGELQVDASFMQTLWNMNPICSRCEEGFVTGGHVLRLFHGHMDECLTISPADSDDQRRLVYYEGGAVCTHARSLWRLEPLRISWSGSHLRWGQPLRVRHVTTGQYLALTEDQGLVVVDASKAHTKATSFCFRISKEKLDVAPKRDVEGMGPPEIKYGESLCFVQHVASGLWLTYAAPDPKALRLGVLKKKAMLHQEGHMDDALSLTRCQQEESQAARMIHSTNGLYNQFIKSLDSFSGKPRGSGPPAGTALPIEGVILSLQDLIIYFEPPSEDLQHEEKQSKLRSLRNRQSLFQEEGMLSMVLNCIDRLNVYTTAAHFAEFAGEEAAESWKEIVNLLYELLASLIRGNRSNCALFSTNLDWLVSKLDRLEASSGILEVLYCVLIESPEVLNIIQENHIKSIISLLDKHGRNHKVLDVLCSLCVCNGVAVRSNQDLITENLLPGRELLLQTNLINYVTSIRPNIFVGRAEGTTQYSKWYFEVMVDEVTPFLTAQATHLRVGWALTEGYTPYPGAGEGWGGNGVGDDLYSYGFDGLHLWTGHVARPVTSPGQHLLAPEDVISCCLDLSVPSISFRINGCPVQGVFESFNLDGLFFPVVSFSAGVKVRFLLGGRHGEFKFLPPPGYAPCHEAVLPRERLHLEPIKEYRREGPRGPHLVGPSRCLSHTDFVPCPVDTVQIVLPPHLERIREKLAENIHELWALTRIEQGWTYGPVRDDNKRLHPCLVDFHSLPEPERNYNLQMSGETLKTLLALGCHVGMADEKAEDNLKKTKLPKTYMMSNGYKPAPLDLSHVRLTPAQTTLVDRLAENGHNVWARDRVGQGWSYSAVQDIPARRNPRLVPYRLLDEATKRSNRDSLCQAVRTLLGYGYNIEPPDQEPSQVENQSRCDRVRIFRAEKSYTVQSGRWYFEFEAVTTGEMRVGWARPELRPDVELGADELAYVFNGHRGQRWHLGSEPFGRPWQPGDVVGCMIDLTENTIIFTLNGEVLMSDSGSETAFREIEIGDGFLPVCSLGPGQVGHLNLGQDVSSLRFFAICGLQEGFEPFAINMQRPVTTWFSKGLPQFEPVPLEHPHYEVSRVDGTVDTPPCLRLTHRTWGSQNSLVEMLFLRLSLPVQFHQHFRCTAGATPLAPPGLQPPAEDEARAAEPDPDYENLRRSAGGWSEAENGKEGTAKEGAPGGTPQAGGEAQPARAENEKDATTEKNKKRGFLFKAKKVAMMTQPPATPTLPRLPHDVVPADNRDDPEIILNTTTYYYSVRVFAGQEPSCVWAGWVTPDYHQHDMSFDLSKVRVVTVTMGDEQGNVHSSLKCSNCYMVWGGDFVSPGQQGRISHTDLVIGCLVDLATGLMTFTANGKESNTFFQVEPNTKLFPAVFVLPTHQNVIQFELGKQKNIMPLSAAMFQSERKNPAPQCPPRLEMQMLMPVSWSRMPNHFLQVETRRAGERLGWAVQCQEPLTMMALHIPEENRCMDILELSERLDLQRFHSHTLRLYRAVCALGNNRVAHALCSHVDQAQLLHALEDAHLPGPLRAGYYDLLISIHLESACRSRRSMLSEYIVPLTPETRAITLFPPGRSTENGHPRHGLPGVGVTTSLRPPHHFSPPCFVAALPAAGAAEAPARLSPAIPLEALRDKALRMLGEAVRDGGQHARDPVGGSVEFQFVPVLKLVSTLLVMGIFGDEDVKQILKMIEPEVFTEEEEEEDEEEEGEEEDEEEKEEDEEETAQEKEDEEKEEEEAAEGEKEEGLEEGLLQMKLPESVKLQMCHLLEYFCDQELQHRVESLAAFAERYVDKLQANQRSRYGLLIKAFSMTAAETARRTREFRSPPQEQINMLLQFKDGTDEEDCPLPEEIRQDLLDFHQDLLAHCGIQLDGEEEEPEEETTLGSRLMSLLEKVRLVKKKEEKPEEERSAEESKPRSLQELVSHMVVRWAQEDFVQSPELVRAMFSLLHRQYDGLGELLRALPRAYTISPSSVEDTMSLLECLGQIRSLLIVQMGPQEENLMIQSIGNIMNNKVFYQHPNLMRALGMHETVMEVMVNVLGGGESKEIRFPKMVTSCCRFLCYFCRISRQNQRSMFDHLSYLLENSGIGLGMQGSTPLDVAAASVIDNNELALALQEQDLEKVVSYLAGCGLQSCPMLVAKGYPDIGWNPCGGERYLDFLRFAVFVNGESVEENANVVVRLLIRKPECFGPALRGEGGSGLLAAIEEAIRISEDPARDGPGIRRDRRREHFGEEPPEENRVHLGHAIMSFYAALIDLLGRCAPEMHLIQAGKGEALRIRAILRSLVPLEDLVGIISLPLQIPTLGKDGALVQPKMSASFVPDHKASMVLFLDRVYGIENQDFLLHVLDVGFLPDMRAAASLDTATFSTTEMALALNRYLCLAVLPLITKCAPLFAGTEHRAIMVDSMLHTVYRLSRGRSLTKAQRDVIEDCLMSLCRYIRPSMLQHLLRRLVFDVPILNEFAKMPLKLLTNHYERCWKYYCLPTGWANFGVTSEEELHLTRKLFWGIFDSLAHKKYDPELYRMAMPCLCAIAGALPPDYVDASYSSKAEKKATVDAEGNFDPRPVETLNVIIPEKLDSFINKFAEYTHEKWAFDKIQNNWSYGENIDEELKTHPMLRPYKTFSEKDKEIYRWPIKESLKAMIAWEWTIEKAREGEEEKTEKKKTRKISQSAQTYDPREGYNPQPPDLSAVTLSRELQAMAEQLAENYHNTWGRKKKQELEAKGGGTHPLLVPYDTLTAKEKARDREKAQELLKFLQMNGYAVTRGLKDMELDSSSIEKRFAFGFLQQLLRWMDISQEFIAHLEAVVSSGRVEKSPHEQEIKFFAKILLPLINQYFTNHCLYFLSTPAKVLGSGGHASNKEKEMITSLFCKLAALVRHRVSLFGTDAPAVVNCLHILARSLDARTVMKSGPEIVKAGLRSFFESASEDIEKMVENLRLGKVSQARTQVKGVGQNLTYTTVALLPVLTTLFQHIAQHQFGDDVILDDVQVSCYRTLCSIYSLGTTKNTYVEKLRPALGECLARLAAAMPVAFLEPQLNEYNACSVYTTKSPRERAILGLPNSVEEMCPDIPVLERLMADIGGLAESGARYTEMPHVIEITLPMLCSYLPRWWERGPEAPPSALPAGAPPPCTAVTSDHLNSLLGNILRIIVNNLGIDEASWMKRLAVFAQPIVSRARPELLQSHFIPTIGRLRKRAGKVVSEEEQLRLEAKAEAQEGELLVRDEFSVLCRDLYALYPLLIRYVDNNRAQWLTEPNPSAEELFRMVGEIFIYWSKSHNFKREEQNFVVQNEINNMSFLTADNKSKMAKSGGSDQERTKKKRRGDRYSVQTSLIVATLKKMLPIGLNMCAPTDQDLITLAKTRYALKDTDEEVREFLHNNLHLQGKVEGSPSLRWQMALYRGVPGREEDADDPEKIVRRVQEVSAVLYYLDQTEHPYKSKKAVWHKLLSKQRRRAVVACFRMTPLYNLPTHRACNMFLESYKAAWILTEDHSFEDRMIDDLSKAGEQEEEEEEVEEKKPDPLHQLVLHFSRTALTEKSKLDEDYLYMAYADIMAKSCHLEEGGENGEAEEEVEVSFEEKQMEKQRLLYQQARLHTRGAAEMVLQMISACKGETGAMVSSTLKLGISILNGGNAEVQQKMLDYLKDKKEVGFFQSIQALMQTCSVLDLNAFERQNKAEGLGMVNEDGTVINRQNGEKVMADDEFTQDLFRFLQLLCEGHNNDFQNYLRTQTGNTTTINIIICTVDYLLRLQESISDFYWYYSGKDVIEEQGKRNFSKAMSVAKQVFNSLTEYIQGPCTGNQQSLAHSRLWDAVVGFLHVFAHMMMKLAQDSSQIELLKELLDLQKDMVVMLLSLLEGNVVNGMIARQMVDMLVESSSNVEMILKFFDMFLKLKDIVGSEAFQDYVTDPRGLISKKDFQKAMDSQKQFSGPEIQFLLSCSEADENEMINCEEFANRFQEPARDIGFNVAVLLTNLSEHVPHDPRLHNFLELAESILEYFRPYLGRIEIMGASRRIERIYFEISETNRAQWEMPQVKESKRQFIFDVVNEGGEAEKMELFVSFCEDTIFEMQIAAQISEPEGEPETDEDEGAGAAEAGAEGAEEGAAGLEGTAATAAAGATARVVAAAGRALRGLSYRSLRRRVRRLRRLTAREAATAVAALLWAAVTRAGAAGAGAAAGALGLLWGSLFGGGLVEGAKKVTVTELLAGMPDPTSDEVHGEQPAGPGGDADGEGASEGAGDAAEGAGDEEEAVHEAGPGGADGAVAVTDGGPFRPEGAGGLGDMGDTTPAEPPTPEGSPILKRKLGVDGVEEELPPEPEPEPEPELEPEKADAENGEKEEVPEPTPEPPKKQAPPSPPPKKEEAGGEFWGELEVQRVKFLNYLSRNFYTLRFLALFLAFAINFILLFYKVSDSPPGEDDMEGSAAGDVSGAGSGGSSGWGLGAGEEAEGDEDENMVYYFLEESTGYMEPALRCLSLLHTLVAFLCIIGYNCLKVPLVIFKREKELARKLEFDGLYITEQPEDDDVKGQWDRLVLNTPSFPSNYWDKFVKRKVLDKHGDIYGRERIAELLGMDLATLEITAHNERKPNPPPGLLTWLMSIDVKYQIWKFGVIFTDNSFLYLGWYMVMSLLGHYNNFFFAAHLLDIAMGVKTLRTILSSVTHNGKQLVMTVGLLAVVVYLYTVVAFNFFRKFYNKSEDEDEPDMKCDDMMTCYLFHMYVGVRAGGGIGDEIEDPAGDEYELYRVVFDITFFFFVIVILLAIIQGLIIDAFGELRDQQEQVKEDMETKCFICGIGSDYFDTTPHGFETHTLEEHNLANYMFFLMYLINKDETEHTGQESYVWKMYQERCWDFFPAGDCFRKQYEDQLS

SEQ ID NO: 7092 - protein, 406 aa, Homo sapiens
MDIATGPESLERCFPRGQTDCAKMLDGIKMEEHALRPGPATLGVLLGSDCPHPAVCEGCQRPISDRFLMRVNESSWHEECLQCAACQQALTTSCYFRDRKLYCKQDYQQLFAAKCSGCMEKIAPTEFVMRALECVYHLGCFCCCVCERQLRKGDEFVLKEGQLLCKGDYEKEKDLLSSVSPDESDSVKSEDEDGDMKPAKGQGSQSKGSGDDGKDPRRPKRPRTILTTQQRRAFKASFEVSSKPCRKVRETLAAETGLSVRVVQVWFQNQRAKMKKLARRHQQQQEQQNSQRLGQGEPGPGQGLGQEVLSSRMEGMMASYTPLAPPQQQIVAMEQSPYGSSDPFQQGLTPPQMPGNDSIFHDIDSDTSLTSLSDCFLGSSDVGSLQARVGNPIDRLYSMQSSYFAS

SEQ ID NO: 7093 - protein, 712 aa, Homo sapiens
MENLGVGEGAEACSRLSRSRGRHSMTRAPKHLWRQPRRPIRIQQRFYSDPDKSAGCRERDLSPRPELRKSRLSWPVSSCRRFDLENGLSCGRRALDPQSSPGLGRIMQAPVPHSQRRESFLYRSDSDYELSPKAMSRNSSVASDLHGEDMIVTPFAQVLASLRTVRSNVAALARQQCLGAAKQGPVGNPSSSNQLPPAEDTGQKLALETLDELDWCLDQLETLQTRHSVGEMASNKFKRILNRELTHLSETSRSGNQVSEYISRTFLDQQTEVELPKVTAEEAPQPMSRISGLHGLCHSASLSSATVPRFGVQTDQEEQLAKELEDTNKWGLDVFKVAELSGNRPLTAIIFSIFQERDLLKTFQIPADTLATYLLMLEGHYHANVAYHNSLHAADVAQSTHVLLATPALEAVFTDLEILAALFASAIHDVDHPGVSNQFLINTNSELALMYNDASVLENHHLAVGFKLLQAENCDIFQNLSAKQRLSLRRMVIDMVLATDMSKHMNLLADLKTMVETKKVTSLGVLLLDNYSDRIQVLQNLVHCADLSNPTKPLPLYRQWTDRIMAEFFQQGDRERESGLDISPMCDKHTASVEKSQVGFIDYIAHPLWETWADLVHPDAQDLLDTLEDNREWYQSKIPRSPSDLTNPERDGPDRFQFELTLEEAEEEDEEEEEEGEETALAKEALELPDTELLSPEAGPDPGDLPLDNQRT

SEQ ID NO: 7094 - protein, 646 aa, Homo sapiens
MNECNVHKEGYNELNQYLTTTQSKIFQCDKYVKVFHKLLNSNRHNTKHTGKKPFKCKKCGKSFCMLLHLCQHKRIHIRENSYRCEECGKAFIWFSTLTRHRRVHTGEKSYKYECGKSFNQDSNLTTHKRIHTGQKPYKCEECGTSFYQFSYLTRHKLIHTREKPYKCEQYGKTFNQSSTLTGHKIIHNGEKPYKCEECGKAFSIFSTPTKHKIIHTEEKSHRCEEYCKAYKESSHLTTHKRIHTGEKPYKCEECGKAFSIFSTLTKHKIIHTEEKSHRCEECGKAYKESSHLTTHKRIHTGEKPYKCEECGKTFSVFSILTKHKIIHTEEKPYKCEECGKAFKRSSTLTKHRIIHTEEKPYKCEECGKAFNQSSTLSIHKIIHTGEKPYKCEECGKAFKRSSTLTIHKMIHTGEKPYKCEECGKAFNRSSHLTTHKRIHTGHKPYKCKECGKSFSVFSTLTKHKIIHTDKKPYKCEECGKAFNRSSILSIHKKIHTGEKPYKCEECGKAFKRSSHLAGHKQIHSVQKPYKCEECGKAFSIFSTLTKHKIIHTEEKPYKCEKCGKTFYRFSNLNTHKIIHTGEKPCKCEECGKAFNHSSNLIKHKLIHTGDKPYKCEACGKAFRRSSHLSRHKIIHIGIHTEETVQK

SEQ ID NO: 7095 - protein, 460 aa, Homo sapiens
MAQGSGDQRAVGVADPEESSPNMIVYCKIEDIITKMQDDKTGGVPIRTVKSFLSKIPSVVTGTDIVQWLMKNLSIEDPVEAIHLGSLIAAQGYIFPISDHVLTMKDDGTFYRFQAPYFWPSNCWEPENTDYAIYLCKRTMQNKARLELADYEAENLARLQRAFARKWEFIFMQAEAQVKIDRKKDKTERKILDSQERAFWDVHRPVPGCVNTTEMDIRKCRRLKNPQKVKKSVYGVTEESQAQSPVHVLSQPIRKTTKEDIRKQITFLNAQIDRHCLKMSKVAESLIAYTEQYVEYDPLITPAEPSNPWISDDVALWDIEMSKEPSQQRVKRWGFSFDEILKDQVGRDQFLRFLESEFSSENLRFWLAVQDLKKQPLQDVAKRVEEIWQEFLAPGAPSAINLDSHSYEITSQNVKDGGRYTFEDAQEHIYKLMKSDSYARFLRSNAYQDLLLAKKKVWLL

SEQ ID NO: 7096 - protein, 287 aa, Homo sapiens
MDPKQTTLLCLVLCLGQRIQAQEGDFPMPFISAKSSPVIPLDGSVKIQCQAIREAYLTQLMIIKNSTYREIGRRLKFWNETDPEFVIDHMDANKAGRYQCQYRIGHYRFRYSDTLELVVTGLYGKPFLSADRGLVLMPGENISLTCSSAHIPFDRFSLAKEGELSLPQHQSGEHPANFSLGPVDLNVSGIYRCYGWYNRSPYLWSFPSNALELVVTDSIHQDYTTQNLIRMAVAGLVLVALLAILVENWHSHTALNKEASADVAEPSWSQQMCQPGLTFARTPSVCK

SEQ ID NO: 7097 - protein, 414 aa, Homo sapiens
MGGLSARPTAGRTDPAGTCWGQDPGSKMATVIPGPLSLGEDFYREAIEHCRSYNARLCAERSLRLPFLDSQTGVAQNNCYIWMEKTHRGPGLAPGQIYTYPARCWRKKRRLNILEDPRLRPCEYKIDCEAPLKKEGGLPEGPVLEALLCAETGEKKIELKEEETIMDCQKQQLLEFPHDLEVEDLEDDIPRRKNRAKGKAYGIGGLRKRQDTASLEDRDKPYVCDICGKRYKNRPGLSYHYTHTHLAEEEGEENAERHALPFHRKNNHKQFYKELAWVPEAQRKHTAKKAPDGTVIPNGYCDFCLGGSKKTGCPEDLISCADCGRSGHPSCLQFTVNMTAAVRTYRWQCIECKSCSLCGTSENDDQLLFCDDCDRGYHMYCLSPPMAEPPEGSWSCHLCLRHLKEKASAYITLT

SEQ ID NO: 7098 - protein, 475 aa, Homo sapiens
MAAKSQPNIPKAKSLDGVTNDRTASQGQWGRAWEVDWFSLASVIFLLLFAPFIVYYFIMACDQYSCALTGPVVDIVTGHARLSDIWAKTPPITRKAAQLYTLWVTFQVLLYTSLPDFCHKFLPGYVGGIQEGAVTPAGVVNKYQINGLQAWLLTHLLWFANAHLLSWFSPTIIFDNWIPLLWCANILGYAVSTFAMVKGYFFPTSARDCKFTGNFFYNYMMGIEFNPRIGKWFDFKLFFNGRPGIVAWTLINLSFAAKQRELHSHVTNAMVLVNVLQAIYVIDFFWNETWYLKTIDICHDHFGWYLGWGDCVWLPYLYTLQGLYLVYHPVQLSTPHAVGVLLLGLVGYYIFRVANHQKDLFRRTDGRCLIWGRKPKVIECSYTSADGQRHHSKLLVSGFWGVARHFNYVGDLMGSLAYCLACGGGHLLPYFYIIYMAILLTHRCLRDEHRCASKYGRDWERYTAAVPYRLLPGIF

SEQ ID NO: 7099 - protein, 1192 aa, Homo sapiens
MALSDEPAAGGPEEEAEDETLAFGAALEAFGESAETRALLGRLREVHGGGAEREVALERFRVIMDKYQEQPHLLDPHLEWMMNLLLDIVQDQTSPASLVHLAFKFLYIITKVRGYKTFLRLFPHEVADVEPVLDLVTIQNPKDHEAWETRYMLLLWLSVTCLIPFDFSRLDGNLLTQPGQARMSIMDRILQIAESYLIVSDKARDAAAVLVSRFITRPDVKQSKMAEFLDWSLCNLARSSFQTMQGVITMDGTLQALAQIFKHGKREDCLPYAATVLRCLDGCRLPESNQTLLRKLGVKLVQRLGLTFLKPKVAAWRYQRGCRSLAANLQLLTQGQSEQKPLILTEDDDEDDDVPEGVERVIEQLLVGLKDKDTVVRWSAAKGIGRMAGRLPRALADDVVGSVLDCFSFQETDKAWHGGCLALAELGRRGLLLPSRLVDVVAVILKALTYDEKRGACSVGTNVRDAACYVCWAFARAYEPQELKPFVTAISSALVIAAVFDRDINCRRAASAAFQENVGRQGTFPHGIDILTTADYFAVGNRSNCFLVISVFIAGFPEYTQPMIDHLVTMKISHWDGVIRELAARALHNLAQQAPEFSATQVFPRLLSMTLSPDLHMRHGSILACAEVAYALYKLAAQENRPVTDHLDEQAVQGLKQIHQQLYDRQLYRGLGGQLMRQAVCVLIEKLSLSKMPFRGDTVIDGWQWLINDTLRHLHLISSHSRQQMKDAAVSALAALCSEYYMKEPGEADPAIQEELITQYLAELRNPEEMTRCGFSLALGALPGFLLKGRLQQVLTGLRAVTHTSPEDVSFAESRRDGLKAIARICQTVGVKAGAPDEAVCGENVSQIYCALLGCMDDYTTDSRGDVGTWVRKAAMTSLMDLTLLLARSQPELIEAHTCERIMCCVAQQASEKIDRFRAHAASVFLTLLHFDSPPIPHVPHRGELEKLFPRSDVASVNWSAPSQAFPRITQLLGLPTYRYHVLLGLVVSLGGLTESTIRHSTQSLFEYMKGIQSDPQALGSFSGTLLQIFEDNLLNERVSVPLLKTLDHVLTHGCFDIFTTEEDHPFAVKLLALCKKEIKNSKDIQKLLSGIAVFCEMVQFPGDVRRQALLQLCLLLCHRFPLIRKTTASQVYETLLTYSDVVGADVLDEVVTVLSDTAWDAELAVVREQRNRLCDLLGVPRPQLVPQPGAC

SEQ ID NO: 7100 - protein, 512 aa, Homo sapiens
MAGGMSAECPEPGPGGLQGQSPGPGRQCPPPITPTSWSLPPWRAYVAAAVLCYINLLNYMNWFIIAGVLLDIQEVFQISDNHAGLLQTVFVSCLLLSAPVFGYLGDRHSRKATMSFGILLWSGAGLSSSFISPRYSWLFFLSRGIVGTGSASYSTIAPTVLGDLFVRDQRTRVLAVFYIFIPVGSGLGYVLGSAVTMLTGNWRWALRVMPCLEAVALILLILLVPDPPRGAAETQGEGAVGGFRSSWCEDVRYLGKNWSFVWSTLGVTAMAFVTGALGFWAPKFLLEARVVHGLQPPCFQEPCSNPDSLIFGALTIMTGVIGVILGAEAARRYKKVIPGAEPLICASSLLATAPCLYLALVLAPTTLLASYVFLGLGELLLSCNWAVVADILLSVVVPRCRGTAEALQITVGHILGDAGSPYLTGLISSVLRARRPDSYLQRFRSLQQSFLCCAFVIALGGGCFLLTALYLERDETRAWQPVTGTPDSNDVDSNDLERQGLLSGAGASTEEP

SEQ ID NO: 7101 - protein, 1300 aa, Homo sapiens
MEEASLCLGVSSAEPEAEPHLSGPVLNGQYAMSQKLHQITSQLSHAFPELHPRPNPEEKPPASLEEKAHVPMSGQPMGSQMALLANQLGREVDTSLNGRVDLQQFLNGQNLGIMSQMSDIEDDARKNRKYPCPLCGKRFRFNSILSLHMRTHTGEKPFKCPYCDHRAAQKGNLKIHLRTHKLGNLGKGRGRVREENRLLHELEERAILRDKQLKGSLLQPRPDLKPPPHAQQAPLAACTLALQANHSVPDVAHPVPSPKPASVQEDAVAPAAGFRCTFCKGKFKKREELDRHIRILHKPYKCTLCDFAASQEEELISHVEKAHITAESAQGQGPNGGGEQSANEFRCEVCGQVFSQAWFLKGHMRKHKDSFEHCCQICGRRFKEPWFLKNHMKVHLNKLSVKNKSPSDPEVPVPMGGMSQEAHANLYSRYLSCLQSGFMTPDKAGLSEPSQLYGKGELPMKEKEALGKLLSPISSMAHGVPEGDKHSLLGCLNLVPPLKSSCIERLQAAAKAAEMDPVNSYQAWQLMARGMAMEHGFLSKEHPLQRNHEDTLANAGVLFDKEKREYVLVGADGSKQKMPADLVHSTKVGSQRDLPSKLDPLESSRDFLSHGLNQTLEYNLQGPGNMKEKPTECPDCGRVFRTYHQVVVHSRVHKRDRKGEEDGLHVGLDERRGSGSDQESQSVSRSTTPGSSNVTEESGVGGGLSQTGSAQEDSPHPSSPSSSDIGEEAGRSAGVQQPALLRDRSLGSAMKDCPYCGKTFRTSHHLKVHLRIHTGEKPYKCPHCDYAGTQSASLKYHLERHHRERQNGAGPLSGQPPNQDHKDEMSSKASLFIRPDILRGAFKGLPGIDFRGGPASQQWTSGVLSSGDHSGQATGMSSEVPSDALKGTDLPSKSTHFSEIGRAYQSIVSNGVNFQGSLQAFMDSFVLSSLKKEKDMKDKALADPPSMKVHGVDGGEEKPSGKSSQRKSEKSQYEPLDLSVRPDAASLPGSSVTVQDSIAWHGCLFCAFTTSSMELMALHLQANHLGKAKRKDNTIGVTVNCKDQAREASKMALLPSLQSNKDLGLSNMISSLDSASEKMAQGQLKETLGEQKSGAWTGHVDPAFCNFPSDFYKQFGVYPGMVGSGASSSCPNKEPDGKAHSEEDVPILIPETTSKNTTDDLSDIASSEDMDSSKGENNDEEDVETEPEMMTKPLSALSKDSSSDGGDSLQPTGTSQPVQGLVSPLSQAPEKQWHSQGLLQAQDPLAGLPKPERGPQSLDKPMNMLSVLRAYSSDGLAAFNGLASSTANSGCIKRPDLCGK

SEQ ID NO: 7102 - protein, 3830 aa, Homo sapiens
MAFVATQGATVVDQTTLMKKYLQFVAALTDVNTPDETKLKMMQEVSENFENVTSSPQYSTFLEHIIPRFLTFLQDGEVQFLQEKPAQQLRKLVLEIIHRIPTNEHLRPHTKNVLSVMFRFLETENEENVLICLRIIIELHKQFRPPITQEIHHFLDFVKQIYKELPKVVNRYFENPQVIPENTVPPPEMVGMITTIAVKVNPEREDSETRTHSIIPRGSLSLKVLAELPIIVVLMYQLYKLNIHNVVAEFVPLIMNTIAIQVSAQARQHKLYNKELYADFIAAQIKTLSFLAYIIRIYQELVTKYSQQMVKGMLQLLSNCPAETAHLRKELLIAAKHILTTELRNQFIPCMDKLFDESILIGSGYTARETLRPLAYSTLADLVHHVRQHLPLSDLSLAVQLFAKNIDDESLPSSIQTMSCKLLLNLVDCIRSKSEQESGNGRDVLMRMLEVFVLKFHTIARYQLSAIFKKCKPQSELGAVEAALPGVPTAPAAPGPAPSPAPVPAPPPPPPPPPPATPVTPAPVPPFEKQGEKDKEDKQTFQVTDCRSLVKTLVCGVKTITWGITSCKAPGEAQFIPNKQLQPKETQIYIKLVKYAMQALDIYQVQIAGNGQTYIRVANCQTVRMKEEKEVLEHFAGVFTMMNPLTFKEIFQTTVPYMVERISKNYALQIVANSFLANPTTSALFATILVEYLLDRLPEMGSNVELSNLYLKLFKLVFGSVSLFAAENEQMLKPHLHKIVNSSMELAQTAKEPYNYFLLLRALFRSIGGGSHDLLYQEFLPLLPNLLQGLNMLQSGLHKQHMKDLFVELCLTVPVRLSSLLPYLPMLMDPLVSALNGSQTLVSQGLRTLELCVDNLQPDFLYDHIQPVRAELMQALWRTLRNPADSISHVAYRVLGKFGGSNRKMLKESQKLHYVVTEVQGPSITVEFSDCKASLQLPMEKAIETALDCLKSANTEPYYRRQAWEVIKCFLVAMMSLEDNKHALYQLLAHPNFTEKTIPNVIISHRYKAQDTPARKTFEQALTGAFMSAVIKDLRPSALPFVASLIRHYTMVAVAQQCGPFLLPCYQVGSQPSTAMFHSEENGSKGMDPLVLIDAIAICMAYEEKELCKIGEVALAVIFDVASIILGSKERACQLPLFSYIVERLCACCYEQAWYAKLGGVVSIKFLMERLPLTWVLQNQQTFLKALLFVMMDLTGEVSNGAVAMAKTTLEQLLMRCATPLKDEERAEEIVAAQEKSFHHVTHDLVREVTSPNSTVRKQAMHSLQVLAQVTGKSVTVIMEPHKEVLQDMVPPKKHLLRHQPANAQIGLMEGNTFCTTLQPRLFTMDLNVVEHKVFYTELLNLCEAEDSALTKLPCYKSLPSLVPLRIAALNALAACNYLPQSREKIIAALFKALNSTNSELQEAGEACMRKFLEGATIEVDQIHTHMRPLLMMLGDYRSLTLNVVNRLTSVTRLFPNSFNDKFCDQMMQHLRKWMEVVVITHKGGQRSDGNEMKICSAIINLFHLIPAAPQTLVKPLLEVVMKTERAMLIEAGSPFREPLIKFLTRHPSQTVELFMMEATLNDPQWSRMFMSFLKHKDARPLRDVLAANPNRFITLLLPGGAQTAVRPGSPSTSTMRLDLQFQAIKIISIIVKNDDSWLASQHSLVSQLRRVWVSENFQERHRKENMAATNWKEPKLLAYCLLNYCKRNYGDIELLFQLLRAFTGRFLCNMTFLKEYMEEEIPKNYSIAQKRALFFRFVDFNDPNFGDELKAKVLQHILNPAFLYSFEKGEGEQLLGPPNPEGDNPESITSVFITKVLDPEKQADMLDSLRIYLLQYATLLVEHAPHHIHDNNKNRNSKLRRLMTFAWPCLLSKACVDPACKYSGHLLLAHIIAKFAIHKKIVLQVFHSLLKAHAMEARAIVRQAMAILTPAVPARMEDGHQMLTHWTRKIIVEEGHTVPQLVHILHLIVQHFKVYYPVRHHLVQHMVSAMQRLGFTPSVTIEQRRLAVDLSEVVIKWELQRIKDQQPDSDMDPNSSGEGVNSVSSSIKRGLSVDSAQEVKRFRTATGAISAVFGRSQSLPGADSLLAKPIDKQHTDTVVNFLIRVACQVNDNTNTAGSPGEVLSRRCVNLLKTALRPDMWPKSELKLQWFDKLLMTVEQPNQVNYGNICTGLEVLSFLLTVLQSPAILSSFKPLQRGIAACMTCGNTKVLRAVHSLLSRLMSIFPTEPSTSSVASKYEELECLYAAVGKVIYEGLTNYEKATNANPSQLFGTLMILKSACSNNPSYIDRLISVFMRSLQKMVREHLNPQAASGSTEATSGTSELVMLSLELVKTRLAVMSMEMRKNFIQAILTSLIEKSPDAKILRAVVKIVEEWVKNNSPMAANQTPTLREKSILLVKMMTYIEKRFPEDLELNAQFLDLVNYVYRDETLSGSELTAKLEPAFLSGLRCAQPLIRAKFFEVFDNSMKRRVYERLLYVTCSQNWEAMGNHFWIKQCIELLLAVCEKSTPIGTSCQGAMLPSITNVINLADSHDRAAFAMVTHVKQEPRERENSESKEEDVEIDIELAPGDQTSTPKTKELSEKDIGNQLHMLTNRHDKFLDTLREVKTGALLSAFVQLCHISTTLAEKTWVQLFPRLWKILSDRQQHALAGEISPFLCSGSHQVQRDCQPSALNCFVEAMSQCVPPIPIRPCVLKYLGKTHNLWFRSTLMLEHQAFEKGLSLQIKPKQTTEFYEQESITPPQQEILDSLAELYSLLQEEDMWAGLWQKRCKYSETATAIAYEQHGFFEQAQESYEKAMDKAKKEHERSNASPAIFPEYQLWEDHWIRCSKELNQWEALTEYGQSKGHINPYLVLECAWRVSNWTAMKEALVQVEVSCPKEMAWKVNMYRGYLAICHPEEQQLSFIERLVEMASSLAIREWRRLPHVVSHVHTPLLQAAQQIIELQEAAQINAGLQPTNLGRNNSLHDMKTVVKTWRNRLPIVSDDLSHWSSIFMWRQHHYQAIVTAYENSSQHDPSSNNAMLGVHASASAIIQYGKIARKQGLVNVALDILSRIHTIPTVPIVDCFQKIRQQVKCYLQLAGVMGKNECMQGLEVIESTNLKYFTKEMTAEFYALKGMFLAQINKSEEANKAFSAAVQMHDVLVKAWAMWGDYLENIFVKERQLHLGVSAITCYLHACRHQNESKSRKYLAKVLWLLSFDDDKNTLADAVDKYCIGVPPIQWLAWIPQLLTCLVGSEGKLLLNLISQVGRVYPQAVYFPIRTLYLTLKIEQRERYKSDPGPIRATAPMWRCSRIMHMQRELHPTLLSSLEGIVDQMVWFRENWHEEVLRQLQQGLAKCYSVAFEKSGAVSDAKITPHTLNFVKKLVSTFGVGLENVSNVSTMFSSAASESLARRAQATAQDPVFQKLKGQFTTDFDFSVPGSMKLHNLISKLKKWIKILEAKTKQLPKFFLIEEKCRFLSNFSAQTAEVEIPGEFLMPKPTHYYIKIARFMPRVEIVQKHNTAARRLYIRGHNGKIYPYLVMNDACLTESRREERVLQLLRLLNPCLEKRKETTKRHLFFTVPRVVAVSPQMRLVEDNPSSLSLVEIYKQRCAKKGIEHDNPISRYYDRLATVQARGTQASHQVLRDILKEVQSNMVPRSMLKEWALHTFPNATDYWTFRKMFTIQLALIGFAEFVLHLNRLNPEMLQIAQDTGKLNVAYFRFDINDATGDLDANRPVPFRLTPNISEFLTTIGVSGPLTASMIAVARCFAQPNFKVDGILKTVLRDEIIAWHKKTQEDTSSPLSAAGQPENMDSQQLVSLVQKAVTAIMTRLHNLAQFEGGESKVNTLVAAANSLDNLCRMDPAWHPWL

SEQ ID NO: 7103 - protein, 505 aa, Homo sapiens
MEKAADLQDTASLTLKFKFNPKLGIDNPVLSLAEDHDPYDPWSLERPRFCLLSKEEGKSFGFHLQQELGRAGHVVCRVDPGTSAQRQGLQEGDRILAVNNDVVEHEDYAVVVRRIRASSPRVLLTVLARHAHDVARAQLGEDAHLCPTLGPGVRPRLCHIVKDEGGFGFSVTHGNQGPFWLVLSTGGAAERAGVPPGARLLEVNGVSVEKFTHNQLTRKLWQSGQQVTLLVAGPEVEEQCRQLGLPLAAPLAEGWALPTKPRCLHLEKGPQGFGFLLREEKGLDGRPGQFLWEVDPGLPAKKAGMQAGDRLVAVAGESVEGLGHEETVSRIQGQGSCVSLTVVDPEADRFFSMVRLSPLLFLENTEAPASPRGSSSASLVETEDPSLEDTSVPSVPLGSRQCFLYPGPGGSYGFRLSCVASGPRLFISQVTPGGSAARAGLQVGDVILEVNGYPVGGQNDLERLQQLPEAEPPLCLKLAARSLRGLEAWIPPGAAEDWALASDLL

SEQ ID NO: 7104 - protein, 516 aa, Homo sapiens
MLGKLAMLLWVQQALLALLLPTLLAQGEARRSRNTTRPALLRLSDYLLTNYRKGVRPVRDWRKPTTVSIDVIVYAILNVDEKNQVLTTYIWYRQYWTDEFLQWNPEDFDNITKLSIPTDSIWVPDILINEFVDVGKSPNIPYVYIRHQGEVQNYKPLQVVTACSLDIYNFPFDVQNCSLTFTSWLHTIQDINISLWRLPEKVKSDRSVFMNQGEWELLGVLPYFREFSMESSNYYAEMKFYVVIRRRPLFYVVSLLLPSIFLMVMDIVGFYLPPNSGERVSFKITLLLGYSVFLIIVSDTLPATAIGTPLIGKAPPGSRAQSGEKPAPSHLLHVSLASALGCTGVYFVVCMALLVISLAETIFIVRLVHKQDLQQPVPAWLRHLVLERIAWLLCLREQSTSQRPPATSQATKTDDCSAMGNHCSHMGGPQDFEKSPRDRCSPPPPPREASLAVCGLLQELSSIRQFLEKRDEIREVARDWLRVGSVLDKLLFHIYLLAVLAYSITLVMLWSIWQYA

SEQ ID NO: 7105 - protein, 457 aa, Homo sapiens
MSQGSVTFRDVAIDFSQEEWKWLQPAQRDLYRCVMLENYGHLVSLGLSISKPDVVSLLEQGKEPWLGKREVKRDLFSVSESSGEIKDFSPKNVIYDDSSQYLIMERILSQGPVYSSFKGGWKCKDHTEMLQENQGCIRKVTVSHQEALAQHMNISTVERPYGCHECGKTFGRRFSLVLHQRTHTGEKPYACKECGKTFSQISNLVKHQMIHTGKKPHECKDCNKTFSYLSFLIEHQRTHTGEKPYECTECGKAFSRASNLTRHQRIHIGKKQYICRKCGKAFSSGSELIRHQITHTGEKPYECIECGKAFRRFSHLTRHQSIHTTKTPYECNECRKAFRCHSFLIKHQRIHAGEKLYECDECGKVFTWHASLIQHTKSHTGEKPYACAECDKAFSRSFSLILHQRTHTGEKPYVCKVCNKSFSWSSNLAKHQRTHTLDNPYEYENSFNYHSFLTEHQ

SEQ ID NO: 7106 - protein, 497 aa, Homo sapiens
MPHPRRYHSSERGSRGSYREHYRSRKHKRRRSRSWSSSSDRTRRRRREDSYHVRSRSYDDRSSDRRVYDRRYCGSYRRNDYSRDRGDAYYDTDYRHSYEYQRENSSYRSQRSSRRKHRRRRRRSRTFSRSSSHSSRRAKSVEDDAEGHLIYHVGDWLQERYEIVSTLGEGTFGRVVQCVDHRRGGARVALKIIKNVEKYKEAARLEINVLEKINEKDPDNKNLCVQMFDWFDYHGHMCISFELLGLSTFDFLKDNNYLPYPIHQVRHMAFQLCQAVKFLHDNKLTHTDLKPENILFVNSDYELTYNLEKKRDERSVKSTAVRVVDFGSATFDHEHHSTIVSTRHYRAPEVILELGWSQPCDVWSIGCIIFEYYVGFTLFQTHDNREHLAMMERILGPIPSRMIRKTRKQKYFYRGRLDWDENTSAGRYVRENCKPLRRYLTSEAEEHHQLFDLIESMLEYEPAKRLTLGEALQHPFFARLRAEPPNKLWDSSRDISR

SEQ ID NO: 7107 - protein, 708 aa, Homo sapiens
MDKYDVIKAIGQGAFGKAYLAKGKSDSKHCVIKEINFEKMPIQEKEASKKEVILLEKMKHPNIVAFFNSFQENGRLFIVMEYCDGGDLMKRINRQRGVLFSEDQILGWFVQISLGLKHIHDRKILHRDIKAQNIFLSKNGMVAKLGDFGIARVLNNSMELARTCIGTPYYLSPEICQNKPYNNKTDIWSLGCVLYELCTLKHPFEGNNLQQLVLKICQAHFAPISPGFSRELHSLISQLFQVSPRDRPSINSILKRPFLENLIPKYLTPEVIQEEFSHMLICRAGAPASRHAGKVVQKCKIQKVRFQGKCPPRSRISVPIKRNAILHRNEWRPPAGAQKARSIKMIERPKIAAVCGHYDYYYAQLDMLRRRAHKPSYHPIPQENTGVEDYGQETRHGPSPSQWPAEYLQRKFEAQQYKLKVEKQLGLRPSSAEPNYNQRQELRSNGEEPRFQELPFRKNEMKEQEYWKQLEEIRQQYHNDMKEIRKKMGREPEENSKISHKTYLVKKSNLPVHQDASEGEAPVQMEFRSCCPGWSAMARSWLTATSASQDIEKDLKQMRLQNTKESKNPEQKYKAKKGVKFEINLDKCISDENILQEEEAMDIPNETLTFEDGMKFKEYECVKEHGDYTDKAFEKLHCPEAGFSTQTVAAVGNRRQWDGGAPQTLLQMMAVADITSTCPTGPDSESVLSVSRQEGKTKDPYSPVLILM

SEQ ID NO: 7108 - protein, 970 aa, Homo sapiens
MAQLERSAISGFSSKSRRNSFAYDVKREVYNEETFQQEHKRKASSSGNMNINITTFRHHVQCRCSWHRFLRCVLTIFPFLEWMCMYRLKDWLLGDLLAGISVGLVQVPQGLTLSLLARQLIPPLNIAYAAFCSSVIYVIFGSCHQMSIGSFFLVSALLINVLKVSPFNNGQLVMGSFVKNEFSAPSYLMGYNKSLSVVATTTFLTGIIQLIMGVLGLGFIATYLPESAMSAYLAAVALHIMLSQLTFIFGIMISFHAGPISFFYDIINYCVALPKANSTSILVFLTVVVALRINKCIRISFNQYPIEFPMELFLIIGFTVIANKISMATETSQTLIDMIPYSFLLPVTPDFSLLPKIILQAFSLSLVSSFLLIFLGKKIASLHNYSVNSNQDLIAIGLCNVVSSFFRSCVFTGAIARTIIQDKSGGRQQFASLVGAGVMLLLMVKMGHFFYTLPNAVLAGIILSNVIPYLETISNLPSLWRQDQYDCALWMMTFSSSIFLGLDIGLIISVVSAFFITTVRSHRAKILLLGQIPNTNIYRSINDYREIITIPGVKIFQCCSSITFVNVYYLKHKLLKEVDMVKVPLKEEEIFSLFNSSDTNLQGGKICRCFCNCDDLEPLPRILYTERFENKLDPEASSINLIHCSHFESMNTSQTASEDQVPYTVSSVSQKNQGQQYEEVEEVWLPNNSSRNSSPGLPDVAESQGRRSLIPYSDASLLPSVHTIILDFSMVHYVDSRGLVVLRQICNAFQNANILILIAGCHSSIVRAFERNDFFDAGITKTQLFLSVHDAVLFALSRKVIGSSELSIDESETVIRETYSETDKNDNSRYKMSSSFLGSQKNVSPGFIKIQQPVEEESELDLELESEQEAGLGLDLDLDRELEPEMEPKAETETKTQTEMEPQPETEPEMEPNPKSRPRAHTFPQQRYWPMYHPSMASTQSQTQTRTWSVERRRHPMDSYSPEGNSNEDV

SEQ ID NO: 7109 - protein, 1496 aa, Homo sapiens
MALSKGLRLLGRLGAEGDCSVLLEARGRDDCLLFEAGTVATLAPEEKEVIKGQYGKLTDAYGCLGELRLKSGGTSLSFLVLVTGCTSVGRIPDAEIYKITATDFYPLQEEAKEEERLIALKKILSSGVFYFSWPNDGSRFDLTVRTQKQGDDSSEWGNSFFWNQLLHVPLRQHQVSCCDWLLKIICGVVTIRTVYASHKQAKACLVSRVSCERTGTRFHTRGVNDDGHVSNFVETEQMIYMDDGVSSFVQIRGSVPLFWEQPGLQVGSHHLRLHRGLEANAPAFDRHMVLLKEQYGQQVVVNLLGSRGGEEVLNRAFKKLLWASCHAGDTPMINFDFHQFAKGGKLEKLETLLRPQLKLHWEDFDVFTKGENVSPRFQKGTLRMNCLDCLDRTNTVQSFIALEVLHLQLKTLGLSSKPIVDRFVESFKAMWSLNGHSLSKVFTGSRALEGKAKVGKLKDGARSMSRTIQSNFFDGVKQEAIKLLLVGDVYGEEVADKGGMLLDSTALLVTPRILKAMTERQSEFTNFKRIRIAMGTWNVNGGKQFRSNVLRTAELTDWLLDSPQLSGATDSQDDSSPADIFAVGFEEMVELSAGNIVNASTTNKKMWGEQLQKAISRSHRYILLTSAQLVGVCLYIFVRPYHVPFIRDVAIDTVKTGMGGKAGNKGAVGIRFQFHSTSFCFICSHLTAGQSQVKERNEDYKEITQKLCFPMGRNVFSHDYVFWCGDFNYRIDLTYEEVFYFVKRQDWKKLLEFDQLQLQKSSGKIFKDFHEGAINFGPTYKYDVGSAAYDTSDKCRTPAWTDRVLWWRKKHPFDKTAGELNLLDSDLDVDTKVRHTWSPGALQYYGRAELQASDHRPVLAIVEVEVQEVDVGARERVFQEVSSFQGPLDATVVVNLQSPTLEEKNEFPEDLRTELMQTLGSYGTIVLVRINQGQMLVTFADSHSALSVLDVDGMKVKGRAVKIRPKTKDWLKGLREEIIRKRDSMAPVSPTANSCLLEENFDFTSLDYESEGDILEDDEDYLVDEFNQPGVSDSELGGDDLSDVPGPTALAPPSKSPALTKKKQHPTYKDDADLVELKRELEAVGEFRHRSPSRSLSVPNRPRPPQPPQRPPPPTGLMVKKSASDASISSGTHGQYSILQTARLLPGAPQQPPKARTGISKPYNVKQIKTTNAQEAEAAIRCLLEARGGASEEALSAVAPRDLEASSEPEPTPGAAKPETPQAPPLLPRRPPPRVPAIKKPTLRRTGKPLSPEEQFEQQTVHFTIGPPETSVEAPPVVTAPRVPPVPKPRTFQPGKAAERPSHRKPASDEAPPGAGASVPPPLEAPPLVPKVPPRRKKSAPAAFHLQVLQSNSQLLQGLTYNSSDSPSGHPPAAGTVFPQGDFLSTSSATSPDSDGTKAMKPEAAPLLGDYQDPFWNLLHHPKLLNNTWLSKSSDPLDSGTRSPKRDPIDPVSAGASAAKAELPPDHEHKTLGHWVTISDQEKRTALQVFDPLAKT

SEQ ID NO: 7110 - protein, 1001 aa, Homo sapiens
MKRIFSCSSTQVAVERWNRHDQKLLEAVHRGDVGRVAALASRKSARPTKLDSNGQSPFHLAASKGLTECLTILLANGADINSKNEDGSTALHLATISCQPQCVKVLLQHGANEDAVDAENRSPLHWAASSGCASSVLLLCDHEAFLDVLDNDGRTPLMIASLGGHAAICSQLLQRGARVNVTDKNDKSALILACEKGSAEVAELLLSHGADAGAVDSTGHDALHYALHTQDKALWRHLQQALSRRRRGGQRLVQHPDLASQASPSEPQAGSPPKSSWRAEPEEEQEEKEDEDPCSEEWRWKYEEERRKVVRLEQELVQKTEECKTQAAAYLDLENQIREQAQELGVLLSWEPRASGKQGSSLRPGGDGMEQGCPKDLLAESTQELKKQQQAAATVNPVLAPKKAEDSAPGKIQYEVHGRSQPEEQGPPQSPASETIRKATGQQLTTNGAQTFGPDHADQLPAGQKESSQVLGVEPGGTVAEPVGPAAMNQLLLQLREELAAVWREKDAARGALSRPVMEGALGTPRAEAAAAAWEKMEARLERVLARLEWAKAGLQVKPEVPSQESREGALKAAPGSIKQDEEKEKRVPGAQGEPLGALGGEKALGGLAKGQLEKEMSVLRLSNSNLLEELGELGRERQRLQRELQSLSQRLQREFVPKPQAQVQLQQLRQSVGLLTNELAMEKEATEKLRKLLASQSSGLRGLWDCLPADLVGERSAQSKAAESLEELRACISTLVDRHREAQQVLARLQEENQQLRGSLSPCREPGTSLKAPASPQVAALEQDLGKLEEELRAVQATMSGKSQEIGKLKQLLYQATEEVAELRAREAASLRQHEKTRGSLVAQAQAWGQELKALLEKYNTACREVGRLREAVAEERRRSGDLAAQAAEQERQASEMRGRSEQFEKTAELLKEKMEHLIGACRDKEAKIKELLKKLEQLSEEVLAIRGENARLALQLQDSQKNHEEIISTYRNHLLNAARGYMEHEVYNILLQILSMEEE

SEQ ID NO: 7111 - protein, 937 aa, Homo sapiens
MLLYRGAPAGPGAPGCGLARPGGGPQAFGIRLSTMSPRYLQSNSSSHTRPFSAIAELLDNAVDPDVSARTVFIDVEEVKNKSCLTFTDDGCGMTPHKLHRMLSFGFTDKVIKKSQCPIGVFGNGFKSGSMRLGKDALVFTKNGGTLTVGLLSQTYLECVQAQAVIVPIVPFNQQNKKMIITEDSLPSLEAILNYSIFNRENDLLAQFDAIPGKKGTRVLIWNIRRNKNGKSELDFDTDQYDILVSDFDTEEKMTGGVTSELPETEYSLRAFCGILYMKPRMKIFLRQKKVTTQMIAKSLANVEYDTYKPTFTNKQVRITFGFSCKNSNQFGIMMYHNNRLIKSFEKVGCQVKPTRGEGVGVIGVIECNFLKPAYNKQDFEYTKEYRLTINALAQKLNAYWKEKTSQDNFETSTVARPIPKVPDQTWVQCDECLKWRKLPGKIDPSMLPARWFCYYNSHPKYRRCSVPEEQELTDEDLCLSKAKKQEQTVEEKKKMPMENENHQVFSNPPKILTVQEMAGLNNKTIGYEGIHSPSVLPSGGEESRSPSLQLKPLDSSVLQFSSKYKWILGEEPVEKRRRLQNEMTTPSLDYSMPAPYRRVEAPVAYPEGENSHDKSSSERSTPPYLFPEYPEASKNTGQNREVSILYPGAKDQRQGSLLPEELEDQMPRLVAEESNRGSTTINKEEVNKGPFVAVVGVAKGVRDSGAPIQLIPFNREELAERRKAVESWNPVPYSVASAAIPAAAIGEKARGYEESEGHNTPKLKNQRELEELKRTTEKLERVLAERNLFQQKVEELEQERNHWQSEFKKVQHELVIYSTQEAEGLYWSKKHMGYRQAEFQILKAELERTKEEKQELKEKLKETETHLEMLQKAQVSYRTPEGDDLERALAKLTRLRIHVSYLLTSVLPHLELREIGYDSEQVDGILYTVLEANHILD

SEQ ID NO: 7112 - protein, 491 aa, Homo sapiens
MDTKGCTTTNSPSTPCQNCSRITNVSTISSNNGCHPGGLTVNNCQPAGHVLRIPWDQGCQPTPRFCRKPIYLMNNFNARFSLDDCSWYGEGINSNEKETMQILNERLANYLQKVRMLERENAELESKIQEESNKELPVLCPDYLSYYTTIEELQQKILCTKAENSRLVSQIDNTKLTADDLRAKYEAEVSLRQLVESDANGLKQILNVLTLGKADLEAQVQSLKEELLCLKNNHKEEINSLQCQLGERLDIEVTAAPSADLNQVLQEMRCQYEPIMETNRKDVEQWFNTQIEELNQQVVTSSQQQQCCQKEIIELRRSVNTLEVELQAQHRMRDSQECILTETEARYTALLTQIQSLIDNLEAQLAEIRCALERQNQEYEILLDVKSRLECEITTYRSLLESSDGKRPCYPRATKCEPSPWTSCKSGAIESTAPACTSSSPCSLKEHCSACGPLSRILVKICTITKEIKDGKVISSYEHVQPCFIIRPAKV

SEQ ID NO: 7113 - protein, 428 aa, Homo sapiens
MKRGGRDSDRNSSEEGTAEKSKKLRTTNEHSQTCDWGNLLQDIILQVFKYLPLLDRAHASQVCRNWNQVFHMPDLWRCFEFELNQPATSYLKATHPELIKQIIKRHSNHLQYVSFKVDSSKESAEAACDILSQLVNCSLKTLGLISTARPSFMDLPKSHFISALTVVFVNSKSLSSLKIDDTPVDDPSLKVLVANNSDTLKLLKMSSCPHVSPAGILCVADQCHGLRELALNYHLLSDELLLALSSEKHVRLEHLRIDVVSENPGQTHFHTIQKSSWDAFIRHSPKVNLVMYFFLYEEEFDPFFRYEIPATHLYFGRSVSKDVLGRVGMTCPRLVELVVCANGLRPLDEELIRIAERCKNLSAIGLGECEVSCSAFVEFVKMCGGRLSQLSIMEEVLIPDQKYSLEQIHWEVSKHLGRVWFPDMMPTW

SEQ ID NO: 7114 - protein, 512 aa, Homo sapiens
MMLSEQAQKWFPTHVQVTVLQAKDLKPKGKSGTNDTYTIIQLGKEKYSTSVAEKTLEPVWKEEASFELPGLLIQGSPEKYILFLIVMHRSLVGLDKFLGQVAINLNDIFEDKQRRKTEWFRLESKQGKRIKNRGEIKVNIQFMRNNMTASMFDLSMKDKTRSPFAKLKDKMKGRKNDGTFSDTSSAIIPSTHMPDANSEFSSGEIQMKSKPKKPFLLGPQRLSSAHSMSDLSGSHMSSEKLKAGTIGQTHLLGHQLDSFGTVPESGSLKSPHRRTLSFDTSKMNQPDSIVDEGELCFGRQNDPFTNVTASLPQKFATLPRKKNPFEESSETWDSSMNLFSKPIEIRKENKREKREKVSLFERVTGKKDSRRSDKLNNGGSDSPCDLKSPNAFSENRQDYFDYESTNPFTAKFRASNIMPSSSFHMSPTSNEDLRKIPDSNPFDATAGYRSLTYEEVLQELVKHKELLRRKDTHIRELEDYIDNLLVRVMEETPSILRVPYEPSRKAGKFSNS

SEQ ID NO: 7115 - protein, 1609 aa, Homo sapiens
MATAVETEACQPTDASWESGGGGDDEMKQALPELESSQQNGGGGGLNIAEPSGGAGREENAGAEAAQSLSHEQPQDSSEAGAAALPRGPEEPERPVRRSFQIPRKSREKKALFQPLTPGSREFEDVVNILHSSYLEPTSVTNFNYRRACLVHNELLEKEFTEKRRELKFDGRLDKELSESYAFLMVDRYQVQTICEKGLHVGQSKITILGSPSMGVYLSRYADLLQANPLDTGAMGDVVIFKIMKGKIKSIYDPMGVKSLESMLNKSALDPTPKHECHVSKNANRITSLLAYRAYELTQYYFYEYGFDELRRRPRHVCPYAVVSFTYKDDIQTPKFVPSSRSNSFNTDRNIDKYNYTLWKGQLLNKGKLLCYISLRSATRAFLPIKLPEKLDVETVMSIDHLKQKIPPALFYKETYLGPNEVLKNGMYCSLYEVVEKTRIGSNMESLLQKLDREKLVLVKPLGDRGYLFLLSPYQMVPPYEYQTAKSRVLHALFLFQEPRSIVTSQKGSTNAAPQERHESMPDVLKIAQFLQFSLIQCRKEFKNISAINFHSVVEKYVSEFFKRGFGSGKREFIMFPYDSRLDDKKFLYSAPRNKSHIDTCLHAYIFRPEVYQLPICKLKELFEENRKLQQFSPLSDYEGQEEEMNGTKMKFGKRNNSRGEAIISGKQRSSHSLDYDKDRVKELINLIQCRKKSVGGDSDTEDMRSKTVLKRKLEDLPENMRKLAKTSNLSENCHLYEESPQPIGSLGHDADLRRQQQDTCNSGIADIHRLFNWLSETLANARHSDASLTDTVNKALGLSTDDAYEELRQKHEYELNSTPDKKDYEQPTCAKVENAQFKGTQSLLLEVDATSKYSVAISTSEVGTDHKLHLKEDPNLISVNNFEDCSLCPSVPIEHGFRRQQSKSNNVEETEIHWKLIPITDTLKGTTEDDVLTGQVEEQCVPAAEAEPPAVSETTERTVLGEYNLFSRKIEEILKQKNVSYVSTVSTPIFSTQEKMKRLSEFIYSKTSKAGVQEFVDGLHEKLNTIIIKASAKGGNLPPVSPNDSGAKIASNPLERHVIPVSSSDFNNKHLLEPLCSDPLKDTNSDEQHSTSALTEVEMNQPQHATELMVTSDHIVPGDMAREPVEETTKSPSDVNISAQPALSNFISQLEPEVFNSLVKIMKDVQKNTVKFYIHEEEESVLCKEIKEYLIKLGNTECHPEQFLERRSKLDKLLIIIQNEDIAGFIHKIPGLVTLKKLPCVSFAGVDSLDDVKNHTYNELFVSGGFIVSDESILNPEVVTVENLKNFLTFLEELSTPEGKWQWKVHCKFQKKLKELGRLNAKALSLLTLLNVYQKKHLVEILSYHNCDSQTRNAPELDCLIRLQAQNIQQRHIVFLTEKNIKMLSSYTDNGIVVATAEDFMQNFKNLVGYHNSITEENLPQLGANENLESQSALLENDEKDEEDMSLDSGDEISHIEVCSNFHSEIWEKETKGSRGTDQKKNTQIELQSSPDVQNSLLEDKTYLDSEERTSIDIVCSEGENSNSTEQDSYSNFQVYHSQLNMSHQFSHFNVLTHQTFLGTPYALSSSQSQENENYFLSAYTESLDRDKSPPPLSWGKSDSSRPYSQEK

SEQ ID NO: 7116 - protein, 1031 aa, Homo sapiens
VDFSSVVCLPPSVIAVNGLDGGGAGENDDEPVLVSLSAAPSPQSEAVANELQELSLQPELTLGLHPGRNPNLPPLSERKNVLQLKLQQRRTREELVSQGIMPPLKSPAAFHEQRRSLERARTEDYLKRKIRSRPERSELVRMHILEETSAEPSLQAKQLKLKRARLADDLNEKIAQRPGPMELVEKNILPVESSLKEAIIVGQVNYPKVADSSSFDEDSSDALSPEQPASHESQGSVPSPLEARVSEPLLSATSASPTQVVSQLPMGRDSREMLFLAEQPPLPPPPLLPPSLTNGTTIPTAKSTPTLIKQSQPKSASEKSQRSKKAKELKPKVKKLKYHQYIPPDQKQDRGAPPMDSSYAKILQQQQLFLQLQILNQQQQQHHNYQAILPAPPKSAGEALGSSGTPPVRSLSTTNSSSSSGAPGPCGLARQNSTSLTGKPGALPANLDDMKVAELKQELKLRSLPVSGTKTELIERLRAYQDQISPVPGAPKAPAATSILHKAGEVVVAFPAARLSTGPALVAAGLAPAEVVVATVASSGVVKFGSTGSTPPVSPTPSERSLLSTGDENSTPGDTFGEMVTSPLTQLTLQASPLQILVKEEGPRAGSCCLSPGGRAELEGRDKDQMLQEKDKQIEALTRMLRQKQQLVERLKLQLEQEKRAQQPAPAPAPLGTPVKQENSFSSCQLSQQPLGPAHPFNPSLAAPATNHIDPCAVAPGPPSVVVKQEALQPEPEPVPAPQLLLGPQGPSLIKGVAPPTLITDSTGTHLVLTVTNKNADSPGLSSGSPQQPSSQPGSPAPAPSAQMDLEHPLQPLFGTPTSLLKKEPPGYEEAMSQQPKQQENGSSSQQMDDLFDILIQSGEISADFKEPPSLPGKEKPSPKTVCGSPLAAQPSPSAELPQAAPPPPGSPSLPGRLEDFLESSTGLPLLTSGHDGPEPLSLIDDLHSQMLSSTAILDHPPSPMDTSELHFVPEPSSTMGLDLADGHLDSMDWLELSSGGPVLSLAPLSTTAPSLFSTDFLDGHDLQLHWDSCL

SEQ ID NO: 7117 - protein, 137 aa, Homo sapiens
MDNARMNSFLEYPILSSGDSGTCSARAYPSDHRITTFQSCAVSANSCGGDDRFLVGRGVQIGSPHHHHHHHHRHPQPATYQTSGNLGVSYSHSSCGPSYGSQNFSAPYSPYALNQEADPPRSLSLPRIGDIFSSADF

SEQ ID NO: 7118 - protein, 1200 aa, Homo sapiens
MNTDSGGCARKRAAMSVTLTSVKRVQSSPNLLAAGRDSQSPDSAWRSYNDGNQETLNGDATYSSLAAKGFRSVRPNLQDKRSPTQSQITVNGNSGGAVSPMSYYQRPFSPSAYSLPASLNSSIVMQHGTSLDSTDTYPQHAQSLDGTTSSSIPLYRSSEEEKRVTVIKAPHYPGIGPVDESGIPTAIRTTVDRPKDWYKTMFKQIHMVHKPDDDTDMYNTPYTYNAGLYNPPYSAQSHPAAKTQTYRPLSKSHSDNSPNAFKDASSPVPPPHVPPPVPPLRPRDRSSTEKHDWDPPDRKVDTRKFRSEPRSIFEYEPGKSSILQHERPASLYQSSIDRSLERPMSSASMASDFRKRRKSEPAVGPPRGLGDQSASRTSPGRVDLPGSSTTLTKSFTSSSPSSPSRAKGGDDSKICPSLCSYSGLNGNPSSELDYCSTYRQHLDVPRDSPRAISFKNGWQMARQNAEIWSSTEETVSPKIKSRSCDDLLNDDCDSFPDPKVKSESMGSLLCEEDSKESCPMAWGSPYVPEVRSNGRSRIRHRSARNAPGFLKMYKKMHRINRKDLMNSEVICSVKSRILQYESEQQHKDLLRAWSQCSTEEVPRDMVPTRISEFEKLIQKSKSMPNLGDDMLSPVTLEPPQNGLCPKRRFSIEYLLEEENQSGPPARGRRGCQSNALVPIHIEVTSDEQPRAHVEFSDSDQDGVVSDHSDYIHLEGSSFCSESDFDHFSFTSSESFYGSSHHHHHHHHHHHRHLISSCKGRCPASYTRFTTMLKHERARHENTEEPRRQEMDPGLSKLAFLVSPVPFRRKKNSAPKKQTEKAKCKASVFEALDSALKDICDQIKAEKKRGSLPDNSILHRLISELLPDVPERNSSLRALRRSPLHQPLHPLPPDGAIHCPPYQNDCGRMPRSASFQDVDTANSSCHHQDRGGALQDRESPRSYSSTLTDMGRSAPRERRGTPEKEKLPAKAVYDFKAQTSKELSFKKGDTVYILRKIDQNWYEGEHHGRVGIFPISYVEKLTPPEKAQPARPPPPAQPGEIGEAIAKYNFNADTNVELSLRKGDRVILLKRVDQNWYEGKIPGTNRQGIFPVSYVEVVKKNTKGAEDYPDPPIPHSYSSDRIHSLSSNKPQRPVFTHENIQGGGEPFQALYNYTPRNEDELELRESDVIDVMEKCDDGWFVGTSRRTKFFGTFPGNYVKRL

SEQ ID NO: 7119 - protein, 951 aa, Homo sapiens [sequence omitted]

SEQ ID NO: 7120 - protein, 882 aa, Homo sapiens
MGNHNENTGEKLHLAQEQLALAGDKIASLERSLNLYRDKYQSSLSNIELLECQVKMLQGELGGIMGQEPENKGDHSKVRIYTSPCMIQEHQETQKRLSEVWQKVSQQDDLIQELRNKLACSNALVLEREKALIKLQADFASCTATHRYPPSSSEECEDIKKILKHLQEQKDSQCLHVEEYQNLVKDLRVELEAVSEQKRNIMKDMMKLELDLHGLREETSAHIERKDKDITILQCRLQELQLEFTETQKLTLKKDKFLQEKDEMLQELEKKLTQVQNSLLKKEKELEKQQCMATELEMTVKEAKQDKSKEAECKALQAEVQKLKNSLEEAKQQERLAAQQAAQCKEEAALAGCHLEDTQRKLQKGLLLDKQKADTIQELQRELQMLQKESSMAEKEQTSNRKRVEELSLELSEALRKLENSDKEKRQLQKTVAEQDMKMNDMLDRIKHQHREQGSIKCKLEEDLQEATKLLEDKREQLKKSKEHEKLMEGELEALRQEFKKKDKTLKENSRKLEEENENLRAELQCCSTQLESSLNKYNTSQQVIQDLNKEIALQKESLMSLQAQLDKALQKEKHYLQTTITKEAYDALSRKSAACQDDLTQALEKLNHVTSETKSLQQSLTQTQEKKAQLEEEIIAYEERMKKLNTELRKLRGFHQESELEVHAFDKKLEEMSCQVLQWQKQHQNDLKMLAAKEEQLREFQEEMAALKENLLEDDKEPCCLPQWSVPKDTCRLYRGNDQIMTNLEQWAKQQKVANEKLGNQLREQVKYIAKLSGEKDREPTRASSPNTTRPSSPSHSHLHSVMVHLQQENKKLKKEIEEKKMKAENTRLCTKALGPSRTESTQREKVCGTLGWKGLPQDMGQRMDLTKYIGMPHCPGSSYC

SEQ ID NO: 7121 - protein, 395 aa, Homo sapiens
MLASQGVLLHPYGVPMIVPAAPYLPGLIQGNQEAAAAPDTMAQPYASAQFAPPQNGIPAEYTAPHPHPAPEYTGQTTVPEHTLNLYPPAQTHSEQSPADTSAQTVSGTATQTDDAAPTDGQPQTQPSENTENKSQPKRLHVSNIPFRFRDPDLRQMFGQFGKILDVEIIFNERGSKGFGFVTFENSADADRAREKLHGTVVEGRKIEVNNATARVMTNKKTVNPYTNGWKLNPVVGAVYSPEFYAGTVLLCQANQEGSSMYSAPSSLVYTSAMPGFPYPAATAAAAYRGAHLRGRGRTVYNTFRAAAPPPPIPAYGGVVYQEPVYGNKLLQGGYAAYRYAQPTPATAAAYSDRNQFVFVAADEISCNTSAVTDEFMLPTPTTTHLLQPPPTALVP

SEQ ID NO: 7122 - protein, 518 aa, Homo sapiens
MDQTPPARPEYLVSGIRTPPVRRNSKLATLGRIFKPWKWRKKKNEKLKQTTSALEKKMAGRQGREELIKKGLLEMMEQDAESKTCNPDGGPRSVQSEPPTPKSETLTSEDAQPGSPLATGTDQVSLDKPLSSAAHLDDAAKMPSASSGEEADAGSLLPTTNELSQALAGADSLDSPPRPLERSVGQLPSPPLLPTPPPKASSKTTKNVTGQATLFQASSMKSADPSLRGQLSTPTGSPHLTTVHRPLPPSRVIEELHRALATKHRQDSFQGRESKGSPKKRLDVRLSRTSSVERGKEREEAWSFDGALENKRTAAKESEENKENLIINSELKDDLLLYQDEEALNDSIISGTLPRKCKKELLAVKLRNRPSKQELEDRNIFPRRTDEERQEIRQQIEMKLSKRLSQRPAVEELERRNILKQRNDQTEQEERREIKQRLTRKLNQRPTVDELRDRKILIRFSDYVEVAKAQDYDRRADKPWTRLSAADKAAIRKELNEYKSNEMEVHASSKHLTRFHRP

SEQ ID NO: 7123 - protein, 1121 aa, Homo sapiens
MAAATVGRDTLPEHWSYGVCRDGRVFFINDQLRCTTWLHPRTGEPVNSGHMIRSDLPRGWEEGFTEEGASYFIDHNQQTTAFRHPVTGQFSPENSEFILQEEPNPHMSKQDRNQRPSSMVSETSTAGTASTLEAKPGPKIIKSSSKVHSFGKRDQAIRRNPNVPVVVRGWLHKQDSSGMRLWKRRWFVLADYCLFYYKDSREEAVLGSIPLPSYVISPVAPEDRISRKYSFKAVHTGMRALIYNSSTAGSQAEQSGMRTYYFSADTQEDMNAWVRAMNQAAQVLSRSSLKRDMEKVERQAVPQANHTESCHECGRVGPGHTRDCPHRGHDDIVNFERQEQEGEQYRSQRDPLEGKRDRSKARSPYSPAEEDALFMDLPTGPRGQQAQPQRAEKNGMLPASYGPGEQNGTGGYQRAFPPRTNPEKHSQRKSNLAQVEHWARAQKGDSRSLPLDQTLPRQGPGQSLSFPENYQTLPKSTRHPSGGSSPPPRNLPSDYKYAQDRASHLKMSSEERRAHRDGTVWQLYEWQQRQQFRHGSPTAPICLGSPEFTDQGRSRSMLEVPRSISVPPSPSDIPPPGPPRVFPPRRPHTPAERVTVKPPDQRRSVDISLGDSPRRARGHAVKNSSHVDRRSMPSMGYMTHTVSAPSLHGKSADDTYLQLKKDLEYLDLKMTGRDLLKDRSLKPVKIAESDTDVKLSIFCEQDRVLQDLEDKIRALKENKDQLESVLEVLHRQMEQYRDQPQHLEKIAYQQKLLQEDLVHIRAELSRESTEMENAWNEYLKLENDVEQLKQTLQEQHRRAFFFQEKSQIQKDLWRIEDVTAGLSANKENFRILVESVKNPERKTVPLFPHPPVPSLSTSESKPPPQPSPPTSPVRTPLEVRLFPQLQTYVPYRPHPPQLRKVTSPLQSPTKAKPKVEDEAPPRPPLPELYSPEDQPPAVPPLPREATIIRHTSVRGLKRQSDERKRDRELGQCVNGDSRVELRSYVSEPELATLSGDMAQPSLGLVGPESRYQTLPGRGLSGSTSRLQQSSTIAPYVTLRRGLNAESSKATFPRPKSALERLYSGDHQRGKMSAEEQLERMKRHQKALVRERKRTLGQGERTGLPSSRYLSRPLPGDLGSVC

SEQ ID NO: 7124 - protein, 709 aa, Homo sapiens
MAADSREEKDGELNVLDDILTEVPEQDDELYNPESEQDKNEKKGSKRKSDRMESTDTKRQKPSVHSRQLVSKPLSSSVSNNKRIVSTKGKSATEYKNEEYQRSERNKRLDADRKIRLSSSASREPYKNQPEKTCVRKRDPERRAKSPTPDGSERIGLEVDRRASRSSQSSKEEVNSEEYGSDHETGSSGSSDEQGNNTENEEEGVEEDVEEDEEVEEDAEEDEEVDEDGEEEEEEEEEEEEEEEEEEEEYEQDERDQKEEGNDYDTRSEASDSGSESVSFTDGSVRSGSGTDGSDEKKKERKRARGISPIVFDRSGSSASESYADQTSKLKYVLQDARFFLIKSNNHENVSLAKAKGVWSTLPVNEKKLNLAFRSARSVILIFSVRESGKFQGFARLSSESHHGGSPIHWVLPAGMSAKMLGGVFKIDWICRRELPFTKSAHLTNPWNEHKPVKIGRDGQEIELECGTQLCLLFPPDESIDLYQVIHKMRHKRRMHSQPRSRGRPSRREPVRDVGRRRPEDYDIHNSRKKPRIDYPPEFHQRPGYLKDPRYQEVDRRFSGVRRDVFLNGSYNDYVREFHNMGPPPPWQGMPPYPGMEQPPHHPYYQHHAPPPQAHPPYSGHHPVPHEARYRDKRVHDYDMRVDDFLRRTQAVVSGRRSRPRERDRERERDRPRDNRRDRERDRGRDRERERERLCDRDRDRGERGRYRR

SEQ ID NO: 7125 - protein, 870 aa, Homo sapiens
MGNRGMEELIPLVNKLQDAFSSIGQSCHLDLPQIAVVGGQSAGKSSVLENFVGRDFLPRGSGIVTRRPLILQLIFSKTEHAEFLHCKSKKFTDFDEVRQEIEAETDRVTGTNKGISPVPINLRVYSPHVLNLTLIDLPGITKVPVGDQPPDIEYQIKDMILQFISRESSLILAVTPANMDLANSDALKLAKEVDPQGLRTIGVITKLDLMDEGTDARDVLENKLLPLRRGYIGVVNRSQKDIEGKKDIRAALAAERKFFLSHPAYRHMADRMGTPHLQKTLNQQLTNHIRESLPALRSKLQSQLLSLEKEVEEYKNFRPDDPTRKTKALLQMVQQFGVDFEKRIEGSGDQVDTLELSGGARINRIFHERFPFELVKMEFDEKDLRREISYAIKNIHGVRTGLFTPDLAFEAIVKKQVVKLKEPCLKCVDLVIQELINTVRQCTSKLSSYPRLREETERIVTTYIREREGRTKDQILLLIDIEQSYINTNHEDFIGFANAQQRSTQLNKKRAIPNQGEILVIRRGWLTINNISLMKGGSKEYWFVLTAESLSWYKDEEEKEKKYMLPLDNLKIRDVEKGFMSNKHVFAIFNTEQRNVYKDLRQIELACDSQEDVDSWKASFLRAGVYPEKDQAENEDGAQENTFSMDPQLERQVETIRNLVDSYVAIINKSIRDLMPKTIMHLMINNTKAFIHHELLAYLYSSADQSSLMEESADQAQRRDDMLRMYHALKEALNIIGDISTSTVSTPVPPPVDDTWLQSASSHSPTPQRRPVSSIHPPGRPPAVRGPTPGPPLIPVPVGAAASFSAPPIPSRPGPQSVFANSDLFPAPPQIPSRPVRIPPGIPPGVPSRRPPAAPSRPTIIRPAEPSLLD

SEQ ID NO: 7126 - protein, 1003 aa, Homo sapiens
MNGGNESSGADRAGGPVATSVPIGWQRCVREGAVLYISPSGTELSSLEQTRSYLLSDGTCKCGLECPLNVPKVFNFDPLAPVTPGGAGVGPASEEDMTKLCNHRRKAVAMATLYRSMETTCSHSSPGEGASPQMFHTVSPGPPSARPPCRVPPTTPLNGGPGSLPPEPPSVSQAFPTLAGPGGLFPPRLADPVPSGGSSSPRFLPRGNAPSPAPPPPPAISLNAPSYNWGAALRSSLVPSDLGSPPAPHASSSPPSDPPLFHCSDALTPPPLPPSNNLPAHPGPASQPPVSSATMHLPLVLGPLGGAPTVEGPGAPPFLASSLLSAAAKAQHPPLPPPSTLQGRRPRAQAPSASHSSSLRPSQRRPRRPPTVFRLLEGRGPQTPRRSRPRAPAPVPQPFSLPEPSQPILPSVLSLLGLPTPGPSHSDGSFNLLGSDAHLPPPPTLSSGSPPQPRHPIQPSLPGTTSGSLSSVPGAPAPPAASKAPVVPSPVLQSPSEGLGMGAGPACPLPPLAGGEAFPFPSPEQGLALSGAGFPGMLGALPLPLSLGQPPPSPLLNHSLFGVLTGGGGQPPPEPLLPPPGGPGPPLAPGEPEGPSLLVASLLPPPPSDLLPPPSAPPSNLLASFLPLLALGPTAGDGEGSAEGAGGPSGEPFSGLGDLSPLLFPPLSAPPTLIALNSALLAATLDPPSGTPPQPCVLSAPQPGPPTSSVTTATTDPGASSLGKAPSNSGRPPQLLSPLLGASLLGDLSSLTSSPGALPSLLQPPGPLLSGQLGLQLLPGGGAPPPLSEASSPLACLLQSLQIPPEQPEAPCLPPESPASALEPEPARPPLSALAPPHGSPDPPVPELLTGRGSGKRGRRGGGGLRGINGEARPARGRKPGSRREPGRLALKWGTRGGFNGQMERSPRRTHHWQHNGELAEGGAEPKDPPPPGPHSEDLKVPPGVVRKSRRGRRRKYNPTRNSNSSRQDITLEPSPTARAAVPLPPRARPGRPAKNKRRKLAP

SEQ ID NO: 7127 - protein, 433 aa, Homo sapiens
MATSGDCPRSESQGEEPAECSEAGLLQEGVQPEEFVAIADYAATDETQLSFLRGEKILILRQTTADWWWGERAGCCGYIPANHVGKHVDEYDPEDTWQDEEYFGSYGTLKLHLEMLADQPRTTKYHSVILQNKESLTDKVILDVGCGTGIISLFCAHYARPRAVYAVEASEMAQHTGQLVLQNGFADIITVYQQKVEDVVLPEKVDVLVSEWMGTCLLFEFMIESILYARDAWLKEDGVIWPTMAALHLVPCSADKDYRSKVLFWDNAYEFNLSALKSLAVKEFFSKPKYNHILKPEDCLSEPCTILQLDMRTVQISDLETLRGELRFDIRKAGTLHGFTAWFSVHFQSLQEGQPPQVLSTGPFHPTTHWKQTLFMMDDPVPVHTGDVVTGSVVLQRNPVWRRHMSVALSWAVTSRQDPTSQKVGEKVFPIWR

SEQ ID NO: 7128 - protein, 713 aa, Homo sapiens
MDELAGGGGGGPGMAAPPRQQQGPGGNLGLSPGGNGAAGGGGPPASEGAGPAAGPELSRPQQYTIPGILHYIQHEWARFEMERAHWEVERAELQARIAFLQGERKGQENLKKDLVRRIKMLEYALKQERAKYHKLKYGTELNQGDLKMPTFESEETKDTEAPTAPQNSQLTWKQGRQLLRQYLQEVGYTDTILDVRSQRVRSLLGLSNSEPNGSVETKNLEQILNGGESPKQKGQEIKRSSGDVLETFNFLENADDSDEDEENDMIEGIPEGKDKHRMNKHKIGNEGLAADLTDDPDTEEALKEFDFLVTAEDGEGAGEARSSGDGTEWAEPITFPSGGGKSFIMGSDDVLLSVLGLGDLADLTVTNDADYSYDLPANKDAFRKTWNPKYTLRSHFDGVRALAFHPVEPVLVTASEDHTLKLWNLQKTVPAKKSASLDVEPIYTFRAHIGPVLSLAISSNGEQCFSGGIDATIQWWNMPSPSVDPYDTYEPNVLAGTLVGHTDAVWGLAYSGIKNQLLSCSADGTVRLWNPQEKLPCICTYNGDKKHGIPTSVDFIGCDPAHMVTSFNTGSAVIYDLETSQSLVILSSQVDSGLQSNNHINRVVSHPTLPVTITAHEDRHIKFFDNKTGKMIHSMVAHLDAVTSLAVDPNGIYLMSGSHDCSIRLWNLDSKTCVQEITAHRKKLDESIYDVAFHSSKAYIASAGADALAKVFV

SEQ ID NO: 7129 - protein, 615 aa, Homo sapiens
MDSVAFEDVAVNFTHEEWALLGPSQKNLYRDVMRETIRNLNCIGMKWENQNIDDQHQNLRRNPRCDVVERFGKSKDGSQCGETLSQIRNSIVNKNTPARVDACGSSVNGEVIMGHSSLNCYIRVDTGHKHRECHEYAEKSYTHKQCGKGLSYRHSFQTCERPHTGKKPYDCKECGKTFSSPGNLRRHMVVKGGDGPYKCELCGKAFFWPSLLRMHERTHTGEKPYECKQCSKAFPVYSSYLRHEKIHTGEKPYECKQCSKAFPDYSSYLRHERTHTGEKPYKCKQCGKAFSVSGSLRVHERIHTGEKPYTCKQCGKAFCHLGSFQRHMIMHSGDGPHKCKICGKGFDFPGSARIHEGTHTLEKPYECKQCGKLLSHRSSFRRHMMAHTGDGPHKCTVCGKAFDSPSVFQRHERTHTGEKPYECKQCGKAFRTSSSLRKHETTHTGEQPYKCKCGKAFSDLFSFQSHETTHSEEEPYECKECGKAFSSFKYFCRHERTHSEEKSYECQICGKAFSRFSYLKTHERTHTAEKPYECKQCRKAFFWPSFLLRHERTHTGERPYECKHCGKAFSRSSFCREHERTHTGEKPYECKECGKAFSSLSSFNRHKRTHWKDIL

SEQ ID NO: 7130 - protein, 665 aa, Homo sapiens
MAGLSGAQIPDGEFTALVYRLIRDARYAEAVQLLGRELQRSPRSRAGLSLLGYCYYRLQEFALAAECYEQLGQLHPELEQYRLYQAQALYKACLYPEATRVAFLLLDNPAYHSRVLRLQAAIKYSEGDLPGSRSLVEQLLSGEGGEESGGDNETDGQVNLGCLLYKEGQYEAACSKFSATLQASGYQPDLSYNLALAYYSSRQYASALKHIAEIIERGIRQHPELGVGMTTEGFDVRSVGNTLVLHQTALVEAFNLKAAIEYQLRNYEVAQETLTDMPPRAEEELDPVTLHNQALMNMDARPTEGFEKLQFLLQQNPFPPETFGNLLLLYCKYEYFDLAADVLAENAHLTYKFLTPYLYDFLDALITCQTAPEEAFIKLDGLAGMLTEQLRRLTKQVQEARHNRDDEAIKKAVNEYDETMEKYIPVLMAQAKIYWNLENYPMVEKVFRKSVEFCNDHDVWKLNVAHVLFMQENKYKEAIGFYEPIVKKHYDNILNVSAIVLANLCVSYIMTSQNEEAEELMRKIEKEEEQLSYDDPNRKMYHLCIVNLVIGTLYCAKGNYEFGISRVIKSLEPYNKKLGTDTWYYAKRCFLSLLENMSKHMIVIHDSVIQECVQFLGHCELYGTNIPAVIEQPLEEERMHVGKNTVTDESRQLKALIYEIIGWNK

SEQ ID NO: 7131 - protein, 1371 aa, Homo sapiens
MHQRHPRARCPPLCVAGILACGFLLGCWGPSHFQQSCLQALEPQAVSSYLSPGAPLKGRPPSPGFQRQRQRQRRAAGGILHLELLVAVGPDVFQAHQEDTERYVLTNLNIGAELLRDPSLGAQFRVHLVKMVILTEPEGAPNITANLTSSLLSVCGWSQTINPEDDTDPGHADLVLYITRFDLELPDGNRQVRGVTQLGGACSPTWSCLITEDTGFDLGVTIAHEIGHSFGLEHDGAPGSGCGPSGHVMASDGAAPRAGLAWSPCSRRQLLSLLSAGRARCVWDPPRPQPGSAGHPPDAQPGLYYSANEQCRVAFGPKAVACTFAREHLDMCQALSCHTDPLDQSSCSRLLVPLLDGTECGVEKWCSKGRCRSLVELTPIAAVHGRWSSWGPRSPCSRSCGGGVVTRRRQCNNPRPAFGGRACVGADLQAEMCNTQACEKTQLEFMSQQCARTDGQPLRSSPGGASFYHWGAAVPHSQGDALCRHMCRAIGESFIMKRGDSFLDGTRCMPSGPREDGTLSLCVSGSCRTFGCDGRMDSQQVWDRCQVCGGDNSTCSPRKGSFTAGRAREYVTFLTVTPNLTSVYIANHRPLFTHLAVRIGGRYVVAGKMSISPNTTYPSLLEDGRVEYRVALTEDRLPRLEEIRIWGPLQEDADIQVYRRYGEEYGNLTRPDITFTYFQPKPRQAWVWAAVRGPCSVSCGAGLRWVNYSCLDQARKELVETVQCQGSQQPPAWPEACVLEPCPPYWAVGDFGPCSASCGGGLRERPVRCVEAQGSLLKTLPPARCRAGAQQPAVALETCNPQPCPARWEVSEPSSCTSAGGAGLALENETCVPGADGLEAPVTEGPGSVDEKLPAPEPCVGMSCPPGWGHLDATSAGEKAPSPWGSIRTGAQAAHVWTPAAGSCSVSCGRGLMELRFLCMDSALRVPVQEELCGLASKPGSRREVCQAVPCPARWQYKLAACSVSCGRGVVRRILYCARAHGEDDGEEILLDTQCQGLPRPEPQEACSLEPCPPRWKVMSLGPCSASCGLGTARRSVACVQLDQGQDVEVDEAACAALVRPEASVPCLIADCTYRWHVGTWMECSVSCGDGIQRRRDTCLGPQAQAPVPADFCQHLPKPVTVRGCWAGPCVGQGACGRQHLEPTGTIDMRGPGQADCAVAIGRPLGEVVTLRVLESSLNCSAGDMLLLWGRLTWRKMCRKLLDMTFSSKTNTLVVRQRCGRPGGGVLLRYGSQLAPETFYRECDMQLFGPWGEIVSPSLSPATSNAGGCRLFINVAPHARIAIHALATNMGAGTEGANASYILIRDTHSLRTTAFHGQQVLYWESESSQAEMEFSEGFLKAQASLRGQYWTLQSWVPEMQDPQSWKGKEGT

SEQ ID NO: 7132 - protein, 2034 aa, Homo sapiens
MGSQVLQILRQGVWASLTGGWFFDPHQSTFSNCFHLYVWIFLLIFPFLLYMVLPPSLMVAGVYCLVVAVIFATIKTVNYRLHAMFDQGEIVEKRSSTMGELEEEPAQGDSNPPRDPGVEMTVFRKVSSTPPVRCSSQHSVFGFNQVSELLPRMEDSGPLRDIKELVREQGSNNVIVTSADREMLKLSSQEKLIGDLPQTPPGAVPDPSLASTDSSEPSPLAGDGAPWSGSSMADTPMSPLLKGSLSQELSKSFLTLTQPDRALVRTSSRREQRRGAGGYQPLDRRGSGEPTPQKAGSSDSCFSGTDRETLSSFKSEKTNSTHLDSPPGGPAPEGSDTDPPSEAELPASPDAGVPSDDTLRSFDTVIGAGTPPGLAEPLLVVRPKDLALLRPSKRQPPLRRHSPPGRAPRRPLLEGGGFFEDEDTSEGSELSPASSLRSQRRYSTDSSSSTSCYSPESSRGAAGGPRKRRAPHGAEEGTAVPPKRPYGTQRTPSTASAKTHARVLSMDGAGGDVLRPPLAGCKAELEAQVGVEQAASEPVVLPAEARRGPAANQPGWRGELQEEGAVGGAAEETGRRDRSSSVRRTQAIRRRHNAGSNPTPPASVMGSPPSSLQEAQRGRAASHSRALTLPSALHFASSLLLTRAGANVHEACTFDDTSEGAVHYFYDESGVRRSYTFGLAGGGYENPVGQQGEQTANGAWDRHSHSSSFHSADVPEATGGLNLLQPRPVVLQGMQVRRVPLEIPEEQTLMEEAPPRAQHSYKYWLLPGRWTSVRYERLALLALLDRTRGVLENIFGVGLSSLVAFLGYLLLLKGFFTDIWVFQFCLVIASCQYSLLKSVQPDAASPMHGHNWVIAYSRPVYFCICCLLIWLLDALGSAQPFPPVSLYGLTLFSASFFFCARDVATVFTLCFPFVFLLGLLPQVNTCLMYLLEQIDMHGFGGTAATSPLTAVFSLSRSLLAAALLYGFCLGAIKTPWPEQHVPVLFSVFCGLLVALSYHLSRQSSDPTVLWSLIRSKLFPELEERSLETARAEPPDPLPDKMRQSVREVLHSDLVMCVVIAVLTFAISASTVFIALKSVLGFVLYALAGAVGFFTHYLLPQLRKQLPWFCLSQPVLKPLEYSQYEVRGAAQVMWFEKLYAGLQCVEKYLIYPAVVLNALTVDAHTVVSHPDKYCFYCRALLMTVAGLKLLRSAFCCPPQQYLTLAFTVLLFHFDYPRLSQGFLLDYFLMSLLCSKLWDLLYKLRFVLTYIAPWQITWGSAFHAFAQPFAVPHSAMLFVQALLSGLFSTPLNPLLGSAVFIMSYARPLKFWERDYNTKRVDHSNTRLVTQLDRNPGADDNNLNSIFYEHLTRSLQHTLCGDLVLGRWGNYGPGDCFVLASDYLNALVHLIEVGNGLVTFQLRGLEFRGTYCQQREVEAITEGVEEDEGCCCCEPGHLPRVLSFNAAFGQRWLAWEVTASKYVLEGYSISDNNAASMLQVFDLRKILITYYVKSIIYYVSRSPKLEVWLSHEGITAALRPVRVPGYADSDPTFSLSVDEDYDLRLSGLSLPSFCAVHLEWIQYCASRRSQPVDQDWNSPLVTLCFGLCVLGRRALGTASHSMSASLEPFLYGLHALFKGDFRITSPRDEWVFADMDLLHRVVAPGVRMALKLHQDHFTSPDEYEEPAALYDAIAANEERLVISHEGDPAWRSAILSNTPSLLALRHVLDDASDEYKIIMLNRRHLSFRVIKVNRECVRGLWAGQQQELVFLRNRNPERGSIQNAKQALRNMINSSCDQPLGYPIYVSPLTTSLAGSHPQLRALWGGPISLGAIAHWLLRTWERLHKGCGAGCNSGGNVDDSDCSGGGGLTSLSNNPPVAHPTPENTAGNGDQPLPPGPGWGPRSSLSGSGDGRPPPLLQWPPPRLPGPPPASPIPTEGPRTSRPPGPGLLSSEGPSGKWSLGGRKGLGGSDGEPASGSPKGGTPKSQAPLDLSLSLSLSLSPDVSTEASPPRASQDIPCLDSSAPESGTPMGALGDWPAPIEERESPAAQPLLEHQY

SEQ ID NO: 7133 - protein, 1114 aa, Homo sapiens
MAKATSGAAGLRLLLLLLLPLLGKVALGLYFSRDAYWEKLYVDQAAGTPLLYVHALRDAPEEVPSFRLGQHLYGTYRTRLHENNWICIQEDTGLLYLNRSLDHSSWEKLSVRNRGFPLLTVYLKVFLSPTSLREGECQWPGCARVYFSFFNTSFPACSSLKPRELCFPETRPSFRIRENRPPGTFHQFRLLPVQFLCPNISVAYRLLEGEGLPFRCAPDSLEVSTRWALDREQREKYELVAVCTVHAGAREEVVMVPFPVTVYDEDDSAPTFPAGVDTASAVVEFKRKEDTVVATLRVFDADVVPASGELVRRYTSTLLPGDTWAQQTFRVEHWPNETSVQANGSFVRATVHDYRLVLNRNLSISENRTMQLAVLVNDSDFQGPGAGVLLLHFNVSVLPVSLHLPSTYSLSVSRRARRFAQIGKVCVENCQAFSGINVQYKLHSSGANCSTLGVVTSAEDTSGILFVNDTKALRRPKCAELHYMVVATDQQTSRQAQAQLLVTVEGSYVAEEAGCPLSCAVSKRRLECEECGGLGSPTGRCEWRQGDGKGITRNFSTCSPSTKTCPDGHCDVVETQDINICPQDCLRGSIVGGHEPGEPRGIKAGYGTCNCFPEEEKCFCEPEDIQDPLCDELCRTVIAAAVLFSFIVSVLLSAFCIHCYHKFAHKPPISSAEMTFRRPAQAFPVSYSSSGARRPSLDSMENQVSVDAFKILEDPKWEFPRKNLVLGKTLGEGEFGKVVKATAFHLKGRAGYTTVAVKMLKENASPSELRDLLSEFNVLKQVNHPHVIKLYGACSQDGPLLLIVEYAKYGSLRGFLRESRKVGPGYLGSGGSRNSSSLDHPDERALTMGDLISFAWQISQGMQYLAEMKLVHRDLAARNILVAEGRKMKISDFGLSRDVYEEDSYVKRSQGRIPVKWMAIESLFDHIYTTQSDVWSFGVLLWEIVTLGGNPYPGIPPERLFNLLKTGHRMERPDNCSEEMYRLMLQCWKQEPDKRPVFADISKDLEKMMVKRRDYLDLAASTPSDSLIYDDGLSEEETPLVDCNNAPLPRALPSTWIENKLYGMSDPNWPGESPVPLTRADGTNTGFPRYPNDSVYANWMLSPSAAKLMDTFDS

SEQ ID NO: 7134 - protein, 283 aa, Homo sapiens
MEPPGDWGPPPWRSTPKTDVLRLVLYLTFLGAPCYAPALPSCKEDEYPVGSECCPKCSPGYRVKEACGELTGTVCEPCPPGTYIAHLNGLSKCLQCQMCDPAMGLRASRNCSRTENAVCGCSPGHFCIVQDGDHCAACRAYATSSPGQRVQKGGTESQDTLCQNCPPGTFSPNGTLEECQHQTKCSWLVTKAGAGTSSSHWVWWFLSGSLVIVIVCSTVGLIICVKRRKPRGDVVKVIVSVQRKRQEAEGEATVIEALQAPPDVTTVAVEETIPSFTGRSPNH

SEQ ID NO: 7135 - protein, 489 aa, Homo sapiens
MPQLNGGGGDDLGANDELISFKDEGEQEEKSSENSSAERDLADVKSSLVNESETNQNSSSDSEAERRPPPRSESFRDKSRESLEEAAKRQDGGLFKGPPYPGYPFIMIPDLTSPYLPNGSLSPTARTYLQMKWPLLDVQAGSLQSRQALKDARSPSPAHIVSPLPCCTQGHDCQHFYPPSDFTVSTQVFRDMKRSHSLQKVGEPWCIESNKVPVVQHPHHVHPLTPLITYSNEHFTPGNPPPHLPADVDPKTGIPRPPHPPDISPYYPLSPGTVGQIPHPLGWLVPQQGQPVYPITTGGFRHPYPTALTVNASMSRFPPHMVPPHHTLHTTGIPHPAIVTPTVKQESSQSDVGSLHSSKHQDSKKEEEKKKPHIKKPLNAFMLYMKEMRAKVVAECTLKESAAINQILGRRWHALSREEQAKYYELARKERQLHMQLYPGWSARDNYGKKKKRKRDKQPGETNGEKKSAFATYKVKAAASAHPLQMEAY

SEQ ID NO: 7136 - protein, 308 aa, Homo sapiens
MNENNETLTRGFTLMGLFTHNKCSGFFFGVICAVFFMAMIANGVMIFLINIDPHLHTPMYFLLSHLSVIDTLYISTIVPKMLVDYLMGEGTISFIACTAQCFLYMGFMGAEFFLLGLMAYDRYVAICNPLRYPVLISWRVCWMILASSWFGGALDSFLLTPITMSLPFCASHQINHFFCEAPTMLRLACGDKTTYETVMYVCCVAMLLIPFSVVTASYTRILITVHQMTSAEGRKKAFATCSSHMMVVTLFYGAALYTYTLPQSYHTPIKDKVFSAFYTILTPLLNPLIYSLRNRDVMGALKRVVARC

SEQ ID NO: 7137 - protein, 643 aa, Homo sapiens
MSEETVPEAASPPPPQGQPYFDRFSEDDPEYMRLRNRAADLRQDFNLMEQKKRVTMILQSPSFREELEGLIQEQMKKGNNSSNIWALRQIADFMASTSHAVFPTSSMNVSMMTPINDLHTADSLNLAKGERLMRCKISSVYRLLDLYGWAQLSDTYVTLRVSKEQDHFLISPKGVSCSEVTASSLIKVNILGEVVEKGSSCFPVDTTGFCLHSAIYAARPDVRCIIHLHTPATAAVSAMKWGLLPVSHNALLVGDMAYYDFNGEMEQEADRINLQKCLGPTCKILVLRNHGVVALGDTVEEAFYKIFHLQAACEIQVSALSSAGGVENLILLEQEKHRPHEVGSVQWAGSTFGPMQKSRLGEHEFEALMRMLDNLGYRTGYTYRHPFVQEKTKHKSEVEIPATVTAFVFEEDGAPVPALRQHAQKQQKEKTRWLNTPNTYLRVNVADEVQRSMGSPRPKTTWMKADEVEKSSSGMPIRIENPNQFVPLYTDPQEVLEMRNKIREQNRQDVKSAGPQSQLLASVIAEKSRSPSTESQLMSKGDEDTKDDSEETVPNPFSQLTDQELEEYKKEVERKKLELDETGQEREPGSGPAVCEFFSVALHIWSNILERKKLPQKSLAHLQSLHLLLQCRAQRRRQRQRAL

SEQ ID NO: 7138 - protein, 655 aa, Homo sapiens
MAKGGEALPQGSPAPVQDPHLIKVTVKTPKDKEDFSVTDTCTIQQLKEEISQRFKAHPDQLVLIFAGKILKDPDSLAQCGVRDGLTVHLVIKRQHRAMGNECPAASVPTQGPSPGSLPQPSSIYPADGPPAFSLGLLTGLSRLGLAYRGFPDQPSSLMRQHVSVPEFVTQLIDDPFIPGLLSNTGLVRQLVLDNPHMQQLIQHNPEIGHILNNPEIMRQTLEFLRNPAMMQEMIRSQDRVLSNLESIPGGYNVLCTMYTDIMDPMLNAVQEQFGGNPFATATTDNATTTTSQPSRMENCDPLPNPWTSTHGGSGSRQGRQDGDQDAPDIRNRFPNFLGIIRLYDYLQQLHENPQSLGTYLQGTASALSQSQEPPPSVNRVPPSSPSSQEPGSGQPLPEESVAIKGRSSCPAFLRYPTENSTGQGGDQDGAGKSSTGHSTNLPDLVSGLGDSANRVPFAPLSFSPTAAIPGIPEPPWLPSPAYPRSLRPDGMNPAPQLQDEIQPQLPLLMHLQAAMANPRALQALRQIEQGLQVLATEAPRLLLWFMPCLAGTGSVAGGIESREDPLMSEDPLPNPPPEVFPALDSAELGFLSPPFLHMLQDLVSTNPQQLQPEAHFQVQLEQLRSMGFLNREANLQALIATGGDVDAAVEKLRQS

SEQ ID NO: 7139 - protein, 971 aa, Homo sapiens
MSNVSEERRKRQQNIKEGLQFIQSPLSYPGTQEQYAVYLRALVRNLFNEGNDVYREHDWNNSISQYTEALNIADYAKSEEILIPKEIIEKLYINRIACYSNMGFHDKVLEDCNIVLSLNASNCKALYRKSKALSDLGRYKKAYDAVAKCSLAVPQDEHVIKLTQELAQKLGFKIRKAYVRAELSLKSVPGDGATKALNHSVEDIEPDLLTPRQEAVPVVSLPAPSFSHEVGSELASVPVMPLTSILPLQVEESALPSAVLANGGKMPFTMPEAFLDDGDMVLGDELDDLLDSAPETNETVMPSALVRGPLQTASVSPSMPFSASLLGTLPIGARYAPPPSFSEFYPPLTSSLEDFCSSLNSFSMSESKRDLSTSTSREGTPLNNSNSSLLLMNGPGSLFASENFLGISSQPRNDFGNFFGSAVTKPSSSVTPRHPLEGTHELRQACQICFVKSGPKLMDFTYHANIDHKCKKDILIGRIKNVEDKSWKKIRPRPTKTNYEGPYYICKDVAAEEECRYSGHCTFAYCQEEIDVWTLERKGAFSREAFFGGNGKINLTVFKLLQEHLGEFIFLCEKCFDHKPRMISKRNKDNSTACSHPVTKHEFEDNKCLVHILRETTVKYSKIRSFHGQCQLDLCRHEVRYGCLREDECFYAHSLVELKVWIMQNETGISHDAIAQESKRYWQNLEANVPGAQVLGNQIMPGFLNMKIKFVCAQCLRNGQVIEPDKNRKYCSAKARHSWTKDRRAMRVMSIERKKWMNIRPLPTKKQMPLQFDLCNHIASGKKCQYVGNCSFAHSPEEREVWTYMKENGIQDMEQFYELWLKSQKNEKSEDIASQSNKENGKQIHMPTDYAEVTVDFHCWMCGKNCNSEKQWQGHISSEKHKEKVFHTEDDQYCWQHRFPTGYFSICDRYMNGTCPEGNSCKFAHGNAELHEWEERRDALKMKLNKARKDHLIGPNDNDFGKYSFLFKDLN

SEQ ID NO: 7140 - protein, 619 aa, Homo sapiens
MRPDGQQALDAVVRSFDCHSEAALRQRNDVIYCSLPRTAQGIVQREDQLEVLVSLREVWGRRRGRDGTCTGAMPDGALDTAVCADEVGSEEDLYDDLHSSSHHYSHPGGGGEQLAINELISDGSVVCAEALWDHVTMDDQELGFKAGDVIEVMDATNREWWWGRVADGEGWFPASFVRLRVNQDEPADDDAPLAGNSGAEDGGAEAQSSKDQMRTNVINEILSTERDYIKHLRDICEGYVRQCRKRADMFSEEQLRTIFGNIEDIYRCQKAFVKALEQRFNRERPHLSELGACFLEHQADFQIYSEYCNNHPNACVELSRLTKLSKYVYFFEACRLLQKMIDISLDGFLLTPVQKICKYPLQLAELLKYTHPQHRDFKDVEAALHAMKNVAQLINERKRRLENIDKIAQWQSSIEDWEGEDLLVRSSELIYSGELTRVTQPQAKSQQRMFFLFDHQLIYCKKDLLRRDVLYYKGRLDMDGLEVVDLEDGKDRDLHVSIKNAFRLHRGATGDSHLLCTRKPEQKQRWLKAFAREREQVQLDQETGFSITELQRKQAMLNASKQQVTGKPKAVGRPCYLTRQKHPALPSNRPQQQVLVLAEPRRKPSTFWHSISRLAPFRK

SEQ ID NO: 7141 - protein, 495 aa, Homo sapiens
MRSPVRDLARNDGEESTDRTPLLPGAPRAEAAPVCCSARYNLAILAFFGFFIVYALRVNLSVALVDMVDSNTTLEDNRTSKACPEHSAPIKVHHNQTGKKYQWDAETQGWILGSFFYGYIITQIPGGYVASKIGGKMLLGFGILGTAVLTLFTPIAADLGVGPLIVLRALEGLGEGVTFPAMHAMWSSWAPPLERSKLLSISYAGAQLGTVISLPLSGIICYYMNWTYVFYFFGTIGIFWFLLWIWLVSDTPQKHKRISHYEKEYILSSLRNQLSSQKSVPWVPILKSLPLWAIVVAHFSYNWTFYTLLTLLPTYMKEILRFNVQENGFLSSLPYLGSWLCMILSGQAADNLRAKWNFSTLCVRRIFSLIGMIGPAVFLVAAGFIGCDYSLAVAFLTISTTLGGFCSSGFSINHLDIAPSYAGILLGITNTFATIPGMVGPVIAKSLTPDNTVGEWQTVFYIAAAINVFGAIFFTLFAKGEVQNWALNDHHGHRH

SEQ ID NO: 7142 - protein, 1453 aa, Homo sapiens
MIKCLSVEVQAKLRSGLAISSLGQCVEELALNSIDAEAKCVAVRVNMETFQVQVIDNGFGMGSDDVEKVGNRYFTSKCHSVQDLENPRFYGFRGEALANIADMASAVEISSKKNRTMKTFVKLFQSGKALKACEADVTRASAGTTVTVYNLFYQLPVRRKCMDPRLEFEKVRQRIEALSLMHPSISFSLRNDVSGSMVLQLPKTKDVCSRFCQIYGLGKSQKLREISFKYKEFELSGYISSEAHYNKNMQFLFVNKRLVLRTKLHKLIDFLLRKESIICKPKNGPTSRQMNSSLRHRSTPELYGIYVINVQCQFCEYDVCMEPAKTLIEFQNWDTLLFCIQEGVKMFLKQEKLFVELSGEDIKEFSEDNGFSLFDATLQKRVTSDERSNFQEACNNILDSYEMFNLQSKAVKRKTTAENVNTQSSRDSEATRKNTNDAFLYIYESGGPGHSKMTEPSLQNKDSSCSESKMLEQETIVASEAGENEKHKKSFLEHSSLENPCGTSLEMFLSPFQTPCHFEESGQDLEIWKESTTVNGMAANILKNNRIQNQPKRFKDATEVGCQPLPFATTLWGVHSAQTEKEKKKESSNCGRRNVFSYGRVKLCSTGFITHVVQNEKTKSTETEHSFKNYVRPGPTRAQETFGNRTRHSVETPDIKDLASTLSKESGQLPNKKNCRTNISYGLENEPTATYTMFSAFQEGSKKSQTDCILSDTSPSFPWYRHVSNDSRKTDKLIGFSKPIVRKKLSLSSQLGSLEKFKRQYGKVENPLDTEVEESNGVTTNLSLQVEPDILLKDKNRLENSDVCKITTMEHSDSDSSCQPASHILNSEKFPFSKDEDCLEQQMPSLRESPMTLKELSLFNRKPLDLEKSSESLASKLSRLKGSERETQTMGMMSRFNELPNSDSSRKDSKLCSVLTQDFCMLFNNKHEKTENGVIPTSDSATQDNSFNKNSKTHSNSNTTENCVISETPLVLPYNNSKVTGKDSDVLIRASEQQIGSLDSPSGMLMNPVEDATGDQNGICFQSEESKARACSETEESNTCCSDWQRHFDVALGRMVYVNKMTGLSTFIAPTEDIQAACTKDLTTVAVDVVLENGSQYRCQPFRSDLVLPFLPRARAERTVMRQDNRDTVDDTVSSESLQSLFSEWDNPVFARYPEVAVDVSSGQAESLAVKIHNILYPYRFTKGMIHSMQVLQQVDNKFIACLMSTKTEENGEAGGNLLVLVDQHAAHERIRLEQLIIDSYEKQQAQGSGRKKLLSSTLIPPLEITVTEEQRRLLWCYHKNLEDLGLEFVFPDTSDSLVLVGKVPLCFVEREANELRRGRSTVTKSIVEEFIREQLELLQTTGGIQGTLPLTVQKVLASQACHGAIKFNDGLSLQESCRLIEALSSCQLPFQCAHGRPSMLPLADIDHLEQEKQIKPNLTKLRKMAQAWRLFGKAECDTRQSLQQSMPPCEPP

SEQ ID NO: 7143 - protein, 836 aa, Homo sapiens
MAQFYYKRNVNAPYRDRIPLRIVRAESELSPSEKAYLNAVEKGDYASVKKSLEEAEIYFKININCIDPLGRTALLIAIENENLELIELLLSFNVYVGDALLHAIRKEVVGAVELLLNHKKPSGEKQVPPILLDKQFSEFTPDITPIILAAHTNNYEIIKLLVQKGVSVPRPHEVRCNCVECVSSSDVDSLRHSRSRLNIYKALASPSLIALSSEDPFLTAFQLSWELQELSKVENEFKSEYEELSRQCKQFAKDLLDQTRSSRELEIILNYRDDNSLIEEQSGNDLARLKLAIKYRQKEFVAQPNCQQLLASRWYDEFPGWRRRHWAVKMVTCFIIGLLFPVFSVCYLIAPKSPLGLFIRKPFIKFICHTASYLTFLFLLLLASQHIDRSDLNRQGPPPTIVEWMILPWVLGFIWGEIKQMWDGGLQDYIHDWWNLMDFVMNSLYLATISLKIVAFVKYSALNPRESWDMWHPTLVAEALFAIANIFSSLRLISLFTANSHLGPLQISLGRMLLDILKFLFIYCLVLLAFANGLNQLYFYYEETKGLTCKGIRCEKQNNAFSTLFETLQSLFWSIFGLINLYVTNVKAQHEFTEFVGATMFGTYNVISLVVLLNMLIAMMNNSYQLIADHADIEWKFARTKLWMSYFEEGGTLPTPFNVIPSPKSLWYLIKWIWTHLCKKKMRRKPESFGTIGRRAADNLRRHHQYQEVMRNLVKRYVAAMIRDAKTEEVARQQAAGPLERNIQLESRGLASRGDLSIPGLSEQCVLVDHRERNTDTLGLQVGKRVCPFKSEKVVVEDTVPIIPKEKHAKEEDSSIDYDLNLPDTVTHEDYVTTRL

SEQ ID NO: 7144 - protein, 479 aa, Homo sapiens
MLQINQMFSVQLSLGEQTWESEGSSIKKAQQAVANKALTESTLPKPVQKPPKSNVNNNPGSITPTVELNGLAMKRGEPAIYRPLDPKPFPNYRANYNFRGMYNQRYHCPVPKIFYVQLTVGNNEFFGEGKTRQAARHNAAMKALQALQNEPIPERSPQNGESGKDVDDDKDANKSEISLVFEIALKRNMPVSFEVIKESGPPHMKSFVTRVSVGEFSAEGEGNSKKLSKKRAATTVLQELKKLPPLPVVEKPKLFFKKRPKTIVKAGPEYGQGMNPISRLAQIQQAKKEKEPDYVLLSERGMPRRREFVMQVKVGNEVATGTGPNKKIAKKNAAEAMLLQLGYKASTNLQDQLEKTGENKGWSGPKPGFPEPTNNTPKGILHLSPDVYQEMEASRHKVISGTTLGYLSPKDMNQPSSSFFSISPTSNSSATIARELLMNGTSSTAEAIGLKGSSPTPPCSPVQPSKQLEYLARIQGFQV

SEQ ID NO: 7145 - protein, 322 aa, Homo sapiens
MEPQNTSTVTNFQLLGFQNLLEWQALLFVIFLLIYCLTIIGNVVIITVVSQGLRLHSPMYMFLQHLSFLEVWYTSTTVPLLLANLLSWGQAISFSACMAQLYFFVFLGATECFLLAFMAYDRYLAICSPLRYPFLMHRGLCARLVVVSWCTGVSTGFLPSLMISRLDFCGRNQINHFFCDLPPLMQLSCSRVYITEVTIFILSIAVLCICFFLTLGPYVFIVSSILRIPSTSGRRKTFSTCGSHLAVVTLYYGTMISMYVCPSPHLLPEINKIISVFYTVVTPLLNPVIYSLRNKDFKEAVRKVMRRKCGILWSTSKRKFLY

SEQ ID NO: 7146 - protein, 309 aa, Homo sapiens
MEESKTLKSENHEPKKNVICEESKAVQVIGNQTLKARNDKSVKEIENSSPNRNSSKKNKQNDICIEKTEVKSCKVNAANLPGPKDLGLVLRDQSHCKAKKFPNSPVKAEKATISQAKSEKATSLQAKAEKSPKSPNSVKAEKASSYQMKSEKVPSSPAEAEKGPSLLLKDMRQKTELQQIGKKIPSSFTSVDKVNIEAVGGEKCALQNSPRSQKQQTCTDNTGDSDDSASGIEDVSDDLSKMKNDESNKENSSEMDYLENATVIDESALTPEQRLGLKQAEERLERDHIFRLEKVYYVVLVIWGEMCVS

SEQ ID NO: 7147 - protein, 389 aa, Homo sapiens
MKTGHFEIVTMLLATMILVDIFQVKAEVLDMADNAFDDEYLKCTDRMEIKYVPQLLKEEKASHQQLDTVWENAKAKWAARKTQIFLPMNFKDNHGIALMAYISEAQEQTPFYHLFSEAVKMAGQSREDYIYGFQFKAFHFYLTRALQLLRKPCEASSKTVVYRTSQGTSFTFGGLNQARFGHFTLAYSAKPQAANDQLTVLSIYTCLGVDIENFLDKESERITLIPLNEVFQVSQEGAGNNLILQSINKTCSHYECAFLGGLKTENCIENLEYFQPIYVYNPGEKNQKLEDHSEKNWKLEDHGEKNQKLEDHGVKILEPTQIPGMKIPEPFPLPEDKSQGNINNPTPGPVPVPGPKSHPSASSGKLLLPQFGMVIILISVSAINLFVAL

SEQ ID NO: 7148 - protein, 418 aa, Homo sapiens
MPSSVSWGILLLAGLCCLVPVSLAEDPQGDAAQKTDTSHHDQDHPTFNKITPNLAEFAFSLYRQLAHQSNSTNIFFSPVSIATAFAMLSLGTKADTHDEILEGLNFNLTEIPEAQIHEGFQELLRTLNQPDSQLQLTTGNGLFLSEGLKLVDKFLEDVKKLYHSEAFTVNFGDTEEAKKQINDYVEKGTQGKIVDLVKELDRDTVFALVNYIFFKGKWERPFEVKDTEEEDFHVDQVTTVKVPMMKRLGMFNIQHCKKLSSWVLLMKYLGNATAIFFLPDEGKLQHLENELTHDIITKFLENEDRRSASLHLPKLSITGTYDLKSVLGQLGITKVFSNGADLSGVTEEAPLKLSKAVHKAVLTIDEKGTEAAGAMFLEAIPMSIPPEVKFNKPFVFLMIEQNTKSPLFMGKVVNPTQK

SEQ ID NO: 7149 - protein, 1177 aa, Homo sapiens
MDEPPFSEAALEQALGEPCDLDAALLTDIEGEVGAGRGRANGLDAPRAGADRGAMDCTFEDMLQLINNQDSDFPGLFDPPYAGSGAGGTDPASPDTSSPGSLSPPPATLSSSLEAFLSGPQAAPSPLSPPQPAPTPLKMYPSMPAFSPGPGIKEESVPLSILQTPTPQPLPGALLPQSFPAPAPPQFSSTPVLGYPSPPGGFSTGSPPGNTQQPLPGLPLASPPGVPPVSLHTQVQSVVPQQLLTVTAAPTAAPVTTTVTSQIQQVPVLLQPHFIKADSLLLTAMKTDGATVKAAGLSPLVSGTTVQTGPLPTLVSGGTILATVPLVVDAEKLPINRLAAGSKAPASAQSRGEKRTAHNAIEKRYRSSINDKIIELKDLVVGTEAKLNKSAVLRKAIDYIRFLQHSNQKLKQENLSLRTAVHKSKSLKDLVSACGSGGNTDVLMEGVKTEVEDTLTPPPSDAGSPFQSSPLSLGSRGSGSGGSGSDSEPDSPVFEDSKAKPEQRPSLHSRGMLDRSRLALCTLVFLCLSCNPLASLLGARGLPSPSDTTSVYHSPGRNVLGTESRDGPGWAQWLLPPVVWLLNGLLVLVSLVLLFVYGEPVTRPHSGPAVYFWRHRKQADLDLARGDFAQAAQQLWLALRALGRPLPTSHLDLACSLLWNLIRHLLQRLWVGRWLAGRAGGLQQDCALRVDASASARDAALVYHKLHQLHTMGKHTGGHLTATNLALSALNLAECAGDAVSVATLAEIYVAAALRVKTSLPRALHFLTRFFLSSARQACLAQSGSVPPAMQWLCHPVGHRFFVDGDWSVLSTPWESLYSLAGNPVDPLAQVTQLFREHLLERALNCVTQPNPSPGSADGDKEFSDALGYLQLLNSCSDAAGAPAYSFSISSSMATTTGVDPVAKWWASLTAVVIHWLRRDEEAAERLCPLVEHLPRVLQESERPLPRAALHSFKAARALLGCAKAESGPASLTICEKASGYLQDSLATTPASSSIDKAVQLFLCDLLLVVRTSLWRQQQPPAPAPAAQGTSSRPQASALELRGFQRDLSSLRRLAQSFRPAMRRVFLHEATARLMAGASPTRTHQLLDRSLRRRAGPGGKGGAVAELEPRPTRREHAEALLLASCYLPPGFLSAPGQRVGMLAEAARTLEKLGDRRLLHDCQQMLMRLGGGTTVTSS

SEQ ID NO: 7150 - protein, 1056 aa, Homo sapiens
MAGALRRGRALGSRPSGPTVSSRRSPQCPVAQEGLGARSRPRVAPRSLARCGPSSRLMGWKPSEARGQSQSFQASGLQPRSLKAARRATGRPDRSRAAPPNMDPDPQAGVQVGMRVVRGVDWKWGQQDGGEGGVGTVVELGRHGSPSTPDRTVVVQWDQGTRTNYRAGYQGAHDLLLYDNAQIGVRHPNIICDCCKKHGLRGMRWKCRVCLDYDLCTQCYMHNKHELAHAFDRYETAHSRPVTLSPRQGLPRIPLRGIFQGAKVVRGPDWEWGSQDGGEGKPGRVVDIRGWDVETGRSVASVTWADGTTNVYRVGHKGKVDLKCVGEAAGGFYYKDHLPRLGKPAELQRRVSADSQPFQHGDKVKCLLDTDVLREMQEGHGGWNPRMAEFIGQTGTVHRITDRGDVRVQFNHETRWTFHPGALTKHHSFWVGDVVRVIGDLDTVKRLQAGHGEWTDDMAPALGRVGKVVKVFGDGNLRVAVAGQRWTFSPSCLVAYRPEEDANLDVAERARENKSSLSVALDKLRAQKSDPEHPGRLVVEVALGNAARALDLLRRRPEQVDTKNQGRTALQVAAYLGQVELIRLLLQARAGVDLPDDEGNTALHYAALGNQPEATRVLLSAGCRADAINSTQSTALHVAVQRGFLEVVRALCERGCDVNLPDAHSDTPLHSAISAGTGASGIVEVLTEVPNIDVTATNSQGFTLLHHASLKGHALAVRKILARARQLVDAKKEDGFTALHLAALNNHREVAQILIREGRCDVNVRNRKLQSPLHLAVQQAHVGLVPLLVDAGCSVNAEDEEGDTALHVALQRHQLLPLVADGAGGDPGPLQLLSRLQASGLPGSAELTVGAAVACFLALEGADVSYTNHRGRSPLDLAAEGRVLKALQGCAQRFRERQAGGGAAPGPRQTLGTPNTVTNLHVGAAPGPEAAECLVCSELALLVLFSPCQHRTVCEECARRMKKCIRCQVVVSKKLRPDGSEVASAAPAPGPPRQLVEELQSRYRQMEERITCPICIDSHIRLVFQCGHGACAPCGSALSACPICRQPIRDRIQIFV

SEQ ID NO: 7151 - protein, 1096 aa, Homo sapiens [sequence omitted]

SEQ ID NO: 7152 - protein, 1493 aa, Homo sapiens
MPNEGIPHSSQTQEQDCLQSQPVSNNEEMAIKQESGGDGEVEEYLSFRSVGDGLSTSAVGCASAAPRRGPALLHIDRHQIQAVEPSAQALELQGLGVDVYDQDVLEQGVLQQVDNAIHEASRASQLVDVEKEYRSVLDDLTSCTTSLRQINKIIEQLSPQAATSRDINRKLDSVKRQKYNKEQQLKKITAKQKHLQAILGGAEVKIELDHASLEEDAEPGPSSLGSMLMPVQETAWEELIRTGQMTPFGTQIPQKQEKKPRKIMLNEASGFEKYLADQAKLSFERKKQGCNKRAARKAPAPVTPPAPVQNKNKPNKKARVLSKKEERLKKHIKKLQKRALQFQGKVGLPKARRPWESDMRPEAEGDSEGEESEYFPTEEEEEEEDDEVEGAEADLSGDGTDYELKPLPKGGKRQKKVPVQEIDDDFFPSSGEEAEAASVGEGGGGGRKVGRYRDDGDEDYYKQRLRRWNKLRLQDKEKRLKLEDDSEESDAEFDEGFKVPGFLFKKLFKYQQTGVRWLWELHCQQAGGILGDEMGLGKTIQIIAFLAGLSYSKIRTRGSNYRFEGLGPTVIVCPTTVMHQWVKEFHTWWPPFRVAILHETGSYTHKKEKLIRDVAHCHGILITSYSYIRLMQDDISRYDWHYVILDEGHKIRNPNAAVTLACKQFRTPHRIILSGSPMQNNLRELWSLFDFIFPGKLGTLPVFMEQFSVPITMGGYSNASPVQVKTAYKCACVLRDTINPYLLRRMKSDVKMSLSLPDKNEQVLFCRLTDEQHKVYQNFVDSKEVYRILNGEMQIFSGLIALRKICNHPDLFSGGPKNLKGLPDDELEEDQFGYWKRSGKMIVVESLLKIWHKQGQRVLLFSQSRQMLDILEVFLRAQKYTYLKMDGTTTIASRQPLITRYNEDTSIFVFLLTTRVGGLGVNLTGANRVVIYDPDWNPSTDTQARERAWRIGQKKQVTVYRLLTAGTIEEKIYHRQIFKQFLTNRVLKDPKQRRFFKSNDLYELFTLTSPDASQSTETSAIFAGTGSDVQTPKCHLKRRIQPAFGADHDVPKRKKFPASNISVNDATSSEEKSEAKGAEVNAVTSNRSDPLKDDPHMSSNVTSNDRLGEETNAVSGPEELSVISGNGECSNSSGTGKTSMPSGDESIDEKLGLSYKRERPSQAQTEAFWENKQMENNFYKHKSKTKHHSVAEEETLEKHLRPKQKPKNSKHCRDAKFEGTRIPHLVKKRRYQKQDSENKSEAKEQSNDDYVLEKLFKKSVGVHSVMKHDAIMDGASPDYVLVEAEANRVAQDALKALRLSRQRCLGAVSGVPTWTGHRGISGAPAGKKSRFGKKRNSNFSVQHPSSTSPTEKCQDGIMKKEGKDNVPEHFSGRAEDADSSSGPLASSSLLAKMRARNHLILPERLESESGHLQEASALLPTTEHDDLLVEMRNFIAFQAHTDGQASTREILQEFESKLSASQSCVFRELLRNLCTFHRTSGGEGIWKLKPEYC

SEQ ID NO: 7153 - protein, 285 aa, Homo sapiens
MSEAGEEQPMETTGATENGHEAVPEGESPAGAGTGAAAGAGGATAAPPSGNQNGAEGDQINASKNEEDAGKMFVGGLSWDTSKKDLKDYFTKFGEVVDCTIKMDPNTGRSRGFGFILFKDAASVEKVLDQKEHRLDGRVIDPKKAMAMKKDPVKKIFVGGLNPEATEEKIREYFGEFGEIEAIELPMDPKLNKRRGFVFITFKEEEPVKKVLEKKFHTVSGSKCEIKVAQPKEVYQQQQYGSGGRGNRNRGNRGSGGGGGGGGQGSTNYGKSQRRGGHQNNYKPY

SEQ ID NO: 7154 - protein, 662 aa, Homo sapiens
MNGDSRAAVVTSPPPTTAPHKERYFDRVDENNPEYLRERNMAPDLRQDFNMMEQKKRVSMILQSPAFCEELESMIQEQFKKGKNPTGLLALQQIADFMTTNVPNVYPAAPQGGMAALNMSLGMVTPVNDLRGSDSIAYDKGEKLLRCKLAAFYRLADLFGWSQLIYNHITTRVNSEQEHFLIVPFGLLYSEVTASSLVKINLQGDIVDRGSTNLGVNQAGFTLHSAIYAARPDVKCVVHIHTPAGAAVSAMKCGLLPISPEALSLGEVAYHDYHGILVDEEEKVLIQKNLGPKSKVLILRNHGLVSVGESVEEAFYYIHNLVVACEIQVRTLASAGGPDNLVLLNPEKYKAKSRSPGSPVGEGTGSPPKWQIGEQEFEALMRMLDNLGYRTGYPYRYPALREKSKKYSDVEVPASVTGYSFASDGDSGTCSPLRHSFQKQQREKTRWLNSGRGDEASEEGQNGSSPKSKTKWTKEDGHRTSTSAVPNLFVPLNTNPKEVQEMRNKIREQNLQDIKTAGPQSQVLCGVVMDRSLVQDAPLSDCTETIEGLELTEQTFSPAKSLSFRKGELVTASKAIIEKEYQPHVIVSTTGPNPFTTLTDRELEEYRREVERKQKGSEENLDEAREQKEKSPPDQPAVPHPPPSTPIKLEEGDGCAREYLLP

SEQ ID NO: 7155 - protein, 375 aa, Homo sapiens
MFSNANSRSKMWLLLTMASLISVLGTTHGLFGKLHPGSPEVTMNISQMITYWGYPNEEYEVVTEDGYILEVNRIPYGKKNSGNTDAGYDVWLGNSRGNTWARRNLYYSPDSVEFWAFSFDEMAKYDLPATIDFIVKKTGQKQLHYVGHSQGTTIGFIAFSTNPSLAKRIKTFYALAPVATVKYTKSLINKLRFVPQSLFKFIFGDKIFYPHNFFDQFLATEVCSREMLNLLCSNALFIICGFDSKNFNTSRLDVYLSHNPAGTSVQNMFHWTQAVKSGKFQAYDWGSPVQNRMHYDQSQPPYYNVTAMNVPIAVWNGGKDLLADPQDVGLLLPKLPNLIYHKEIPFYNHLDFIWAMDAPQEVYNDIVSMISEDKK

SEQ ID NO: 7156 - protein, 2214 aa, Homo sapiens
MKRKERIARRLEGIENDTQPILLQSCTGLVTHRLLEEDTPRYMRASDPASPHIGRSNEEEETSDSSLEKQTRSKYCTETSGVHGDSPYGSGTMDTHSLESKAERIARYKAERRRQLAEKYGLTLDPEADSEYLSRYTKSRKEPDAVEKRGGKSDKQEESSRDASSLYPGTETMGLRTCAGESKDYALHVGDGSSDPEVLLNIENQRRGQELSATRQAHDLSPAAESSSTFSFSGRDSSFTEVPRSPKHAHSSSLQQAASRSPSFGDPQLSPEARPSTGKPKHEWFLQKDSEGDTPSLINWPSRVKVREKLVKEESARNSPELASESVTQRRHQPAPVHYVSFQSEHSAFDRVPSKAAGSTRQPIRGYVQPADTGHTAKLVTPETPENASECSWVASATQNVPKPPSLTVLEGDGRDSPVLHVCESKAEEEEGEGEGEEKEEDVCFTEALEQSKKTLLALEGDGLVRSPEDPSRNEDFGKPAVSTVTLEHQKELENVAQPPQAPHQPTERTGRSEMVLYIQSEPVSQDAKPTGHNREASKKRKVRTRSLSDFTGPPQLQALKYKDPASRRELELPSSKTEGPYGEISMLDTKVSVAQLRSAFLASANACRRPELKSRVERSAEGPGLPTGVERERGSRKPRRYFSPGESRKTSERFRTQPITSAERKESDRCTSHSETPTVDDEEKVDERAKLSVAAKRLLFREMEKSFDEQNVPKRRSRNTAVEQRLRRLQDRSLTQPITTEEVVIAATEPIPASCSGGTHPVMARLPSPTVARSAVQPARLQASAHQKALAKDQTNEGKELAEQGEPDSSTLSLAEKLALFNKLSQPVSKAISTRNRIDTRQRRMNARYQTQPVTLGEVEQVQSGKLIPFSPAVNTSVSTVASTVAPMYAGDLRTKPPLDHNASATDYKFSSSIENSDSPVRSILKSQAWQPLVEGSENKGMLREYGETESKRALTGRDSGMEKYGSFEEAEASYPILNRAREGDSHKESKYAVPRRGSLERANPPITHLGDEPKEFSMAKMNAQGNLDLRDRLPFEEKVEVENVMKRKFSLRAAEFGEPTSEQTGTAAGKTIAQTTAPVSWKPQDSSEQPQEKLCKNPCAMFAAGEIKTPTGEGLLDSPSKTMSIKERLALLKKSGEEDWRNRLSRRQEGGKAPASSLHTQEAGRSLIKKRVTESRESQMTIEERKQLITVREEAWKTRGRGAANDSTQFTVAGRMVKKGLASPTAITPVASPICGKTRGTTPVSKPLEDIEARPDMQLESDLKLDRLETFLRRLNNKVGGMHETVLTVTGKSVKEVMKPDDDETFAKFYRSVDYNMPRSPVEMDEDFDVIFDPYAPKLTSSVAEHKRAVRPKRRVQASKNPLKMLAAREDLLQEYTEQRLNVAFMESKRMKVEKMSSNSNFSEVTLAGLASKENFSNVSLRSVNLTEQNSNNSAVPYKRLMLLQIKGRRHVQTRLVEPRASALNSGDCFLLLSPHCCFLWVGEFANVIEKAKASELATLIQTKRELGCRATYIQTIEEGINTHTHAAKDFWKLLGGQTSYQSAGDPKEDELYEAAIIETNCIYRLMDDKLVPDDDYWGKIPKCSLLQPKEVLVFDFGSEVYVWHGKEVTLAQRKIAFQLAKHLWNGTFDYENCDINPLDPGECNPLIPRKGQGRPDWAIFGRLTEHNETILFKEKFLDWTELKRSNEKNPGELAQHKEDPRTDVKAYDVTRMVSMPQTTAGTILDGVNVGRGYGLVEGHDRRQFEITSVSVDVWHILEFDYSRLPKQSIGQFHEGDAYVVKWKFMVSTAVGSRQKGEHSVRAAGKEKCVYFFWQGRHSTVSEKGTSALMTVELDEERGAQVQVLQGKEPPCFLQCFQGGMVVHSGRREEEEENVQSEWRLYCVRGEVPVEGNLLEVACHCSSLRSRTSMVVLNVNKALIYLWHGCKAQAHTKEVGRTAANKIKEQCPLEAGLHSSSKVTIHECDEGSEPLGFWDALGRRDRKAYDCMLQDPGSFNFAPRLFILSSSSGDFAATEFVYPARAPSVVSSMPFLQEDLYSAPQPALFLVDNHHEVYLWQGWWPIENKITGSARIRWASDRKSAMETVLQYCKGKNLKKPAPKSYLIHAGLEPLTFTNMFPSWEHREDIAEITEMDTEVSNQITLVEDVLAKLCKTIYPLADLLARPLPEGVDPLKLEIYLTDEDFEFALDMTRDEYNALPAWKQVNLKKAKGLF

SEQ ID NO: 7157 - protein, 472 aa, Homo sapiens
MASPPRCSPTAHDRECKLPPPSAPASEYCPGKLSWGTMARALGRFKLSIPHTHLLATLDPLALDREPPPHLLPEKHQVPEKLIWGDQDPLSKIPFKILSGHEHAVSTCHFCVDDTKLLSGSYDCTVKLWDPVDGSVVRDFEHRPKAPVVECSITGDSSRVIAASYDKTVRAWDLETGKLLWKVRYDTFIVSCKFSPDGKYVVSGFDVDHGICIMDAENITTVSVIKDHHTRSITSCCFDPDSQRVASVSLDRCIKIWDVTSQATLLTITKAHSNAISNCCFTFSGHFLCTSSWDKNLKIWNVHTGEFRNCGACVTLMQGHEGSVSSCHFARDSSFLISGGFDRTVAIWDVAEGYRKLSLKGHNDWVMDVAISNNKKWILSASKDRTMRLWNIEEIDEIPLVIKYKKAVGLKLKQCERCDRPFSIFKSDTSSEMFTQCVFCRIDTRGLPADTSSSSSSSERENSPPPRGSKDD

SEQ ID NO: 7158 - protein, 1019 aa, Homo sapiens
MWVQGHSSRASATESVSFSGIVQMDEDTHYDKVEDVVGSHIEDAVTFWAQSINRNKDIMKIGCSLSEVCPQASSVLGNLDPNKIYGGLFSEDQCWYRCKVLKIISVEKCLVRYIDYGNTEILNRSDIVEIPLELQFSSVAKKYKLWGLHIPSDQEVTQFDQGTTFLGSLIFEKEIKMRIKATSEDGTVIAQAEYGSVDIGEEVLKKGFAEKCRLASRTDICEEKKLDPGQLVLRNLKSPIPLWGHRSNQSTFSRPKGHLSEKMTLDLKDENDAGNLITFPKESLAVGDFNLGSNVSLEKIKQDQKLIEENEKLKTEKDALLESYKALELKVEQIAQELQQEKAAAVDLTNHLEYTLKTYIDTRMKNLAAKMEILKEMRHVDISVRFGKDLSDAIQVLDEGCFTTPASLNGLEIIWAEYSLAQENIKTCEYVSEGNILIAQRNEMQQKLYMSVEDFILEVDESSLNKRLKTLQDLSVSLEAVYGQAKEGANSDEILKKFYDWKCDKREEFTSVRSETDASLHRLVAWFQRTLKVFDLSVEGSLISEDAMDNIDEILEKTESSVCKELEIALVDQGDADKEIISNTYSQVLQKIHSEERLIATVQAKYKDSIEFKKQLIEYLNKSPSVDHLLSIKKTLKSLKALLRWKLVEKSNLEESDDPDGSQIEKIKEEITQLRNNVFQEIYHEREEYEMLTSLAQKWFPELPLLHPEIGLLKYMNSGGLLTMSLERDLLDAEPMKELSSKRPLVRSEVNGQIILLKGYSVDVDTEAKVIERAATYHRAWREAEGDSGLLPLIFLFLCKSDPMAYLMVPYYPRANLNAVQANMPLNSEETLKVMKGVAQGLHTLHKADIIHGSLHQNNVFALNREQGIVGDFDFTKSVSQRASVNMMVGDLSLMSPELKMGKPASPGSDLYAYGCLLLWLSVQNQEFEINKDGIPKVDQFHLDDKVKSLLCSLICYRSSMTAEQVLNAECFLMPKEQSVPNPEKDTEYTLYKKEEEIKTENLDKCMEKTRNGEANFDC

SEQ ID NO: 7159 - protein, 1105 aa, Homo sapiens
MLAYCVQDATVVDVEKRRNPSKHYVYIINVTWSDSTSQTIYRRYSKFFDLQMQLLDKFPIEGGQKDPKQRIIPFLPGKILFRRSHIRDVAVKRLKPIDEYCRALVRLPPHISQCDEVFRFFEARPEDVNPPKEDYGSSKRKSVWLSSWAESPKKDVTGADATAEPMILEQYVVVSNYKKQENSELSLQAGEVVDVIEKNESGWWFVSTSEEQGWVPATYLEAQNGTRDDSDINTSKTGEEEKYVTVQPYTSQSKDEIGFEKGVTVEVIRKNLEGWWYIRYLGKEGWAPASYLKKAKDDLPTRKKNLAGPVEIIGNIMEISNLLNKKASGDKETPPAEGEGHEAPIAKKEISLPILCNASNGSAVGVPDRTVSRLAQGSPAVARIAPQRAQISSPNLRTRPPPRRESSLGFQLPKPPEPPSVEVEYYTIAEFQSCISDGISFRGGQKAEVIDKNSGGWWYVQIGEKEGWAPASYIDKRKKPNLSRRTSTLTRPKVPPPAPPSKPKEAEEGPTGASESQDSPRKLKYEEPEYDIPAFGFDSEPELSEEPVEDRASGERRPAQPHRPSPASSLQRARFKVGESSEDVALEEETIYENEGFRPYAEDTLSARGSSGDSDSPGSSSLSLTRKNSPKSGSPKSSSLLKLKAEKNAQAEMGKNHSSASFSSSITINTTCCSSSSSSSSSLSKTSGDLKPRSASDAGIRGTPKVRAKKDADANAGLTSCPRAKPSVRPKPFLNRAESQSQEKMDISTLRRQLRPTGQLRGGLKGSKSEDSELPPQTASEAPSEGSRRSSSDLITLPATTPPCPTKKEWEGPATSYMTCSAYQKVQDSEISFPAGVEVQVLEKQESGWWYVRFGELEGWAPSHYLVLDENEQPDPSGKELDTVPAKGRQNEGKSDSLEKIERRVQALNTVNQSKKATPPIPSKPPGGFGKTSGTPAVKMRNGVRQVAVRPQSVFVSPPPKDNNLSCALRRNESLTATDGLRGVRRNSSFSTARSAAAEAKGRLAERAASQGSDSPLLPAQRNSIPVSPVRPKPIEKSQFIHNNLKDVYVSIADYEGDEETAGFQEGVSMEVLERNPNGWWYCQILDGVKPFKGWVPSNYLEKKN

SEQ ID NO: 7160 - protein, 839 aa, Homo sapiens
MRLALLWALGLLGAGSPLPSWPLPNIGGTEEQQAESEKAPREPLEPQVLQDDLPISLKKVLQTSLPEPLRIKLELDGDSHILELLQNRELVPGRPTLVWYQPDGTRVVSEGHTLENCCYQGRVRGYAGSWVSICTCSGLRGLVVLTPERSYTLEQGPGDLQGPPIISRIQDLHLPGHTCALSWRESVHTQKPPEHPLGQRHIRRRRDVVTETKTVELVIVADHSEAQKYRDFQHLLNRTLEVALLLDTFFRPLNVRVALVGLEAWTQRDLVEISPNPAVTLENFLHWRRAHLLPRLPHDSAQLVTGTSFSGPTVGMAIQNSICSPDFSGGVNMDHSTSILGVASSIAHELGHSLGLDHDLPGNSCPCPGPAPAKTCIMEASTDFLPGLNFSNCSRRALEKALLDGMGSCLFERLPSLPPMAAFCGNMFVEPGEQCDCGFLDDCVDPCCDSLTCQLRPGAQCASDGPCCQNCQLRPSGWQCRPTRGDCDLPEFCPGDSSQCPPDVSLGDGEPCAGGQAVCMHGRCASYAQQCQSLWGPGAQPAAPLCLQTANTRGNAFGSCGRNPSGSYVSCTPRDAICGQLQCQTGRTQPLLGSIRDLLWETIDVNGTELNCSWVHLDLGSDVAQPLLTLPGTACGPGLVCIDHRCQRVDLLGAQECRSKCHGHGVCDSNRHCYCEEGWAPPDCTTQLKATSSLTTGLLLSLLVLLVLVMLGASYWYRARLHQRLCQLKGPTCQYRAAQSGPSERPGPPQRALLARGTKQASALSFPAPPSRPLPPDPVSKRLQSQGPAKPPPPRKPLPADPQGRCPSGDLPGPGAGIPPLVVPSRPAPPPPTVSSLYL

SEQ ID NO: 7161 - protein, 308 aa, Homo sapiens
MATRRLTDAFLLLRNNSIQNRQLLAEQELDELADDRMALVSGISLDPEAAIGVTKRPPPKWVDGVDEIQYDVGRIKQKMKELASLHDKHLNRPTLDDSSEEEHAIEITTQEITQLFHRCQRAVQALPSRARACSEQEGRLLGNVVASLAQALQELSTSFRHAQSGYLKRMKNREERSQHFFDTSVPLMDDGDDNTLYHRGFTEDQLVLVEQNTLMVEEREREIRQIVQSISDLNEIFRDLGAMIVEQGTVLDRIDYNVEQSCIKTEDGLKQLHKAEQYQKKNRKMLVILILFVIIIVLIVVLVGVKSR

SEQ ID NO: 7162 - protein, 560 aa, Homo sapiens
MELENIVANTVLLKAREGGGGNRKGKSKKWRQMLQFPHISQCEELRLSLERDYHSLCERQPIGRLLFREFCATRPELSRCVAFLDGVAEYEVTPDDKRKACGRQLTQNFLSHTGPDLIPEVPRQLVTNCTQRLEQGPCKDLFQELTRLTHEYLSVAPFADYLDSIYFNRFLQWKWLERQPVTKNTFRQYRVLGKGGFGEVCACQVRATGKMYACKKLEKKRIKKRKGEAMALNEKQILEKVNSRFVVSLAYAYETKDALCLVLTLMNGGDLKFHIYHMGQAGFPEARAVFYAAEICCGLEDLHRERIVYRDLKPENILLDDHGHIRISDLGLAVHVPEGQTIKGRVGTVGYMAPEVVKNERYTFSPDWWALGCLLYEMIAGQSPFQQRKKKIKREEVERLVKEVPEEYSERFSPQARSLCSQLLCKDPAERLGCRGGSAREVKEHPLFKKLNFKRLGAGMLEPPFKPDPQAIYCKDVLDIEQFSTVKGVELEPTDQDFYQKFATGSVPIPWQNEMVETECFQELNVFGLDGSVPPDLDWKGQPPAPPKKGLLQRLFSRQR

SEQ ID NO: 7163 - protein, 454 aa, Homo sapiens [sequence omitted]

SEQ ID NO: 7164 - protein, 511 aa, Homo sapiens
MDEESLESALQTYRAQLQQVELALGAGLDSSEQADLRQLQGDLKELIELTEASLVSVRKSSLLAALDEERPGRQEDAEYQAFREAITEAVEAPAAARGSGSETVPKAEAGPESAAGGQEEEEGEDEEELSGTKVSAPYYSSWGTLEYHNAMVVGTEEAEDGSAGVRVLYLYPTHKSLKPCPFFLEGKCRFKENCRFSHGQVVSLDELRPFQDPDLSSLQAGSACLAKHQDGLWHAARITDVDNGYYTVKFDSLLLREAVVEGDGILPPLRTEATESDSDSDGTGDSSYARVVGSDAVDSGTCSSAFAGWEVHTRGIGSRLLTKMGYEFGKGLGRHAEGRVEPIHAVVLPRGKSLDQCVETLQKQTRVGKAGTNKPPRCRGRGARPGGRPAPRNVFDFLNEKLQGQAPGALEAGAAPAGRRSKDMYHASKSAKRALSLRLFQTEEKIERTQRDIRSIQEALARNAGRHSVASAQLQEKLAGAQRQLGQLRAQEAGLQQEQRKADTHKKMTEF

SEQ ID NO: 7165 - protein, 1214 aa, Homo sapiens
MDISTRSKDPGSAERTAQKRKFPSPPHSSNGHSPQDTSTSPIKKKKKPGLLNSNNKEQSELRHGPFYYMKQPLTTDPVDVVPQDGRNDFYCWVCHREGQVLCCELCPRVYHAKCLRLTSEPEGDWFCPECEKITVAECIETQSKAMTMLTIEQLSYLLKFAIQKMKQPGTDAFQKPVPLEQHPDYAEYIFHPMDLCTLEKNAKKKMYGCTEAFLADAKWILHNCIIYNGGNHKLTQIAKVVIKICEHEMNEIEVCPECYLAACQKRDNWFCEPCSNPHPLVWAKLKGFPFWPAKALRDKDGQVDARFFGQHDRAWVPINNCYLMSKEIPFSVKKTKSIFNSAMQEMEVYVENIRRKFGVFNYSPFRTPYTPNSQYQMLLDPTNPSAGTAKIDKQEKVKLNFDMTASPKILMSKPVLSGGTGRRISLSDMPRSPMSTNSSVHTGSDVEQDAEKKATSSHFSASEESMDFLDKSTASPASTKTGQAGSLSGSPKPFSPQLSAPITTKTDKTSTTGSILNLNLDRSKAEMDLKELSESVQQQSTPVPLISPKRQIRSRFQLNLDKTIESCKAQLGINEISEDVYTAVEHSDSEDSEKSDSSDSEYISDDEQKSKNEPEDTEDKEGCQMDKEPSAVKKKPKPTNPVEIKEELKSTSPASEKADPGAVKDKASPEPEKDFSEKAKPSPHPIKDKLKGKDETDSPTVHLGLDSDSESELVIDLGEDHSGREGRKNKKEPKEPSPKQDVVGKTPPSTTVGSHSPPETPVLTRSSAQTSAAGATATTSTSSTVTVTAPAPAATGSPVKKQRPLLPKETAPAVQRVVWNSSSKFQTSSQKWHMQKMQRQQQQQQQQNQQQQPQSSQGTRYQTRQAVKAVQQKEITQSPSTSTITLVTSTQSSPLVTSSGSMSTLVSSVNADLPIATASADVAADIAKYTSKMMDAIKGTMTEIYNDLSKNTTGSTIAEIRRLRIEIEKLQWLHQQELSEMKHNLELTMAEMRQSLEQERDRLIAEVKKQLELEKQQAVDETKKKQWCANCKKEAIFYCCWNTSYCDYPCQQAHWPEHMKSCTQSATAPQQEADAEVNTETLNKSSQGSSSSTQSAPSETASASKEKETSAEKSKESGSTLDLSGSRETPSSILLGSNQGSVSKRCDKQPAYAPTTTDHQPHPNYPAQKYHSRSNKSSWSSSDEKRGSTRSDHNTSTSTKSLLPKESRLDTFWD

SEQ ID NO: 7166 - protein, 844 aa, Homo sapiens
MGPGAPFARVGWPLPLLVVMAAGVAPVWASHSPHLPRPHSRVPPHPSSERRAVYIGALFPMSGGWPGGQACQPAVEMALEDVNSRRDILPDYELKLIHHDSKCDPGQATKYLYELLYNDPIKIILMPGCSSVSTLVAEAARMWNLIVLSYGSSSPALSNRQRFPTFFRTHPSATLHNPTRVKLFEKWGWKKIATIQQTTEVFTSTLDDLEERVKEAGIEITFRQSFFSDPAVPVKNLKRQDARIIVGLFYETEARKVFCEVYKERLFGKKYVWFLIGWYADNWFKIYDPSINCTVDEMTEAVEGHITTEIVMLNPANTRSISNMTSQEFVEKLTKRLKRHPEETGGFQEAPLAYDAIWALALALNKTSGGGGRSGVRLEDFNYNNQTITDQIYRAMNSSSFEGVSGHVVFDASGSRMAWTLIEQLQGGSYKKIGYYDSTKDDLSWSKTDKWIGGSPPADQTLVIKTFRFLSQKLFISVSVLSSLGIVLAVVCLSFNIYNSHVRYIQNSQPNLNNLTAVGCSLALAAVFPLGLDGYHIGRNQFPFVCQARLWLLGLGFSLGYGSMFTKIWWVHTVFTKKEEKKEWRKTLEPWKLYATVGLLVGMDVLTLAIWQIVDPLHRTIETFAKEEPKEDIDVSILPQLEHCSSRKMNTWLGIFYGYKGLLLLLGIFLAYETKSVSTEKINDHRAVGMAIYNVAVLCLITAPVTMILSSQQDAAFAFASLAIVFSSYITLVVLFVPKMRRLITRGEWQSEAQDTMKTGSSTNNNEEEKSRLLEKENRELEKIIAEKEERVSELRHQLQSRQQLRSRRHPPTPPEPSGGLPRGPPEPPDRLSCDGSRVHLLYK

SEQ ID NO: 7167 - protein, 408 aa, Homo sapiens
MDGTEGSAGQPGPAERSHRSSVSSVGAREVQLKPKHQPYKLGRQWPELLLRFTSAPDDDVAMDEPFLQFRRNVFFPKRRELQIHDEEVLRLLYEEAKGNVLAARYPCDVEDCEALGALVCRVQLGPYQPGRPAACDLREKLDSFLPAHLCKRGQSLFAALRGRGARAGPGEQGLLNAYRQVQEVSSDGGCEAALGTHYRAYLLKCHELPFYGCAFFHGEVDKPAQGFLHRGGRKPVSVAISLEGVHVIDSREKHVLLGLRFQELSWDHTSPEEEEPILWLEFDGDSEGTPVNKLLKIYSKQAELMSSLIEYCIELSQAAEPAGPQDSATGSPSDPSSSLAPVQRPKLRRQGSVVSSRIQHLSTIDYVEDGKGIRRVKPKRTTSFFSRQLSLGQGSYTVVQPGDSLEQG

SEQ ID NO: 7168 - protein, 619 aa, Homo sapiens
MPQLNGGGGDDLGANDELISFKDEGEQEEKSSENSSAERDLADVKSSLVNESETNQNSSSDSEAERRPPPRSESFRDKSRESLEEAAKRQDGGLFKGPPYPGYPFIMIPDLTSPYLPNGSLSPTARTLHFQSGSTHYSAYKTIEHQIAVQYLQMKWPLLDVQAGSLQSRQALKDARSPSPAHIVSNKVPVVQHPHHVHPLTPLITYSNEHFTPGNPPPHLPADVDPKTGIPRPPHPPDISPYYPLSPGTVGQIPHPLGWLVPQQGQPVYPITTGGFRHPYPTALTVNASMSRFPPHMVPPHHTLHTTGIPHPAIVTPTVKQESSQSDVGSLHSSKHQDSKKEEEKKKPHIKKPLNAFMLYMKEMRAKVVAECTLKESAAINQILGRRWHALSREEQAKYYELARKERQLHMQLYPGWSARDNYGKKKKRKRDKQPGETNEHSECFLNPCLSLPPITDLSAPKKCRARFGLDQQNNWCGPCRRKKKCVRYIQGEGSCLSPPSSDGSLLDSPPPSPNLLGSPPRDAKSQTEQTQPLSLSLKPDPLAHLSMMPPPPALLLAEATHKASALCPNGALDLPPAALQPAAPSSSIAQPSTSSLHSHSSLAGTQPQPLSLVTKSLE

SEQ ID NO: 7169 - protein, 545 aa, Homo sapiens
MAEPSGSPVHVQLPQQAAPVTAAAAAAPAAATAAPAPAAPAAPAPAPAPAAQAVGWPICRDAYELQEVIGSGATAVVQAALCKPRQERVAIKRINLEKCQTSMDELLKEIQAMSQCSHPNVVTYYTSFVVKDELWLVMKLLSGGSMLDIIKYIVNRGEHKNGVLEEAIIATILKEVLEGLDYLHRNGQIHRDLKAGNILLGEDGSVQIADFGVSAFLATGGDVTRNKVRKTFVGTPCWMAPEVMEQVRGYDFKADMWSFGITAIELATGAAPYHKYPPMKVLMLTLQNDPPTLETGVEDKEMMKKYGKSFRKLLSLCLQKDPSKRPTAAELLKCKFFQKAKNREYLIEKLLTRTPDIAQRAKKVRRVPGSSGHLHKTEDGDWEWSDDEMDEKSEEGKAAFSQEKSRRVKEENPEIAVSASTIPEQIQSLSVHDSQGPPNANEDYREASSCAVNLVLRLRNSRKELNDIRFEFTPGRDTADGVSQELFSAGLVDGHDVVIVAANLQKIVDDPKALKTLTFKLASGCDGSEIPDEVKLIGFAQLSVS

SEQ ID NO: 7170 - protein, 255 aa, Homo sapiens
MAEPSAATQSHSISSSSFGAEPSAPGGGGSPGACPALGTKSCSSSCADSFVSSSSSQPVSLFSTSQVHDLIFWRDVKKTGFVFGTTLIMLLSLAAFSVISVVSYLILALLSVTISFRIYKSVIQAVQKSEEGHPFKAYLDVDITLSSEAFHNYMNAAMVHINRALKLIIRLFLVEDLVDSLKLAVFMWLMTYVGAVFNGITLLILAELLIFSVPIVYEKYKTQIDHYVGIARDQTKSIVEKIQAKLPGIAKKKAE

SEQ ID NO: 7171 - protein, 2296 aa, Homo sapiens
MLRGPGPGLLLLAVQCLGTAVPSTGASKSKRQAQQMVQPQSPVAVSQSKPGCYDNGKHYQINQQWERTYLGNALVCTCYGGSRGFNCESKPEAEETCFDKYTGNTYRVGDTYERPKDSMIWDCTCIGAGRGRISCTIANRCHEGGQSYKIGDTWRRPHETGGYMLECVCLGNGKGEWTCKPIAEKCFDHAAGTSYVVGETWEKPYQGWMMVDCTCLGEGSGRITCTSRNRCNDQDTRTSYRIGDTWSKKDNRGNLLQCICTGNGRGEWKCERHTSVQTTSSGSGPFTDVRAAVYQPQPHPQPPPYGHCVTDSGVVYSVGMQWLKTQGNKQMLCTCLGNGVSCQETAVTQTYGGNSNGEPCVLPFTYNGRTFYSCTTEGRQDGHLWCSTTSNYEQDQKYSFCTDHTVLVQTRGGNSNGALCHFPFLYNNHNYTDCTSEGRRDNMKWCGTTQNYDADQKFGFCPMAAHEEICTTNEGVMYRIGDQWDKQHDMGHMMRCTCVGNGRGEWTCIAYSQLRDQCIVDDITYNVNDTFHKRHEEGHMLNCTCFGQGRGRWKCDPVDQCQDSETGTFYQIGDSWEKYVHGVRYQCYCYGRGIGEWHCQPLQTYPSSSGPVEVFITETPSQPNSHPIQWNAPQPSHISKYILRWRPKNSVGRWKEATIPGHLNSYTIKGLKPGVVYEGQLISIQQYGHQEVTRFDFTTTSTSTPVTSNTVTGETTPFSPLVATSESVTEITASSFVVSWVSASDTVSGFRVEYELSEEGDEPQYLDLPSTATSVNIPDLLPGRKYIVNVYQISEDGEQSLILSTSQTTAPDAPPDTTVDQVDDTSIVVRWSRPQAPITGYRIVYSPSVEGSSTELNLPETANSVTLSDLQPGVQYNITIYAVEENQESTPVVIQQETTGTPRSDTVPSPRDLQFVEVTDVKVTIMWTPPESAVTGYRVDVIPVNLPGEHGQRLPISRNTFAEVTGLSPGVTYYFKVFAVSHGRESKPLTAQQTTKLDAPTNLQFVNETDSTVLVRWTPPRAQITGYRLTVGLTRRGQPRQYNVGPSVSKYPLRNLQPASEYTVSLVAIKGNQESPKATGVFTTLQPGSSIPPYNTEVTETTIVITWTPAPRIGFKLGVRPSQGGEAPREVTSDSGSIVVSGLTPGVEYVYTIQVLRDGQERDAPIVNKVVTPLSPPTNLHLEANPDTGVLTVSWERSTTPDITGYRITTTPTNGQQGNSLEEVVHADQSSCTFDNLSPGLEYNVSVYTVKDDKESVPISDTIIPAVPPPTDLRFTNIGPDTMRVTWAPPPSIDLTNFLVRYSPVKNEEDVAELSISPSDNAVVLTNLLPGTEYVVSVSSVYEQHESTPLRGRQKTGLDSPTGIDFSDITANSFTVHWIAPRATITGYRIRHHPEHFSGRPREDRVPHSRNSITLTNLTPGTEYVVSIVALNGREESPLLIGQQSTVSDVPRDLEVVAATPTSLLISWDAPAVTVRYYRITYGETGGNSPVQEFTVPGSKSTATISGLKPGVDYTITVYAVTGRGDSPASSKPISINYRTEIDKPSQMQVTDVQDNSISVKWLPSSSPVTGYRVTTTPKNGPGPTKTKTAGPDQTEMTIEGLQPTVEYVVSVYAQNPSGESQPLVQTAVTTIPAPTDLKFTQVTPTSLSAQWTPPNVQLTGYRVRVTPKEKTGPMKEINLAPDSSSVVVSGLMVATKYEVSVYALKDTLTSRPAQGVVTTLENVSPPRRARVTDATETTITISWRTKTETITGFQVDAVPANGQTPIQRTIKPDVRSYTITGLQPGTDYKIYLYTLNDNARSSPVVIDASTAIDAPSNLRFLATTPNSLLVSWQPPRARITGYIIKYEKPGSPPREVVPRPRPGVTEATITGLEPGTEYTIYVIALKNNQKSEPLIGRKKTDELPQLVTLPHPNLHGPEILDVPSTVQKTPFVTHPGYDTGNGIQLPGTSGQQPSVGQQMIFEEHGFRRTTPPTTATPIRHRPRPYPPNVGEEIQIGHIPREDVDYHLYPHGPGLNPNASTGQEALSQTTISWAPFQDTSEYIISCHPVGTDEEPLQFRVPGTSTSATLTGLTRGATYNVIVEALKDQQRHKVREEVVTVGNSVNEGLNQPTDDSCFDPYTVSHYAVGDEWERMSESGFKLLCQCLGFGSGHFRCDSSRWCHDNGVNYKIGEKWDRQGENGQMMSCTCLGNGKGEFKCDPHEATCYDDGKTYHVGEQWQKEYLGAICSCTCFGGQRGWRCDNCRRPGGEPSPEGTTGQSYNQYSQRYHQRTNTNVNCPIECFMPLDVQADREDSRE

SEQ ID NO: 7172 - protein, 1330 aa, Homo sapiens
MMEIQMDEGGGVVVYQDDYCSGSVMSERVSGLAGSIYREFERLIHCYDEEVVKELMPLVVNVLENLDSVLSENQEHEVELELLREDNEQLLTQYEREKALRRQAEEKFIEFEDALEQEKKELQIQVEHYEFQTRQLELKAKNYADQISRLEERESEMKKEYNALHQRHTEMIQTYVEHIERSKMQQVGGNSQTESSLPGRRKERPTSLNVFPLADGTVRAQIGGKLVPAGDHWHLSDLGQLQSSSSYQCPQDEMSESGQSSAAATPSTTGTKSNTPTSSVPSAAVTPLNESLQPLGDYGVGSKNSKRAREKRDSRNMEVQVTQEMRNVSIGMGSSDEWSDVQDIIDSTPELDMCPETRLDRTGSSPTQGIVNKAFGINTDSLYHELSTAGSEVIGDVDEGADLLGEFSGMGKEVGNLLLENSQLLETKNALNVVKNDLIAKVDQLSGEQEVLRGELEAAKQAKVKLENRIKELEEELKRVKSEAIIARREPKEEAEDVSSYLCTESDKIPMAQRRRFTRVEMARVLMERNQYKERLMELQEAVRWTEMIRASREHPSVQEKKKSTIWQFFSRLFSSSSSPPPAKRPYPSVNIHYKSPTTAGFSQRRNHAMCPISAGSRPLEFFPDDDCTSSARREQKREQYRQVREHVRNDDGRLQACGWSLPAKYKQLSPNGGQEDTRMKNVPVPVYCRPLVEKDPTMKLWCAAGVNLSGWRPNEDDAGNGVKPAPGRDPLTCDREGDGEPKSAHTSPEKKKAKELPEMDATSSRVWILTSTLTTSKVVIIDANQPGTVVDQFTVCNAHVLCISSIPAASDSDYPPGEMFLDSDVNPEDPGADGVLAGITLVGCATRCNVPRSNCSSRGDTPVLDKGQGEVATIANGKVNPSQSTEEATEATEVPDPGPSEPETATLRPGPLTEHVFTDPAPTPSSGPQPGSENGPEPDSSSTRPEPEPSGDPTGAGSSAAPTMWLGAQNGWLYVHSAVANWKKCLHSIKLKDSVLSLVHVKGRVLVALADGTLAIFHRGEDGQWDLSNYHLMDLGHPHHSIRCMAVVYDRVWCGYKNKVHVIQPKTMQIEKSFDAHPRRESQVRQLAWIGDGVWVSIRLDSTLRLYHAHTHQHLQDVDIEPYVSKMLGTGKLGFSFVRITALLVAGSRLWVGTGNGVVISIPLTETVVLHRGQLLGLRANKTSPTSGEGARPGGIIHVYGDDSSDRAASSFIPYCSMAQAQLCFHGHRDAVKFFVSVPGNVLATLNGSVLDSPAEGPGPAAPASEVEGQKLRNVLVLSGGEGYIDFRIGDGEDDETEEGAGDMSQVKPVLSKAERSHIIVWQVSYTPE

SEQ ID NO: 7173 - protein, 433 aa, Homo sapiens
MQRMIQQFAAEYTSKNSSTQDPSQPNSTKNQSLPKASPVTTSPTAATTQNPVLSKLLMADQDSPLDLTVRKSQSEPSEQDGVLDLSTKKSPCAGSTSLSHSPGCSSTQGNGRPGRPSQYRPDGLRSGDGVPPRSLQDGTREGFGHSTSLKVPLARSLQISEELLSRNQLSTAASLGPSGLQNHGQHLILSREASWAKPHYEFNLSRMKFRGNGALSNISDLPFLAENSAFPKMALQAKQDGKKDVSHSSPVDLKIPQVRGMDLSWESRTGDQYSYSSLVMGSQTESALSKKLRAILPKQSRKSMLDAGPDSWGSDAEQSTSGQPYPTSDQEGDPGSKQPRKKRGRYRQYNSEILEEAISVVMSGKMSVSKAQSIYGIPHSTLEYKVKERLGTLKNPPKKKMKLMRSEGPDVSVKIELDPQGEAAQSANESKNE

SEQ ID NO: 7174 - protein, 1822 aa, Homo sapiens
MSEILCQWLNKELKVSRTVSPKSFAKAFSSGYLLGEVLHKFELQDDFSEFLDSRVSSAKLNNFSRLEPTLNLLGVQFDQNVAHGIITEKPGVATKLLYQLYIALQKKKKSGLTGVEMQTMQRLTNLRLQNMKSDTFQERLRHMIPRQTDFNLMRITYRFQEKYKHVKEDLAHLHFEKLERFQKLKEEQRCFDIEKQYLNRRRQNEIMAKIQAAIIQIPKPASNRTLKALEAQKMMKKKKEAEDVADEIKKFEALIKKDLQAKESASKTSLDTAGQTTTDLLNTYSDDEYIKKIQKRLEEDAFAREQREKRRRKLLMDQLIAHEAQEEAYREEQLINRLMRQSQQERRIAVQLMHVRHEKEVLWQNRIFREKQHEERRLKDFQDALDREAALAKQAKIDFEEQFLKEKRFHDQIAVERAQARYEKHYSVCAEILDQIVDLSTKVADYRMLTNNLIPYKLMHDWKELFFNAKPIYEQASVKTLPANPSREQLTELEKRDLLDTNDYEEYKNMVGEWALPEEMVDNLPPSNNCILGHILHRLAEKSLPPRAESTTPELPSFAVKGCLLGKTLSGKTTILRSLQKDFPIQILSIDTLVQEAIQAFHDNEKVSEVLPIQKNDEEDALPVLQEEIKESQDPQHVFSAGPVSDEVLPETEGETMLSANADKTPKAEEVKSSDSFLKLTTRAQLGAKSEQLLKKGKSIPDVLLVDIIVNAINEIPVNQDCILDGFPMTLNQAQLLEEALTGCNRNLTEVERKKAQKSTLAIDPATSKEIPLPSPAFDFVILLDVSDTSSMSRMNDIIAEELSYKTAHEDISQRVAAENQDKDGDQNLRDQIQHRIIGFLDNWPLLEQWFSEPENILIKINAEIDKESLCEKVKEILTTEIAKKKNKVEKKLEEKEAEKKAAASLAELPLPTPPPAPPPEPEKEKEIHQSHVASKTPTAKGKPQSEAPHGKQESLQEGKGKKGETALKRKGSPKGKSSGGKVPVKKSPADSTDTSPVAIVPQPPKPGSEEWVYVNEPVPEEMPLFLVPYWELIENSYINTIKTVLRHLREDQHTVLAYLYEIRTSFQEFLKRPDHKQDFVAQWQADFNSLPDDLWDDEETKAELHQRVNDLRDRLWDICDARKEEAEQERLDIINESWLQDTLGMTMNHFFSLMQAELNRFQDTKRLLQDYYWGMESKIPVEDNKRFTRIPLVQLDSKDNSESQLRIPLVPRISISLETVTPKPKTKSVLKGKMDNSLENVESNFEADEKLVMDTWQQASLAVSHMVAAEIHQRLMEEEKENQPADPKEKSPQMGANKKVKKEPPKKKQEDKKPKGKSPPMAEATPVIVTTEEIAEIKRKNELRVKIKEEHLAALQFEEIATQFRLELIKTKALALLEDLVTKVVDVYKLMEKWLGERYLNEMASTEKLTDVARYHIETSTKIQNELYLSQEDFFINGNIKVFPDPPPSIRPPPVEKEEDGTLTIEQLDSLRDQFLDMAPKGIIGNKAFTDILIDLVTLNLGTNNFPSNWMHLTQPELQELTSLLTVNSEFVDWRKFLLVTSMPWPIPLEEELLETLQKFKAVDKEQLGTITFEQYMQAGLWFTGDEDIKIPENPLEPLPFNRQEHLIEFFFRLFADYEKDPPQLDYTQMLLYFACHPDTVEGVYRALSVAVGTHVFQQVKASIPSAEKTSSTDAGPAEEFPEPEENAAREERKLKDDTEKREQKDEEIPENANNEKMSMETLLKVFKGGSEAQDSNRFASHLKIENIYAEGFIKTFQDLGAKNLEPIEVAVLLKHPFIQDLISNYSDYKFPDIKIILQRSEHVQGSDGERSPSRHTEEKK

SEQ ID NO: 7175 - protein, 556 aa, Homo sapiens
MMRVNGDDDSVAALSFLYDYYMGPKEKRILSSSTGGRNDQGKRYYHGMEYETDLTPLESPTHLMKFLTENVSGTPEYPDLLKKNNLMSLEGALPTPGKAAPLPAGPSKLEAGSVDSYLLPTTDMYDNGSLNSLFESIHGVPPTQRWQPDSTFKDDPQESMLFPDILKTSPEPPCPEDYPSLKSDFEYTLGSPKAIHIKSGESPMAYLNKGQFYPVTLRTPAGGKGLALSSNKVKSVVMVVFDNEKVPVEQLRFWKHWHSRQPTAKQRVIDVADCKENFNTVEHIEEVAYNALSFVWNVNEEAKVFIGVNCLSTDFSSQKGVKGVPLNLQIDTYDCGLGTERLVHRAVCQIKIFCDKGAERKMRDDERKQFRRKVKCPDSSNSGVKGCLLSGFRGNETTYLRPETDLETPPVLFIPNVHFSSLQRSGGAAPSAGPSSSNRLPLKRTCSPFTEEFEPLPSKQAKEGDLQRVLLYVRRETEEVFDALMLKTPDLKGLRNAISEKYGFPEENIYKVYKKCKRGILVNMDNNIIQHYSNHVAFLLDMGELDGKIQIILKEL

SEQ ID NO: 7176 - protein, 2548 aa, Homo sapiens
MNINDGGRRRFEDNEHTLRIYPGAISEGTIYCPIPARKNSTAAEVIESLINKLHLDKTKCYVLAEVKEFGGEEWILNPTDCPVQRMMLWPRMALENRLSGEDYRFLLREKNLDGSIHYGSLQSWLRVTEERRRMMERGFLPQPQQKDFDDLCSLPDLNEKTLLENLRNRFKHEKIYTYVGSILIVINPFKFLPIYNPKYVKMYDNHQLGKLEPHIYAVADVAYHAMLQRKKNQCIVISGESGSGKTQSTNFLIHHLTALSQKGFASGVEQIILGAGPVLEAFGNAKTAHNNNSSRFGKFIQVNYQETGTVLGAYVEKYLLEKSRLVYQEHNERNYHVFYYLLAGASEDERSAFHLKQPEEYHYLNQITKKPLRQSWDDYCYDSEPDCFTVEGEDLRHDFERLQLAMEMVGFLPKTRRQIFSLLSAILHLGNICYKKKTYRDDSIDICNPEVLPIVSELLEVKEEMLFEALVTRKTVTVGEKLILPYKLAEAVTVRNSMAKSLYSALFDWIVFRINHALLNSKDLEHNTKTLSIGVLDIFGFEDYENNSFEQFCINFANERLQHYFNQHIFKLEQEEYRTEGISWHNIDYIDNTCCINLISKKPTGLLHLLDEESNFPQATNQTLLDKFKHQHEDNSYIEFPAVMEPAFIIKHYAGKVKYGVKDFREKNTDHMRPDIVALLRSSKNAFISGMIGIDPVAVFRWAILRAFFRAMVAFREAGKRNIHRKTGHDDTAPCAILKSMDSFSFLQHPVHQRSLEILQRCKEEKYSITRKNPRTPLSDLQGMNALNEKNQHDTFDIAWNGRTGIRQSRLSSGTSLLDKDGIFANSTSSKLLERAHGILTRNKNFKSKPALPKHLLEVNSLKHLTRLTLQDRITKSLLHLHKKKKPPSISAQFQASLSKLMETLGQAEPYFVKCIRSNAEKLPLRFSDVLVLRQLRYTGMLETVRIRQSGYSSKYSFQDFVSHFHVLLPRNIIPSKFNIQDFFRKINLNPDNYQVGKTMVFLKEQERQHLQDLLHQEVLRRIILLQRWFRVLLCRQHFLHLRQASVIIQRFWRNYLNQKQVRDAAVQKDAFVMASAAALLQASWRAHLERQRYLELRAAAIVIQQKWRDYYRRRHMAAICIQARWKAYRESKRYQEQRKKIILLQSTCRGFRARQRFKALKEQRLRETKPEVGLVNIKGYGSLEIQGSDPSGWEDCSFDNRIKAIEECKSVIESNRISRESSVDCLKESPNKQQERAQSQSGVDLQEDVLVRERPRSLEDLHQKKVGRAKRESRRMRELEQAIFSLELLKVRSLGGISPSEDRRWSTELVPEGLQSPRGTPDSESSQGSLELLSYEESQKSKLESVISDEGDLQFPSPKISSSPKFDSRDNALSASNETSSAEHLKDGTMKEMVVCSSESITCKPQLKDSFISNSLPTFFYIPQQDPLKTNSQLDTSIQRNKLLENEDTAGEALTLDINRETRRYHCSGKDQIVPSLNTESSNPVLKKLEKLNTEKEERQKQLQQQNEKEMMEQIRQQTDILEKERKAFKTIEKPRIGECLVAPSSYQSKQRVERPSSLLSLNTSNKGELNVLGSLSLKDAALAQKDSSSAHLPPKDRPVTVFFERKGSPCQSSTVKELSKTDRMGTQLNVACKLSNNRISKREHFRPTQSYSHNSDDLSREGNARPIFFTPKDNMSIPLVSKEALNSKNPQLHKEDEPAWKPVKLAGPGQRETSQRFSSVDEQAKLHKTMSQGEITKLAVRQKASDSDIRPQRAKMRFWAKGKQGEKKTTRVKPTTQSEVSPLFAGTDVIPAHQFPDELAAYHPTPPLSPELPGSCRKEFKENKEPSPKAKRKRSVKISNVALDSMHWQNDSVQIIASVSDLKSMDEFLLKKVNDLDNEDSKKDTLVDVVFKKALKEFRQNIFSFYSSALAMDDGKSIRYKDLYALFEQILEKTMRLEQRDSLGESPVRVWVNTFKVFLDEYMNEFKTSDCTATKVPKTERKKRRKKETDLVEEHNGHIFKATQYSIPTYCEYCSSLIWIMDRASVCKLCKYACHKKCCLKTTAKCSKKYDPELSSRQFGVELSRLTSEDRTVPLVVEKLINYIEMHGLYTEGIYRKSGSTNKIKELRQGLDTDAESVNLDDYNIHVIASVFKQWLRDLPNPLMTFELYEEFLRAMGLQERKETIRGVYSVIDQLSRTHLNTLERLIFHLVRIALQEDTNRMSANALAIVFAPCILRCPDTTDPLQSVQDISKTTTCVELIVVEQMNKYKARLKDISSLEFAENKAKTRLSLIRRSMGKGRIRRGNYPGPSSPVVVRLPSVSDVSEETLTSEAAMETDITEQQQAAMQQEERVLTEQIENLQKEKEELTFEMLVLEPRASDDETLESEASIGTADSSENLNMESEYAISEKSERSLALSSLKTAGKSEPSSKLRKQLKKQQDSLDVVDSSVSSLCLSNTASSHGTRKLFQIYSKSPFYRAASGNEALGMEGPLGQTKFLEDKPQFISRGTFNPEKGKQKLKNVKNSPQKTKETPEGTVMSGRRKTVDPDCTSNQQLALFGNNEFMV

SEQ ID NO: 7177 - protein, 1319 aa, Homo sapiens
MDALNRNQIGPGCQTQTMVQKGPLDLIETGKGLKVQTDKPHLVSLGSGRLSTAITLLPLEEGRTVIGSAARDISLQGPGLAPEHCYIENLRGTLTLYPCGNACTIDGLPVRQPTRLTQGCMLCLGQSTFLRFNHPAEAKWMKSMIPAGGRAPGPPYSPVPAESESLVNGNHTPQTATRGPSACASHSSLVSSIEKDLQEIMDSLVLEEPGAAGKKPAATSPLSPMANGGRYLLSPPTSPGAMSVGSSYENTSPAFSPLSSPASSGSCASHSPSGQEPGPSVPPLVPARSSSYHLALQPPQSRPSGARSESPRLSRKGGHERPPSPGLRGLLTDSPAATVLAEARRATESPRLGGQLPVVAISLSEYPASGALSQPTSIPGSPKFQPPVPAPRNKIGTLQDRPPSPFREPPGSERVLTTSPSRQLVGRTFSDGLATRTLQPPESPRLGRRGLDSMRELPPLSPSLSRRALSPLPTRTTPDPKLNREVAESPRPRRWAAHGASPEDFSLTLGARGRRTRSPSPTLGESLAPHKGSFSGRLSPAYSLGSLTGASPCQSPCVQRKLSSGDLRVPVTRERKNSITEISDNEDDLLEYHRRQRQERLREQEMERLERQRLETILNLCAEYSRADGGPEAGELPSIGEATAALALAGRRPSRGLAGASGRSSEEPGVATQRLWESMERSDEENLKEECSSTESTQQEHEDAPSTKLQGEVLALEEERAQVLGHVEQLKVRVKELEQQLQESAREAEMERALLQGEREAERALLQKEQKAVDQLQEKLVALETGIQKERDKEAEALETETKLFEDLEFQQLERESRVEEERELAGQGLLRSKAELLRSIAKRKERLAILDSQAGQIRAQAVQESERLARDKNASLQLLQKEKEKLTVLERRYHSLTGGRPFPKTTSTLKEVYRSKMDGEATSPLPRTRSGPLPSSSGSSSSSSQLSVATLGRSPSPKSALLTQNGTGSLPRNLAATLQDIETKRQLALQQKGQQVIEEQRRRLAELKQKAAAEAQCQWDALHGAAPFPAGPSGFPPLMHHSILHHLPAGRERGEEGEHAYDTLSLESSDSMETSISTGGNSACSPDNMSSASGLDMGKIEEMEKMLKEAHAEKNRLMESREREMELRRQALEEERRRREQVERRLQSESARRQQLVEKEVKMREKQFSQARPLTRYLPIRKEDFDLKTHIESSGHGVDTCLHVVLSSKVCRGYLVKMGGKIKSWKKRWFVFDRLKRTLSYYVDKHETKLKGVIYFQAIEEVYYDHLRSAAKSPNPALTFCVKTHDRLYYMVAPSAEAMRIWMDVIVTGAEGYTQFMN

SEQ ID NO: 7178 - protein, 341 aa, Homo sapiens
MAQESPKNSAAEIPVTSNGEVDDSREHSFNRDLKHSLPSGLGLSETQITSHGFDNTKEGVIEAGAFQGGQRTQTKSGPVILADEIKNPAMEKLELVRKWSLNTYKCTRQIISEKLGRGSRTVDLELEAQIDILRDNKKKYENILKLAQTLSTQLFQMVHTQRQLGDAFADLSLKSLELHEEFGYNADTQKLLAKNGETLLGAINFFIASVNTLVNKTIEDTLMTVKQYESARIEYDAYRTDLEELNLGPRDANTLPKIEQSQHLFQAHKEKYDKMRNDVSVKLKFLEENKVKVLHNQLVLFHNAIAAYFAGNQKQLEQTLKQFHIKLKTPGVDAPSWLEEQ

SEQ ID NO: 7179 - protein, 667 aa, Homo sapiens
MHHQQRMAALGTDKELSDLLDFSAMFSPPVSSGKNGPTSLASGHFTGSNVEDRSSSGSWGNGGHPSPSRNYGDGTPYDHMTSRDLGSHDNLSPPFVNSRIQSKTERGSYSSYGRESNLQGCHQQSLLGGDMDMGNPGTLSPTKPGSQYYQYSSNNPRRRPLHSSAMEVQTKKVRKVPPGLPSSVYAPSASTADYNRDSPGYPSSKPATSTFPSSFFMQDGHHSSDPWSSSSGMNQPGYAGMLGNSSHIPQSSSYCSLHPHERLSYPSHSSADINSSLPPMSTFHRSGTNHYSTSSCTPPANGTDSIMANRGSGAAGSSQTGDALGKALASIYSPDHTNNSFSSNPSTPVGSPPSLSAGTAVWSRNGGQASSSPNYEGPLHSLQSRIEDRLERLDDAIHVLRNHAVGPSTAMPGGHGDMHGIIGPSHNGAMGGLGSGYGTGLLSANRHSLMVGTHREDGVALRGSHSLLPNQVPVPQLPVQSATSPDLNPPQDPYRGMPPGLQGQSVSSGSSEIKSDDEGDENLQDTKSSEDKKLDDDKKDIKSITSNNDDEDLTPEQKAEREKERRMANNARERLRVRDINEAFKELGRMVQLHLKSDKPQTKLLILHQAVAVILSLEQQVRERNLNPKAACLKRREEEKVSSEPPPLSLAGPHPGMGDASNHMGQM

SEQ ID NO: 7180 - protein, 706 aa, Homo sapiens
MSSDASQGVITTPPPPSMPHKERYFDRINENDPEYIRERNMSPDLRQDFNMMEQRKRVTQILQSPAFREDLECLIQEQMKKGHNPTGLLALQQIADYIMANSFSGFSSPPLSLGMVTPINDLPGADTSSYVKGEKLTRCKLASLYRLVDLFGWAHLANTYISVRISKEQDHIIIIPRGLSFSEATASNLVKVNIIGEVVDQGSTNLKIDHTGFSPHAAIYSTRPDVKCVIHIHTLATAAVSSMKCGILPISQESLLLGDVAYYDYQGSLEEQEERIQLQKVLGPSCKVLVLRNHGVVALGETLEEAFHYIFNVQLACEIQVQALAGAGGVDNLHVLDFQKYKAFTYTVAASGGGGVNMGSHQKWKVGEIEFEGLMRTLDNLGYRTGYAYRHPLIREKPRHKSDVEIPATVTAFSFEDDTVPLSPLKYMAQRQQREKTRWLNSPNTYMKVNVPEESRNGETSPRTKITWMKAEDSSKVSGGTPIKIEDPNQFVPLNTNPNEVLEKRNKIREQNRYDLKTAGPQSQLLAGIVVDKPPSTMQFEDDDHGPPAPPNPFSHLTEGELEEYKRTIERKQQGLEDAEQELLSDDASSVSQIQSQTQSPQNVPEKLEENHELFSKSFISMEVPVMVVNGKDDMHDVEDELAKRVSRLSTSTTIENIEITIKSPEKIEEVLSPEGSPSKSPSKKKKKFRTPSFLKKNKKKEKVEA

SEQ ID NO: 7181 - protein, 1172 aa, Homo sapiens [sequence omitted]

SEQ ID NO: 7182 - protein, 1860 aa, Homo sapiens
MGAGSARGARGTAAAAAARGGGFLFSWILVSFACHLASTQGAPEDVDILQRLGLSWTKAGSPAPPGVIPFQSGFIFTQRARLQAPTGTVIPAALGTELALVLSLCSHRVNHAFLFAVRSQKRKLQLGLQFLPGKTVVHLGSRRSVAFDLDMHDGRWHHLALELRGRTVTLVTACGQRRVPVLLPFHRDPALDPGGSFLFGKMNPHAVQFEGALCQFSIYPVTQVAHNYCTHLRKQCGQADTYQSPLGPLFSQDSGRPFTFQSDLALLGLENLTTATPALGSLPAGRGPRGTVAPATPTKPQRTSPTNPHQHMAVGGPAQTPLLPAKLSASNALDPMLPASVGGSTRTPRPAAAQPSQKITATKIPKSLPTKPSAPSTSIVPIKSPHPTQKTAPSSFTKSALPTQKQVPPTSRPVPARVSRPAEKPIQRNPGMPRPPPPSTRPLPPTTSSSKKPIPTLARTEAKITSHASKPASARTSTHKPPPFTALSSSPAPTPGSTRSTRPPATMVPPTSGTSTPRTAPAVPTPGSAPTGSKKPIGSEASKKAGPKSSPRKPVPLRPGKAARDVPLSDLTTRPSPRQPQPSQQTTPALVLAPAQFLSSSPRPTSSGYSIFHLAGSTPFPLLMGPPGPKGDCGLPGPPGLPGLPGIPGARGPRGPPGPYGNPGLPGPPGAKGQKGDPGLSPGKAHDGAKGDMGLPGLSGNPGPPGRKGHKGYPGPAGHPGEQGQPGPEGSPGAKGYPGRQGLPGPVGDPGPKGSRGYIGLPGLFGLPGSDGERGLPGVPGKRGKMGMPGFPGVFGERGPPGLDGNPGELGLPGPPGVPGLIGDLGVLGPIGYPGPKGMKGLMGSVGEPGLKGDKGEQGVPGVSGDPGFQGDKGSQGLPGFPGARGKPGPLGKVGDKGSIGFPGPPGPEGFPGDIGPPGDNGPEGMKGKPGARGLPGPRGQLGPEGDEGPMGPPGAPGLEGQPGRKGFPGRPGLDGVKGEPGDPGRPGPVGEQGFMGFIGLVGEPGIVGEKGDRGMMGPPGVPGPKGSMGHPGMPGGMGTPGEPGPQGPPGSRGPPGMRGAKGRRGPRGPDGPAGEQGSRGLKGPPGPQGRPGRPGQQGVAGERGHLGSRGFPGIPGPSGPPGTKGLPGEPGPQGPQGPIGPPGEMGPKGPPGAVGEPGLPGEAGMKGDLGPLGTPGEQGLIGQRGEPGLEGDSGPMGPDGLKGDRGDPGPDGEHGEKGQEGLMGEDGPPGPPGVTGVRGPEGKSGKQGEKGRTGAKGAKGYQGQLGEMGVPGDPGPPGTPGPKGSRGSLGPTGAPGRMGAQGEPGLAGYDGHKGIVGPLGPPGPKGEKGEQGEDGKAEGPPGPPGDRGPVGDRGDRGEPGDPGYPGQEGVQGLRGKPGQQGQPGHPGPRGWPGPKGSKGAEGPKGKQGKAGAPGRRGVQGLQGLPGPRGVVGRQGLEGIAGPDGLPGRDGQAGQQGEQGDDGDPGPMGPAGKRGNPGVAGLPGAQGPPGFKGESGLPGQLGPPGKRGTEGRTGLPGNQGEPGSKGQPGDSGEMGFPGMAGLFGPKGPPGDIGFKGIQGPRGPPGLMGKEGIVGPLGILGPSGLPGPKGDKGSRGDWGLQGPRGPPGPRGRPGPPGPPGGPIQLQQDDLGAAFQTWMDTSGALRPESYSYPDRLVLDQGGEIFKTLHYLSNLIQSIKTPLGTKENPARVCRDLMDCEQKMVDGTYWVDPNLGCSSDTIEVSCNFTHGGQTCLKPITASKVEFAISRVQMNFLHLLSSEVTQHITIHCLNMTVWQEGTGQTPAKQAVRFRAWNGQIFEAGGQFRPEVSMDGCKVQDGRWHQTLFTFRTQDPQQLPIISVDNLPPASSGKQYRLEVGPACFL

SEQ ID NO: 7183 - protein, 729 aa, Homo sapiens
MSCCDLAAAGQLGKASIMASDCEPALNQAEGRNPTLERYLGALREAKNDSEQFAALLLVTKAVKAGDIDAKTRRRIFDAVGFTFPNRLLTTKEAPDGCPDHVLRALGVALLACFCSDPELAAHPQVLNKIPILSTFLTARGDPDDAARRSMIDDTYQCLTAVAGTPRGPRHLIAGGTVSALCQAYLGHGYGFDQALALLVGLLAAAETQCWKEAEPDLLAVLRGLSEDFQKAEDASKFELCQLLPLFLPPTTVPPECYRDLQAGLARILGSKLSSWQRNPALKLAARLAHACGSDWIPAGSSGSKFLALLVNLACVEVRLALEETGTEVKEDVVTACYALMELGIQECTRCEQSLLKEPQKVQLVSVMKEAIGAVIHYLLQVGSEKQKEPFVFASVRILGAWLAEETSSLRKEVCQLLPFLVRYAKTLYEEAEEANDLSQQVANLAISPTTPGPTWPGDALRLLLPGWCHLTVEDGPREILIKEGAPSLLCKYFLQQWELTSPGHDTSVLPDSVEIGLQTCCHIFLNLVVTAPGLIKRDACFTSLMNTLMTSLPALVQQQGRLLLAANVATLGLLMARLLSTSPALQGTPASRGFFAAAILFLSQSHVARATPGSDQAVLALSPEYEGIWADLQELWFLGMQAFTGCVPLLPWLAPAALRSRWPQELLQLLGSVSPNSVKPEMVAAYQGVLVELARANRLCREAMRLQAGEETASHYRMAALEQCLSEP

SEQ ID NO: 7184 - protein, 523 aa, Homo sapiens
MANVGLQFQASAGDSDPQSRPLLLLGQLHHLHRVPWSHVRGKLQPRVTEELWQAALSTLNPNPTDSCPLYLNYATVAALPCRVSRHNSPSAAHFITRLVRTCLPPGAHRCIVMVCEQPEVFASACALARAFPLFTHRSGASRRLEKKTVTVEFFLVGQDNGPVEVSTLQCLANATDGVRLAARIVDTPCNEMNTDTFLEEINKVGKELGIIPTIIRDEELKTRGFGGIYGVGKAALHPPALAVLSHTPDGATQTIAWVGKGIVYDTGGLSIKGKTTMPGMKRDCGGAAAVLGAFRAAIKQGFKDNLHAVFCLAENSVGPNATRPDDIHLLYSGKTVEINNTDAEGRLVLADGVSYACKDLGADIILDMATLTGAQGIATGKYHAAVLTNSAEWEAACVKAGRKCGDLVHPLVYCPELHFSEFTSAVADMKNSVADRDNSPSSCAGLFIASHIGFDWPGVWVHLDIAAPVHAGERATGFGVALLLALFGRASEDPLLNLVSPLGCEVDVEEGDLGRDSKRRRLV

SEQ ID NO: 7185 - protein, 622 aa, Homo sapiens
MHCKVSLLDDTVYECVVEKHAKGQDLLKRVCEHLNLLEEDYFGLAIWDNATSKTWLDSAKEIKKQVRGVPWNFTFNVKFYPPDPAQLTEDITRYYLCLQLRQDIVAGRLPCSFATLALLGSYTIQSELGDYDPELHGVDYVSDFKLAPNQTKELEEKVMELHKSYRSMTPAQADLEFLENAKKLSMYGVDLHKAKDLEGVDIILGVCSSGLLVYKDKLRINRFPWPKVLKISYKRSSFFIKIRPGEQEQYESTIGFKLPSYRAAKKLWKVCVEHHTFFRLTSTDTIPKSKFLALGSKFRYSGRTQAQTRQASALIDRPAPHFERTASKRASRSLDGAAAVDSADRSPRPTSAPAITQGQVAEGGVLDASAKKTVVPKAQKETVKAEVKKEDEPPEQAEPEPTEAWKKKRERLDGENIYIRHSNLMLEDLDKSQEEIKKHHASISELKKNFMESVPEPRPSEWDKRLSTHSPFRTLNINGQIPTGEGPPLVKTQTVTISDNANAVKSEIPTKDVPIVHTETKTITYEAAQTDDNSGDLDPGVLLTAQTITSETPSSTTTTQITKTVKGGISETRIEKRIVITGDADIDHDQVLVQAIKEAKEQHPDMSVTKVVVHQETEIADE

SEQ ID NO: 7186 - protein, 433 aa, Homo sapiens
MAGQDPALSTSHPFYDVARHGILQVAGDDRFGRRVVTFSCCRMPPSHELDHQRLLEYLKYTLDQYVENDYTIVYFHYGLNSRNKPSLGWLQSAYKEFDRKYKKNLKALYVVHPTSFIKVLWNILKPLISHKFGKKVIYFNYLSELHEHLKYDQLVIPPEVLRYDEKLQSLHEGRTPPPTKTPPPRPPLPTQQFGVSLQYLKDKNQGELIPPVLRFTVTYLREKGLRTEGLFRRSASVQTVREIQRLYNQGKPVNFDDYGDIHIPAVILKTFLRELPQPLLTFQAYEQILGITCVESSLRVTGCRQILRSLPEHNYVVLRYLMGFLHAVSRESIFNKMNSSNLACVFGLNLIWPSQGVSSLSALVPLNMFTELLIEYYEKIFSTPEAPGEHGLAPWEQGSRAAPLQEAVPRTQATGLTKPTLPPSPLMAARRRL

SEQ ID NO: 7187 - protein, 1450 aa, Homo sapiens
MASLAALALSLLLRLQLPPLPGARAQSAAGGCSFDEHYSNCGYSVALGTNGFTWEQINTWEKPMLDQAVPTGSFMMVNSSGRASGQKAHLLLPTLKENDTHCIDFHYYFSSRDRSSPGALNVYVKVNGGPQGNPVWNVSGVVTEGWVKAELAISTFWPHFYQVIFESVSLKGHPGYIAVDEVRVLAHPCRKAPHFLRLQNVEVNVGQNATFQCIAGGKWSQHDKLWLQQWNGRDTALMVTRVVNHRRFSATVSVADTAQRSVSKYRCVIRSDGGSGVSNYAELIVKEPPTPIAPPELLAVGATYLWIKPNANSIIGDGPIILKEVEYRTTTGTWAETHIVDSPNYKLWHLDPDVEYEIRVLLTRPGEGGTGPPGPPLTTRTKCADPVHGPQNVEIVDIRARQLTLQWEPFGYAVTRCHSYNLTVQYQYVFNQQQYEAEEVIQTSSHYTLRGLRPFMTIRLRLLLSNPEGRMESEELVVQTEEDVPGAVPLESIQGGPFEEKIYIQWKPPNETNGVITLYEINYKAVGSLDPSADLSSQRGKVFKLRNETHHLFVGLYPGTTYSFTIKASTAKGFGPPVTTRIATKISAPSMPEYDTDTPLNETDTTITVMLKPAQSRGAPVSVYQLVVKEERLQKSRRAADIIECFSVPVSYRNASSLDSLHYFAAELKPANLPVTQPFTVGDNKTYNGYWNPPLSPLKSYSIYFQALSKANGETKINCVRLATKAPMGSAQVTPGTPLCLLTTGASTQNSNTVEPEKQVDNTVKMAGVIAGLLMFIIILLGVMLTIKRRKLAKKQKETQSGAQREMGPVASADKPTTKLSASRNDEGFSSSSQDVNGFTDGSRGELSQPTLTIQTHPYRTCDPVEMSYPRDQFQPAIRVADLLQHITQMKRGQGYGFKEEYEALPEGQTASWDTAKEDENRNKNRYGNIISYDHSRVRLLVLDGDPHSDYINANYIDGYHRPRHYIATQGPMQETVKDFWRMIWQENSASIVMVTNLVEVGRVKCVRYWPDDTEVYGDIKVTLIETEPLAEYVIRTFTVQKKGYHEIRELRLFHFTSWPDHGVPCYATGLLGFVRQVKFLNPPEAGPIVVHCSAGAGRTGCFIAIDTMLDMAENEGVVDIFNCVRELRAQRVNLVQTEEQYVFVHDAILEACLCGNTAIPVCEFRSLYYNISRLDPQTNSSQIKDEFQTLNIVTPRVRPEDCSIGLLPRNHDKNRSMDVLPLDRCLPFLISVDGESSNYINAALMDSHKQPAAFVVTQHPLPNTVADFWRLVFDYNCSSVVMLNEMDTAQFCMQYWPEKTSGCYGPIQVEFVSADIDEDIIHRIFRICNMARPQDGYRIVQHLQYIGWPAYRDTPPSKRSLLKVVRRLEKWQEQYDGREGRTVVHCLNGGGRSGTFCAICSVCEMIQQQNIIDVFHIVKTLRNNKSNMVETLEQYKFVYEVALEYLSSF

SEQ ID NO: 7188 - protein, 1768 aa, Homo sapiens
MSARAAAAKSTAMEETAIWEQHTVTLHRAPGFGFGIAISGGRDNPHFQSGETSIVISDVLKGGPAEGQLQENDRVAMVNGVSMDNVEHAFAVQQLRKSGKNAKITIRRKKKVQIPVSRPDPEPVSDNEEDSYDEEIHDPRSGRSGVVNRRSEKIWPRDRSASRERSLSPRSDRRSVASSQPAKPTKVTLVKSRKNEEYGLRLASHIFVKEISQDSLAARDGNIQEGDVVLKINGTVTENMSLTDAKTLIERSKGKLKMVVQRDERATLLNVPDLSDSIHSANASERDDISEIQSLASDHSGRSHDRPPRRSRSRSPDQRSEPSDHSRHSPQQPSNGSLRSRDEERISKPGAVSTPVKHADDHTPKTVEEVTVERNEKQTPSLPEPKPVYAQVGQPDVDLPVSPSDGVLPNSTHEDGILRPSMKLVKFRKGDSVGLRLAGGNDVGIFVAGVLEDSPAAKEGLEEGDQILRVNNVDFTNIIREEAVLFLLDLPKGEEVTILAQKKKDVYRRIVESDVGDSFYIRTHFEYEKESPYGLSFNKGEVFRVVDTLYNGKLGSWLAIRIGKNHKEVERGIIPNKNRAEQLASVQYTLPKTAGGDRADFWRFRGLRSSKRNLRKSREDLSAQPVQTKFPAYERVVLREAGFLRPVTIFGPIADVAREKLAREEPDIYQIAKSEPRDAGTDQRSSGIIRLHTIKQIIDQDKHALLDVTPNAVDRLNYAQWYPIVVFLNPDSKQGVKTMRMRLCPESRKSARKLYERSHKLRKNNHHLFTTTINLNSMNDGWYGALKEAIQQQQNQLVWVSEGKADGATSDDLDLHDDRLSYLSAPGSEYSMYSTDSRHTSDYEDTDTEGGAYTDQELDETLNDEVGTPPESAITRSSEPVREDSSGMHHENQTYPPYSPQAQPQPIHRIDSPGFKPASQQKAEASSPVPYLSPETNPASSTSAVNHNVNLTNVRLEEPTPAPSTSYSPQADSLRTPSTEAAHIMLRDQEPSLSSHVDPTKVYRKDPYPEEMMRQNHVLKQPAVSHPGHRPDKEPNLTYEPQLPYVEKQASRDLEQPTYRYESSSYTDQFSRNYEHRLRYEDRVPMYEEQWSYYDDKQPYPSRPPFDNQHSQDLDSRQHPEESSERGYFPRFEEPAPLSYDSRPRYEQAPRASALRHEEQPAPGYDTHGRLRPEAQPHPSAGPKPAESKQYFEQYSRSYEQVPPQGFTSRAGHFEPLHGAAAVPPLIPSSQHKPEALPSNTKPLPPPPTQTEEEEDPAMKPQSVLTRVKMFENKRSASLETKKDVNDTGSFKPPEVASKPSGAPIIGPKPTSQNQFSEHDKTLYRIPEPQKPQLKPPEDIVRSNHYDPEEDEEYYRKQLSYFDRRSFENKPPAHIAASHLSEPAKPAHSQNQSNFSSYSSKGKPPEADGVDRSFGEKRYEPIQATPPPPPLPSQYAQPSQPVTSASLHIHSKGAHGEGNSVSLDFQNSLVSKPDPPPSQNKPATFRPPNREDTAQAAFYPQKSFPDKAPVNGTEQTQKTVTPAYNRFTPKPYTSSARPFERKFESPKFNHNLLPSETAHKPDLSSKTPTSPKTLVKSHSLAQPPEFDSGVETFSIHAEKPKYQINNISTVPKAIPVSPSAVEEDEDEDGHTVVATARGIFNSNGGVLSSIETGVSIIIPQGAIPEGVEQEIYFKVCRDNSILPPLDKEKGETLLSPLVMCGPHGLKFLKPVELRLPHCASMTPDGWSFALKSSDSSSGDPKTWQNKCLPGDPNYLVGANCVSVLIDHF

SEQ ID NO: 7189 - protein, 663 aa, Homo sapiens
MALCYGTFWGYPKMLEAANLMEGLVDIGPWVTLPRGQPEVLEWGLPKDQDSVAFEDVAVNFTHEEWALLGPSQKNLYRDVMRETIRNLNCIGMKWENQNIDDQHQNLRRNPRCDVVERFGKSKDGSQCGETLSQIRNSIVNKNTPARVDACGSSVNGEVIMGHSSLNCYIRVDTGHKHRECHEYAEKSYTHKQCGKGLSYRHSFQTCERPHTGKKPYDCKECGKTFSSPGNLRRHMVVKGGDGPYKCELCGKAFFWPSLLRMHERTHTGEKPYECKQCSKAFPVYSSYLRHEKIHTGEKPYECKQCSKAFPDYSSYLRHERTHTGEKPYKCKQCGKAFSVSGSLRVHERIHTGEKPYTCKQCGKAFCHLGSFQRHMIMHSGDGPHKCKICGKGFDFPGSARIHEGTHTLEKPYECKQCGKLLSHRSSFRRHMMAHTGDGPHKCTVCGKAFDSPSVFQRHERTHTGEKPYECKQCGKAFRTSSSLRKHETTHTGEQPYKCKCGKAFSDLFSFQSHETTHSEEEPYECKECGKAFSSFKYFCRHERTHSEEKSYECQICGKAFSRFSYLKTHERTHTAEKPYECKQCRKAFFWPSFLLRHERTHTGERPYECKHCGKAFSRSSFCREHERTHTGEKPYECKECGKAFSSLSSFNRHKRTHWKDIL

SEQ ID NO: 7190 - protein, 309 aa, Homo sapiens
MTLRNSSSVTEFILVGLSEQPELQLPLFLLFLGIYVFTVVGNLGLITLIGINPSLHTPMYFFLFNLSFIDLCYSCVFTPKMLNDFVSESIISYVGCMTQLFFFCFFVNSECYVLVSMAYDRYVAICNPLLYMVTMSPRVCFLLMFGSYVVGFAGAMAHTGSMLRLTFCDSNVIDHYLCDVLPLLQLSCTSTHVSELVFFIVVGVITMLSSISIVISYALILSNILCIPSAEGRSKAFSTWGSHIIAVALFFGSGTFTYLTTSFPGSMNHGRFASVFYTNVVPMLNPSIYSLRNKDDKLALGKTLKRVLF

SEQ ID NO: 7191 - protein, 339 aa, Homo sapiens
MVSKSRWKLLAMLALVLVVMVWYSISREDRYIELFYFPIPEKKEPCLQGEAESKASKLFGKLSPLCSYSRDQPIFLRLEDYFWVKTPSAYELPYGTKGSEDLLLRVLAITSSSIPKNIQSLRCRRCVVVGNGHRLRNSSLGDAINKYDVVIRLNNAPVAGYEGDVGSKTTMRLFYPESAHFDPKVENNPDTLLVLVAFKAMDFHWIETILSDKKRVRKGFWKQPPLIWDVNPKQIRILNPFFMEIAADKLLSLPMQQPRKIKQKPTTGLLAITLALHLCDLVHIAGFGYPDAYNKKQTIHYYEQITLKSMAGSGHNVSQEALAIKRMLEMGAIKNLTSF

SEQ ID NO: 7192 - protein, 999 aa, Homo sapiens; identical to SEQ ID NO: 4517

SEQ ID NO: 7193 - protein, 933 aa, Homo sapiens
MAPTKPSFQQDPSRRERITAQHPLPNQSECRKIYRYDGIYCESTYQNLQALRKEKSRDAARSRRGKENFEFYELAKLLPLPAAITSQLDKASIIRLTISYLKMRDFANQGDPPWNLRMEGPPPNTSVKVIGAQRRRSPSALAIEVFEAHLGSHILQSLDGFVFALNQEGKFLYISETVSIYLGLSQVELTGSSVFDYVHPGDHVEMAEQLGMKLPPGRGLLSQGTAEDGASSASSSSQSETPEPVESTSPSLLTTDNTLERSFFIRMKSTLTKRGVHIKSSGYKVIHITGRLRLRVSLSHGRTVPSQIMGLVVVAHALPPPTINEVRIDCHMFVTRVNMDLNIIYCENRISDYMDLTPVDIVGKRCYHFIHAEDVEGIRHSHLDLLNKGQCVTKYYRWMQKNGGYIWIQSSATIAINAKNANEKNIIWVNYLLSNPEYKDTPMDIAQLPHLPEKTSESSETSDSESDSKDTSGITEDNENSKSDEKGNQSENSEDPEPDRKKSGNACDNDMNCNDDGHSSSNPDSRDSDDSFEHSDFENPKAGEDGFGALGAMQIKVERYVESESDLRLQNCESLTSDSAKDSDSAGEAGAQASSKHQKRKKRRKRQKGGSASRRRLSSASSPGGLDAGLVEPPRLLSSPNSASVLKIKTEISEPINFDNDSSIWNYPPNREISRNESPYSMTKPPSSEHFPSPQGGGGGGGGGGGLHVAIPDSVLTPPGADGAAARKTQFGASATAALAPVASDPLSPPLSASPRDKHPGNGGGGGGGGGGAGGGGPSASNSLLYTGDLEALQRLQAGNVVLPLVHRVTGTLAATSTAAQRVYTTGTIRYAPAEVTLAMQSNLLPNAHAVNFVDVNSPGFGLDPKTPMEMLYHHVHRLNMSGPFGGAVSAASLTQMPAGNVFTTAEGLFSTLPFPVYSNGIHAAQTLERKED

SEQ ID NO: 7194 - protein, 211 aa, Homo sapiens
MQAIKCVVVGDGAVGKTCLLISYTTNAFPGEYIPTVFDNYSANVMVDGKPVNLGLWDTAGQEDYDRLRPLSYPQTVGETYGKDITSRGKDKPIADVFLICFSLVSPASFENVRAKWYPEVRHHCPNTPIILVGTKLDLRDDKDTIEKLKEKKLTPITYPQGLAMAKEIGAVKYLECSALTQRGLKTVFDEAIRAVLCPPPVKKRKRKCLLL

SEQ ID NO: 7195 - protein, 342 aa, Homo sapiens
MNNPIPSNLKSEAKKAAKILREFTEITSRNGPDKIIPAHVIAKAKGLAILSVIKAGFLVTARGGSGIVVARLPDGKWSAPSAIGIAGLGGGFEIGIEVSDLVIILNYDRAVEAFAKGGNLTLGGNLTVAVGPLGRNLEGNVALRSSAAVFTYCKSRGLFAGVSLEGSCLIERKETNRKFYCQDIRAYDILFGDTPRPAQAEDLYEILDSFTEKYENEGQRINARKAAREQRKSSAKELPPKPLSRPQQSSAPVQLNSGSQSNRNEYKLYPGLSSYHERVGNLNQPIEVTALYSFEGQQPGDLNFQAGDRITVISKTDSHFDWWEGKLRGQTGIFPANYVTMN

SEQ ID NO: 7196 - protein, 578 aa, Homo sapiens
MAFMEKPPAGKVLLDDTVPLTAAIEASQSLQSHTEYIIRVQRGISVENSWQIVRRYSDFDLLNNSLQIAGLSLPLPPKKLIGNMDREFIAERQKGLQNYLNVITTNHILSNCELVKKFLDPNNYSANYTEIALQQVSMFFRSEPKWEVVEPLKDIGWRIRKKYFLMKIKNQPKERLVLSWADLGPDKYLSDKDFQCLIKLLPSCLHPYIYRVTFATANESSALLIRMFNEKGTLKDLIYKAKPKDPFLKKYCNPKKIQGLELQQIKTYGRQILEVLKFLHDKGFPYGHLHASNVMLDGDTCRLLDLENSLLGLPSFYRSYFSQFRKINTLESVDVHCFGHLLYEMTYGRPPDSVPVDSFPPAPSMAVVAVLESTLSCEACKNGMPTISRLLQMPLFSDVLLTTSEKPQFKIPTKLKEALRIAKECIEKRLIEEQKQIHQHRRLTRAQSHHGSEEERKKRKILARKKSKRSALENSEEHSAKYSNSNNSAGSGASSPLTSPSSPTPPSTSGISALPPPPPPPPPPAAPLPPASTEAPAQLSSQAVNGMSRGALLSSIQNFQKGTLRKAKTCDHSAPKIG

SEQ ID NO: 7197 - protein, 538 aa, Homo sapiens
MELSYQTLKFTHQAREACEMRTEARRKNLLILISHYLTQEGYIDTANALEQETKLGLRRFEVCDNIDLETILMEYESYYFVKFQKYPKIVKKSSDTAENNLPQRSRGKTRRMMNDSCQNLPKINQQRPRSKTTAGKTGDTKSLNKEHPNQEVVDNTRLESANFGLHISRIRKDSGEENAHPRRGQIIDFQGLLTDAIKGATSELALNTFDHNPDPSERLLKPLSAFIGMNSEMRELAAVVSRDIYLHNPNIKWNDIIGLDAAKQLVKEAVVYPIRYPQLFTGILSPWKGLLLYGPPGTGKTLLAKAVATECKTTFFNISASTIVSKWRGDSEKLVRVLFELARYHAPSTIFLDELESVMSQRGTASGGEHEGSLRMKTELLVQMDGLARSEDLVFVLAASNLPWELDCAMLRRLEKRILVDLPSREARQAMIYHWLPPVSKSRALELHTELEYSVLSQETEGYSGSDIKLVCREAAMRPVRKIFDALENHQSESSDLPRIQLDIVTTADFLDVLTHTKPSAKNLAQRYSDWQREFESV

SEQ ID NO: 7198 - protein, 980 aa, Homo sapiens
METAAAAAPGPGWAAEGERRRRRCSRRDRDREQRRRRGPGGDAPRALLAAPRGSSSSSSPPPPARPWSSASSGERPGGPRRRRPRPRPRPPRPRARKRPAGSGSRGEEEEEEEEEGGADDGEAEEEPEEEEEEEEDLIDGFAIASFATLEALQKDASLQPPERLEHRLKHSGKRKRGGSSGATGEPGDSSDREPGRPPGDRARKWPNKRRRKEASSRHSLEAGYICDAESDLDERVSDDDLDPSFTVSTSKASGPHGAFNGNCEAKLSVVPKVSGLERSQEQPPGPDPLLVPFPPKEPPPPPVPRPPVSPPAPLPATPSLPPPPQPQLQLRVSPFGLRTSPYGSSLDLSTGSSSRPPPKAPAPPVAQPPPSSSSSSSSSSSASSSSAQLTHRPPTPSLPLPLSTHSFPPPGLRPPPPPHHPSLFSPGPTLPPPPPLLQVPGHPGASAANALSEQDLIGQDLNSRYLNAQGGPEVVGAGGSARPLAFQFHQHNHQHQHTHQHTHQHFTPYPPGLLPPHGPHMFEKYPGKMEGLFRHNPYTAFPPAVPGLPPGLPPAVSFGSLQGAFQPKSTNPELPPRLGPVPSGLSQKGTQIPDHFRPPLRKPGKWCAMHVRVAYMILRHQEKMKGDSHKLDFRNDLLPCLPGPYGALPPGQELSHPASLFTATGAVHAAANPFTAAPGAHGPFLSPSTHIDPFGRPTSFASLAALSNGAFGGLGSPTFNSGAVFAQKESPGAPPAFASPPDPWGRLHRSPLTFPAWVRPPEAARTPGSDKERPVERREPSITKEEKDRDLPFSRPQLRVSPATPKARAGEEGPRPTKESVRVKEERKEEAAAAAAAAAAAAAAAAAAATGPQGLHLLFERPRPPPFLGPSPPDRCAGFLEPTWLAAPPRLARPPRFYEAGEELTGPGAVAAARLYGLEPAHPLLYSRLAPPPPPAAAPGTPHLLSKTPPGALLGAPPPLVPAPRPSSPPRGPGPARADR

SEQ ID NO: 7199 - protein, 379 aa, Homo sapiens
MPRSSRSPGDPGALLEDVAHNPRPRRIAQRGRNTSRMAEDTSPNMNDNILLPVRNNDQALGLTQCMLGCVSWFTCFACSLRTQAQQVLFNTCRCKLLCQKLMEKTGILLLCAFGFWMFSIHLPSKMKVWQDDSINGPLQSLRLYQEKVRHHSGEIQDLRGSMNQLIAKLQEMEAMSDEQKMAQKIMKMIHGDYIEKPDFALKSIGASIDFEHTSVTYNHEKAHSYWNWIQLWNYAQPPDVILEPNVTPGNCWAFEGDRGQVTIQLAQKVYLSNLTLQHIPKTISLSGSLDTAPKDFVIYGMEGSPKEEVFLGAFQFQPENIIQMFPLQNQPARAFSAVKVKISSNWGNPGFTCLYRVRVHGSVAPPREQPHQNPYPKRD

SEQ ID NO: 7200 - protein, 2818 aa, Homo sapiens
MAAHRPVEWVQAVVSRFDEQLPIKTGQQNTHTKVSTEHNKECLINISKYKFSLVISGLTTILKNVNNMRIFGEAAEKNLYLSQLIILDTLEKCLAGQPKDTMRLDETMLVKQLLPEICHFLHTCREGNQHAAELRNSASGVLFSLSCNNFNAVFSRISTRLQELTVCSEDNVDVHDIELLQYINVDCAKLKRLLKETAFKFKALKKVAQLAVINSLEKAFWNWVENYPDEFTKLYQIPQTDMAECAEKLFDLVDGFAESTKRKAAVWPLQIILLILCPEIIQDISKDVVDENNMNKKLFLDSLRKALAGHGGSRQLTESAAIACVKLCKASTYINWEDNSVIFLLVQSMVVDLKNLLFNPSKPFSRGSQPADVDLMIDCLVSCFRISPHNNQHFKICLAQNSPSTFHYVLVNSLHRIITNSALDWWPKIDAVYCHSVELRNMFGETLHKAVQGCGAHPAIRMAPSLTFKEKVTSLKFKEKPTDLETRSYKYLLLSMVKLIHADPKLLLCNPRKQGPETQGSTAELITGLVQLVPQSHMPEIAQEAMEALLVLHQLDSIDLWNPDAPVETFWEISSQMLFYICKKLTSHQMLSSTEILKWLREILICRNKFLLKNKQADRSSCHFLLFYGVGCDIPSSGNTSQMSMDHEELLRTPGASLRKGKGNSSMDSAAGCSGTPPICRQAQTKLEVALYMFLWNPDTEAVLVAMSCFRHLCEEADIRCGVDEVSVHNLLPNYNTFMEFASVSNMMSTGRAALQKRVMALLRRIEHPTAGNTEAWEDTHAKWEQATKLILNYPKAKMEDGQAAESLHKTIVKRRMSHVSGGGSIDLSDTDSLQEWINMTGFLCALGGVCLQQRSNSGLATYSPPMGPVSERKGSMISVMSSEGNADTPVSKFMDRLLSLMVCNHEKVGLQIRTNVKDLVGLELSPALYPMLFNKLKNTISKFFDSQGQVLLTDTNTQFVEQTIAIMKNLLDNHTEGSSEHLGQASIETMMLNLVRYVRVLGNMVHAIQIKTKLCQLVEVMMARRDDLSFCQEMKFRNKMVEYLTDWVMGTSNQAADDDVKCLTRDLDQASMEAVVSLLAGLPLQPEEGDGVELMEAKSQLFLKYFTLFMNLLNDCSEVEDESAQTGGRKRGMSRRLASLRHCTVLAMSNLLNANVDSGLMHSIGLGYHKDLQTRATFMEVLTKILQQGTEFDTLAETVLADRFERLVELVTMMGDQGELPIAMALANVVPCSQWDELARVLVTLFDSRHLLYQLLWNMFSKEVELADSMQTLFRGNSLASKIMTFCFKVYGATYLQKLLDPLLRIVITSSDWQHVSFEVDPTRLEPSESLEENQRNLLQMTEKFFHAIISSSSEFPPQLRSVCHCLYQVVSQRFPQNSIGAVGSAMFLRFINPAIVSPYEAGILDKKPPPRIERGLKLMSKILQSIANHVLFTKEEHMRPFNDFVKSNFDAARRFFLDIASDCPTSDAVNHSLSFISDGNVLALHRLLWNNQEKIGQYLSSNRDHKAVGRRPFDKMATLLAYLGPPEHKPVADTHWSSLNLTSSKFEEFMTRHQVHEKEEFKALKTLSIFYQAGTSKAGNPIFYYVARRFKTGQINGDLLIYHVLLTLKPYYAKPYEIVVDLTHTGPSNRFKTDFLSKWFVVFPGFAYDNVSAVYIYNCNSWVREYTKYHERLLTGLKGSKRLVFIDCPGKLAEHIEHEQQKLPAATLALEEDLKVFHNALKLAHKDTKVSIKVGSTAVQVTSAERTKVLGQSVFLNDIYYASEIEEICLVDENQFTLTIANQGTPLTFMHQECEAIVQSIIHIRTRWELSQPDSIPQHTKIRPKDVPGTLLNIALLNLGSSDPSLRSAAYNLLCALTCTFNLKIEGQLLETSGLCIPANNTLFIVSISKTLAANEPHLTLEFLEECISGFSKSSIELKHLCLEYMTPWLSNLVRFCKHNDDAKRQRVTAILDKLITMTINEKQMYPSIQAKIWGSLGQITDLLDVVLDSFIKTSATGGLGSIKAEVMADTAVALASGNVKLVSSKVIGRMCKIIDKTCLSPTPTLEQHLMWDDIAILARYMLMLSFNNSLDVAAHLPYLFHVVTFLVATGPLSLRASTHGLVINIIHSLCTCSQLHFSEETKQVLRLSLTEFSLPKFYLLFGISKVKSAAVIAFRSSYRDRSFSPGSYERETFALTSLETVTEALLEIMEACMRDIPTCKWLDQWTELAQRFAFQYNPSLQPRALVVFGCISKRVSHGQIKQIIRILSKALESCLKGPDTYNSQVLIEATVIALTKLQPLLNKDSPLHKALFWVAVAVLQLDEVNLYSAGTALLEQNLHTLDSLRIFNDKSPEEVFMAIRNPLEWHCKQMDHFVGLNFNSNFNFALVGHLLKGYRHPSPAIVARTVRILHTLLTLVNKHRNCDKFEVNTQSVAYLAALLTVSEEVRSRCSLKHRKSLLLTDISMENVPMDTYPIHHGDPSYRTLKETQPWSSPKGSEGYLAATYPTVGQTSPRARKSMSLDMGQPSQANTKKLLGTRKSFDHLISDTKAPKRQEMESGITTPPKMRRVAETDYEMETQRISSSQQHPHLRKVSVSESNVLLDEEVLTDPKIQALLLTVLATLVKYTTDEFDQRILYEYLAEASVVFPKVFPVVHNLLDSKINTLLSLCQDPNLLNPIHGIVQSVVYHEESPPQYQTSYLQSFGFNGLWRFAGPFSKQTQIPDYAELIVKFLDALIDTYLPGIDEETSEESLLTPTSPYPPALQSQLSITANLNLSNSMTSLATSQHSPGIDKENVELSPTTGHCNSGRTRHGSASQVQKQRSAGSFKRNSIKKIV

SEQ ID NO: 7201 - protein, 2109 aa, Homo sapiens
MDALESLLDEVALEGLDGLCLPALWSRLETRVPPFPLPLEPCTQEFLWRALATHPGISFYEEPRERPDLQLQDRYEEIDLETGILESRRDPVALEDVYPIHMILENKDGIQGSCRYFKERKNITNDIRTKSLQPRCTMVEAFDRWGKKLIIVASQAMRYRALIGQEGDPDLKLPDFSYCILERLGRSRWQGELQRDLHTTAFKVDAGKLHYHRKILNKNGLITMQSHVIRLPTGAQQHSILLLLNRFHVDRRSKYDILMEKLSVMLSTRTNHIETLGKLREELGLCERTFKRLYQYMLNAGLAKVVSLRLQEIHPECGPCKTKKGTDVMVRCLKLLKEFKRNDHDDDEDEEVISKTVPPVDIVFERDMLTQTYDLIERRGTKGISQAEIRVAMNVGKLEARMLCRLLQRFKVVKGFMEDEGRQRTTKYISCVFAEESDLSRQYQREKARSELLTTVSLASMQEESLLPEGEDTFLSESDSEEERSSSKRRGRGSQKDTRASANLRPKTQPHHSTPTKGGWKVVNLHPLKKQPPSFPGAAEERACQSLASRDSLLDTSSVSEPNVSFVSHCADSNSGDIAVIEEVRMENPKESSSSLKTGRHSSGQDKPHETYRLLKRRNLIIEAVTNLRLIESLFTIQKMIMDQEKQEGVSTKCCKKSIVRLVRNLSEEGLLRLYRTTVIQDGIKKKVDLVVHPSMDQNDPLVRSAIEQVRFRISNSSTANRVKTSQPPVPQGEAEEDSQGKEGPSGSGDSQLSASSRSESGRMKKSDNKMGITPLRNYHPIVVPGLGRSLGFLPKMPRLRVVHMFLWYLIYGHPASNTVEKPSFISERRTIKQESGRAGVRPSSSGSAWEACSEAPSKGSQDGVTWEAEVELATETVYVDDASWMRYIPPIPVHRDFGFGWALVSDILLCLPLSIFIQIVQVSYKVDNLEEFLNDPLKKHTLIRFLPRPIRQQLLYKRRYIFSVVENLQRLCYMGLLQFGPTEKFQDKDQVFIFLKKNAVIVDTTICDPHYNLARSSRPFERRLYVLNSMQDVENYWFDLQCVCLNTPLGVVRCPRVRKNSSTDQGSDEEGSLQKEQESAMDKHNLERKCAMLEYTTGSREVVDEGLIPGDGLGAAGLDSSFYGHLKRNWIWTSYIINQAKKENTAAENGLTVRLQTFLSKRPMPLSARGNSRLNIWGEARVGSELCAGWEEQFEVDREPSLDRNRRVRGGKSQKRKRLKKDPGKKIKRKKKGEFPGEKSKRLRYHDEADQSALQRMTRLRVTWSMQEDGLLVLCRIASNVLNTKVKGPFVTWQVVRDILHATFEESLDKTSHSVGRRARYIVKNPQAYLNYKVCLAEVYQDKALVGDFMNRRGDYDDPKVCANEFKEFVEKLKEKFSSALRNSNLEIPDTLQELFARYRVLAIGDEKDQTRKEDELNSVDDIHFLVLQNLIQSTLALSDSQMKSYQSFQTFRLYREYKDHVLVKAFMECQKRSLVNRRRVNHTLGPKKNRALPFVPMSYQLSQTYYRIFTWRFPSTICTESFQFLDRMRAAGKLDQPDRFSFKDQDNNEPTNDMVAFSLDGPGGNCVAVLTLFSLGLISVDVRIPEQIIVVDSSMVENEVIKSLGKDGSLEDDEDEEDDLDEGVGGKRRSMEVKPAQASHTNYLLMRGYYSPGIVSTRNLNPNDSIVVNSCQMKFQLRCTPVPARLRPAAAPLEELTMGTSCLPDTFTKLINPQENTCSLEEFVLQLELSGYSPEDLTAALEILEAIIATGCFGIDKEELRRRFSALEKAGGGRTRTFADCIQALLEQHQVLEVGGNTARLVAMGSAWPWLLHSVRLKDREDADIQREDPQARPLEGSSSEDSPPEGQAPPSHSPRGTKRRASWASENGETDAEGTQMTPAKRPALQDSNLAPSLGPGAEDGAEAQAPSPPPALEDTAAAGAAQEDQEGVGEFSSPGQEQLSGQAQPPEGSEDPRGFTESFGAANISQAARERDCESVCFIGRPWRVVDGHLNLPVCKGMMEAMLYHIMTRPGIPESSLLRHYQGVLQPVAVLELLQGLESLGCIRKRWLRKPRPVSLFSTPVVEEVEVPSSLDESPMAFYEPTLDCTLRLGRVFPHEVNWNKWIHL

SEQ ID NO: 7202 - protein, 733 aa, Homo sapiens
MQQALELALDRAEYVIESARQRPPKRKYLSSGRKSVFQKLYDLYIEECEKEPEVKQKLRRNVNLLEKLVMQETLSCLVVNLYPGNEGYSLMLRGKNGSDSETIRLPYEEGELLEYLDAEELPPILVDLLEKSQVNIFHCGCVIAEIRDYRQSSNMKSPGYQSRHILLRPTMQTLICDVHSITSDNHKWTQEDKLLLESQLILATAEPLCLDPSIAVTCTANRLLYNKQKMNTRPMKRCFKRYSRSSLNRQQDLSHCPPPPQLRLLDFLQKRKERKAGQHYDLKISKAGNCVDMWKRSPCNLAIPSEVDVEKYAKVEKSIKSDDSQPTVWPAHDVKDDYVFECEAGTQYQKTKLTILQSLGDPLYYGKIQPCKADEESDSQMSPSHSSTDDHSNWFIIGSKTDAERVVNQYQELVQNEAKCPVKMSHSSSGSASLSQVSPGKETDQTETVSVQSSVLGKGVKHRPPPIKLPSSSGNSSSGNYFTPQQTSSFLKSPTPPPSSKPSSIPRKSSVDLNQVSMLSPAALSPASSSQRTTATQVMANSAGLNFINVVGSVCGAQALMSGSNPMLGCNTGAITPAGINLSGLLPSGGLLPNALPSAMQAASQAGVPFGLKNTSSLRPLNLLQLPGGSLIFNTLQQQQQQLSQFTPQQPQQPTTCSPQQPGEQGSEQGSTSQEQALSAQQAAVINLTGVGSFMQSQAAAVAILAASNGYGSSSSTNSSATSSSAYRQPVKK

SEQ ID NO: 7203 - protein, 420 aa, Homo sapiens
METLSSEESCDSFDSLESGKQQDVRFHSKYFTEELRRIFIEDTDSETEDFAGFTQSDLNGKTNPEVMVVESDLSDDGKASLVSEEEEDEEEDKATPRRSRSRRSSIGLRVAFQFPTKKLANKPDKNSSSEQLFSSARLQNEKKTILERKKDCRQVIQREDSTSESEDDSRDESQESSDALLKRTMNIKENKAMLAQLLAELNSMPDFFPVRTPTSASRKKTVRRAFSEGQITRRMNPTRSARPPEKFALENFTVSAAKFAEEFYSFRRRKTIGGKCREYRRRHRISSFRPVEDITEEDLENVAITVRDKIYDKVLGNTCHQCRQKTIDTKTVCRNQGCCGVRGQFCGPCLRNRYGEDVRSALLDPDWVCPPCRGICNCSYCRKRDGRCATGILIHLAKFYGYDNVKEYLESLQKELVEDN

SEQ ID NO: 7204 - protein, 733 aa, Homo sapiens
MWSWKCLLFWAVLVTATLCTARPSPTLPEQDALPSSEDDDDDDDSSSEEKETDNTKPNRMPVAPYWTSPEKMEKKLHAVPAAKTVKFKCPSSGTPNPTLRWLKNGKEFKPDHRIGGYKVRYATWSIIMDSVVPSDKGNYTCIVENEYGSINHTYQLDVVERSPHRPILQAGLPANKTVALGSNVEFMCKVYSDPQPHIQWLKHIEVNGSKIGPDNLPYVQILKTAGVNTTDKEMEVLHLRNVSFEDAGEYTCLAGNSIGLSHHSAWLTVLEALEERPAVMTSPLYLEIIIYCTGAFLISCMVGSVIVYKMKSGTKKSDFHSQMAVHKLAKSIPLRRQVTVSADSSASMNSGVLLVRPSRLSSSGTPMLAGVSEYELPEDPRWELPRDRLVLGKPLGEGCFGQVVLAEAIGLDKDKPNRVTKVAVKMLKSDATEKDLSDLISEMEMMKMIGKHKNIINLLGACTQDGPLYVIVEYASKGNLREYLQARRPPGLEYCYNPSHNPEEQLSSKDLVSCAYQVARGMEYLASKKCIHRDLAARNVLVTEDNVMKIADFGLARDIHHIDYYKKTTNGRLPVKWMAPEALFDRIYTHQSDVWSFGVLLWEIFTLGGSPYPGVPVEELFKLLKEGHRMDKPSNCTNELYMMMRDCWHAVPSQRPTFKQLVEDLDRIVALTSNQEYLDLSMPLDQYSPSFPDTRSSTCSSGEDSVFSHEPLPEEPCLPRHPAQLANGGLKRR

SEQ ID NO: 7205 - protein, 2079 aa, Homo sapiens
FMQHPKNFGLIASFLERKTVAECVLYYYLTKKNENYKSLVRRSYRRRGKSQQQQQQQQQQQQQQQQQPMPRSSQEEKDEKEKEKEAEKEEEKPEVENDKEDLLKEKTDDTSGEDNDEKEAVASKGRKTANSQGRRKGRITRSMANEANSEEAITPQQSAELASMELNESSRWTEEEMETAKKGLLEHGRNWSAIARMVGSKTVSQCKNFYFNYKKRQNLDEILQQHKLKMEKERNARRKKKKAPAAASEEAAFPPVVEDEEMEASGVSGNEEEMVEEAEALHASGNEVPRGECSGPATVNNSSDTESIPSPHTEAAKDTGQNGPKPPATLGADGPPPGPPTPPPEDIPAPTEPTPASEATGAPTPPPAPPSPSAPPPVVPKEEKEEETAAAPPVEEGEEQKPPAAEELAVDTGKAEEPVKSECTEEAEEGPAKGKDAEAAEATAEGALKAEKKEGGSGRATTAKSSGAPQDSDSSATCSADEVDEAEGGDKNRLLSPRPSLLTPTGDPRANASPQKPLDLKQLKQRAAAIPPIQVTKVHEPPREDAAPTKPAPPAPPPPQNLQPESDAPQQPGSSPRGKSRSPAPPADKEAEKPVFFPAFAAEAQKLPGDPPCWTSGLPFPVPPREVIKASPHAPDPSAFSYAPPGHPLPLGLHDTARPVLPRPPTISNPPPLISSAKHPSVLERQIGAISQGMSVQLHVPYSEHAKAPVGPVTMGLPLPMDPKKLAPFSGVKQEQLSPRGQAGPPESLGVPTAQEASVLRGTALGSVPGGSITKGIPSTRVPSDSAITYRGSITHGTPADVLYKGTITRIIGEDSPSRLDRGREDSLPKGHVIYEGKKGHVLSYEGGMSVTQCSKEDGRSSSGPPHETAAPKRTYDMMEGRVGRAISSASIEGLMGRAIPPERHSPHHLKEQHHIRGSITQGIPRSYVEAQEDYLRREAKLLKREGTPPPPPPSRDLTEAYKTQALGPLKLKPAHEGLVATVKEAGRSIHEIPREELRHTPELPLAPRPLKEGSITQGTPLKYDTGASTTGSKKHDVRSLIGSPGRTFPPVHPLDVMADARALERACYEESLKSRPGTASSSGGSIARGAPVIVPELGKPRQSPLTYEDHGAPFAGHLPRGSPVTTREPTPRLQEGSLSSSKASQDRKLTSTPREIAKSPHSTVPEHHPHPISPYEHLLRGVSGVDLYRSHIPLAFDPTSIPRGIPLDAAAAYYLPRHLAPNPTYPHLYPPYLIRGYPDTAALENRQTIINDYITSQQMHHNAATAMAQRADMLRGLSPRESSLALNYAAGPRGIIDLSQVPHLPVLVPPTPGTPATAMDRLAYLPTAPQPFSSRHSSSPLSPGGPTHLTKPTTTSSSERERDRDRERDRDREREKSILTSTTTVEHAPIWRPGTEQSSGSSGGGGGSSSRPASHSHAHQHSPISPRTQDALQQRPSVLHNTGMKGIITAVEPSTPTVLRSTSTSSPVRPAATFPPATHCPLGGTLDGVYPTLMEPVLLPKEAPRVARPERPRADTGHAFLAKPPARSGLEPASSPSKGSEPRPLVPPVSGHATIARTPAKNLAPHHASPDPPAPPASASDPHREKTQSKPFSIQELELRSLGYHGSSYSPEGVEPVSPVSSPSLTHDKGLPKHLEELDKSHLEGELRPKQPGPVKLGGEAAHLPHLRPLPESQPSSSPLLQTAPGVKGHQRVVTLAQHISEVITQDYTRHHPQQLSAPLPAPLYSFPGASCPVLDLRRPPSDLYLPPPDHGAPARGSPHSEGGKRSPEPNKTSVLGGGEDGIEPVSPPEGMTEPGHSRSAVYPLLYRDGEQTEPSRMGSKSPGNTSQPPAFFSKLTESNSAMVKSKKQEINKKLNTHNRNEPEYNISQPGTEIFNMPAITGTGLMTYRSQAVQEHASTNMGLEAIIRKALMGKYDQWEESPPLSANAFNPLNASASLPAAMPITAADGRSDHTLTSPGGGGKAKVSGRPSSRKAKSPAPGLASGDRPPSVSSVHSEGDCNRRTPLTNRVWEDRPSSAGSTPFPYNPLIMRLQAGVMASPPPPGLPAGSGPLAGPHHAWDEEPKPLLCSQYETLSDSE

SEQ ID NO: 7206 - protein, 366 aa, Homo sapiens
MELDFGHFDERDKTSRNMRGSRMNGLPSPTHSAHCSFYRTRTLQALSNEKKAKKVRFYRNGDRYFKGIVYAVSSDRFRSFDALLADLTRSLSDNINLPQGVRYIYTIDGSRKIGSMDELEEGESYVCSSDNFFKKVEYTKNVNPNWSVNVKTSANMKAPQSLASSNSAQARENKDFVRPKLVTIIRSGVKPRKAVRVLLNKKTAHSFEQVLTDITEAIKLETGVVKKLYTLDGKQVTCLHDFFGDDDVFIACGPEKFRYAQDDFSLDENECRVMKGNPSATAGPKASPTPQKTSAKSPGPMRRSKSPADSGNDQDANGTSSSQLSTPKSKQSPISTPTSPGSLRKHKVDLYLPLSLDDSDSLGDSM

SEQ ID NO: 7207 - protein, 620 aa, Homo sapiens
MNLERLRKRVRQYLDQQQYQSALFWADKVASLSREEPQDIYWLAQCLYLTAQYHRAAHALRSRKLDKLYEACRYLAARCHYAAKEHQQALDVLDMEEPINKRLFEKYLKDESGFKDPSSDWEMSQSSIKSSICLLRGKIYDALDNRTLATYSYKEALKLDVYCFEAFDLLTSHHMLTAQEEKELLESLPLSKLCNEEQELLRFLFENKLKKYNKPSETVIPESVDGLQENLDVVVSLAERHYYNCDFKMCYKLTSVVMEKDPFHASCLPVHIGTLVELNKANELFYLSHKLVDLYPSNPVSWFAVGCYYLMVGHKNEHARRYLSKATTLEKTYGPAWIAYGHSFAVESEHDQAMAAYFTAAQLMKGCHLPMLYIGLEYGLTNNSKLAERFFSQALSIAPEDPFVMHEVGVVAFQNGEWKTAEKWFLDALEKIKAIGNEVTVDKWEPLLNNLGHVCRKLKKYAEALDYHRQALVLIPQNASTYSAIGYIHSLMGNFENAVDYFHTALGLRRDDTFSVTMLGHCIEMYIGDSEAYIGADIKDKLKCYDFDVHTMKTLKNIISPPWDFREFEVEKQTAEETGLTPLETSRKTPDSRPSLEETFEIEMNESDMMLETSMSDHST

SEQ ID NO: 7208 - protein, 704 aa, Homo sapiens
MVSWGRFICLVVVTMATLSLARPSFSLVEDTTLEPEGAPYWTNTEKMEKRLHAVPAANTVKFRCPAGGNPMPTMRWLKNGKEFKQEHRIGGYKVRNQHWSLIMESVVPSDKGNYTCVVENEYGSINHTYHLDVVERSPHRPILQAGLPANASTVVGGDVEFVCKVYSDAQPHIQWIKHVEKNGSKYGPDGLPYLKVLKAAGVNTTDKEIEVLYIRNVTFEDAGEYTCLAGNSIGISFHSAWLTVLPAPGREKEITASPDYLEIAIYCIGVFLIACMVVTVILCRMKNTTKKPDFSSQPAVHKLTKRIPLRRQVSAESSSSMNSNTPLVRITTRLSSTADTPMLAGVSEYELPEDPKWEFPRDKLTLGKPLGEGCFGQVVMAEAVGIDKDKPKEAVTVAVKMLKDDATEKDLSDLVSEMEMMKMIGKHKNIINLLGACTQDGPLYVIVEYASKGNLREYLRARRPPGMEYSYDINRVPEEQMTFKDLVSCTYQLARGMEYLASQKCIHRDLAARNVLVTENNVMKIADFGLARDINNIDYYKKTTNGRLPVKWMAPEALFDRVYTHQSDVWSFGVLMWEIFTLGGSPYPGIPVEELFKLLKEGHRMDKPANCTNELYMMMRDCWHAVPSQRPTFKQLVEDLDRILTLTTNEEYLDLSQPLEQYSPSYPDTRSSCSSGDDSVFSPDPMPYEPCLPQYPHINGSVKT

SEQ ID NO: 7209 - protein, 1227 aa, Homo sapiens
MAAVLESLLREEVSVAAVVRWIARSTQGSEDNAGEAAALSSLRALRKEFVPFLLNFLREQSSRVLPQGPPTPAKTPGASAALPGRPGGPPRGSRGARSQLFPPTEAQSTAAEAPLARRGGRRRGPGPARERGGRGLEEGVSGESLPGAGGRRLRGSGSPSRPSLTLSDPPNLSNLEEFPPVGSVPPGPTGTKPSRRINPTPVSEERSLSKPKTCFTSPPISCVPSSQPSALDTSPWGLGLPPGCRSLQEEREMLRKERSKQLQQSPTPTCPTPELGSPLPSRTGSLTDEPADPARVSSRQRLELVALVYSSCIAENLVPNLFLELFFVFQLLTARRMVTAKDSDPELSPAVLDSLESPLFQSIHDCVFFAVQVLECHFQVLSNLDKGTLKLLAENERLLCFSPALQGRLRAAYEGSVAKVSLVMPPSTQAVSFQPETDNRANFSSDRAFHTFKKQRDVFYEVLREWEDHHEEPGWDFEKGLGSRIRAMMGQLSAACSHSHFVRLFQKQLLQMCQSPGGAGGTVLGEAPDVLSMLGADKLGRLWRLQERLMAPQSSGGPCPPPTFPGCQGFFRDFILSASSFQFNQHLMDSLSLKIQELNGLALPQHEPNDEDGESDVDWQGERKQFAVVLLSLRLLAKFLGFVAFLPYRGPEPPPTGELQDSILALRSQVPPVLDVRTLLQRGLQARRAVLTVPWLVEFLSFADHVVPLLEYYRDIFTLLLRLHRSLVLSQESEGKMCFLNKLLLLAVLGWLFQIPTVPEDLFFLEEGPSYAFEVDTVAPEHGLDNAPVVDQQLLYTCCPYIGELRKLLASWVSGSSGRSGGFMRKITPTTTTSLGAQPSQTSQGLQAQLAQAFFHNQPPSLRRTVEFVAERIGSNCVKHIKATLVADLVRQAESLLQEQLVTQGEEGGDPAQLLEILCSQLCPHGAQALALGREFCQRKSPGAVRALLPEETPAAVLSSAENIAVGLATEKACAWLSANITALIRREVKAAVSRTLRAQGPEPAARGERRGCSRACEHHAPLPSHLISEIKDVLSLAVGPRDPDEGVSPEHLEQLLGQLGQTLRCRQFLCPPAEQHLAKCSVELASLLVADQIPILGPPAQYRLERGQARRLLHMLLSLWKEDFQGPVPLQLLLSPRNVGLLADTRPREWDLLLFLLRELVEKGLMGRMEIEACLGSLHQAQWPGDFAEELATLSNLFLAEPHLPEPQLRACELVQPNRGTVLAQS

SEQ ID NO: 7210 - protein, 3907 aa, Homo sapiens
MEDEERQKKLEAGKAKLAQFRQRKAQSDGQSPSKKQKKKRKTSSSKHDVSAHHDLNIDQSQCNEMYINSSQRVESTVIPESTIMRTLHSGEITSHEQGFSVELESEISTTADDCSSEVNGCSFVMRTGKPTNLLREEEFGVDDSYSEQGAQDSPTHLEMMESELAGKQHEIEELNRELEEMRVTYGTEGLQQLQEFEAAIKQRDGIITQLTANLQQARREKDETMREFLELTEQSQKLQIQFQQLQASETLRNSTHSSTAADLLQAKQQILTHQQQLEEQDHLLEDYQKKKEDFTMQISFLQEKIKVYEMEQDKKVENSNKEEIQEKETIIEELNTKIIEEEKKTLELKDKLTTADKLLGELQEQIVQKNQEIKNMKLELTNSKQKERQSSEEIKQLMGTVEELQKRNHKDSQFETDIVQRMEQETQRKLEQLRAELDEMYGQQIVQMKQELIRQHMAQMEEMKTRHKGEMENALRSYSNITVNEDQIKLMNVAINELNIKLQDTNSQKEKLKEELGLILEEKCALQRQLEDLVEELSFSREQIQRARQTIAEQESKLNEAHKSLSTVEDLKAEIVSASESRKELELKHEAEVTNYKIKLEMLEKEKNAVLDRMAESQEAELERLRTQLLFSHEEELSKLKEDLEIEHRINIEKLKDNLGIHYKQQIDGLQNEMSQKIETMQFEKDNLITKQNQLILEISKLKDLQQSLVNSKSEEMTLQINELQKEIEILRQEEKEKGTLEQEVQELQLKTELLEKQMKEKENDLQEKFAQLEAENSILKDEKKTLEDMLKIHTPVSQEERLIFLDSIKSKSKDSVWEKEIEILIEENEDLKQQCIQLNEEIEKQRNTFSFAEKNFEVNYQELQEEYACLLKVKDDLEDSKNKQELEYKSKLKALNEELHLQRINPTTVKMKSSVFDEDKTFVAETLEMGEVVEKDTTELMEKLEVTKREKLELSQRLSDLSEQLKQKHGEISFLNEEVKSLKQEKEQVSLRCRELEIIINHNRAENVQSCDTQVSSLLDGVVTMTSRGAEGSVSKVNKSFGEESKIMVEDKVSFENMTVGEESKQEQLILDHLPSVTKESSLRATQPSENDKLQKELNVLKSEQNDLRLQMEAQRICLSLVYSTHVDQVREYMENEKDKALCSLKEELIFAQEEKIKELQKIHQLELQTMKTQETGDEGKPLHLLIGKLQKAVSEECSYFLQTLCSVLGEYYTPALKCEVNAEDKENSGDYISENEDPELQDYRYEVQDFQENMHTLLNKVTEEYNKLLVLQTRLSKIWGQQTDGMKLEFGEENLPKEETEFLSIHSQMTNLEDIDVNHKSKLSSLQDLEKTKLEEQVQELESLISSLQQQLKETEQNYEAEIHCLQKRLQAVSESTVPPSLPVDSVVITESDAQRTMYPGSCVKKNIDGTIEFSGEFGVKEETNIVKLLEKQYQEQLEEEVAKVIVSMSIAFAQQTELSRISGGKENTASSKQAHAVCQQEQHYFNEMKLSQDQIGFQTFETVDVKFKEEFKPLSKELGEHGKEILLSNSDPHDIPESKDCVLTISEEMFSKDKTFIVRQSIHDEISVSSMDASRQLMLNEEQLEDMRQELVRQYQEHQQATELLRQAHMRQMERQREDQEQLQEEIKRLNRQLAQRSSIDNENLVSERERVLLEELEALKQLSLAGREKLCCELRNSSTQTQNGNENQGEVEEQTFKEKELDRKPEDVPPEILSNERYALQKANNRLLKILLEVVKTTAAVEETIGRHVLGILDRSSKSQSSASLIWRSEAEASVKSCVHEEHTRVTDESIPSYSGSDMPRNDINMWSKVTEEGTELSQRLVRSGFAGTEIDPENEELMLNISSRLQAAVEKLLEAISETSSQLEHAKVTQTELMRESFRQKQEATESLKCQEELRERLHEESRAREQLAVELSKAEGVIDGYADEKTLFERQIQEKTDIIDRLEQELLCASNRLQELEAEQQQIQEERELLSRQKEAMKAEAGPVEQQLLQETEKLMKEKLEVQCQAEKVRDDLQKQVKALEIDVEEQVSRFIELEQEKNTELMDLRQQNQALEKQLEKMRKFLDEQAIDREHERDVFQQEIQKLEQQLKVVPRFQPISEHQTREVEQLANHLKEKTDKCSELLLSKEQLQRDIQERNEEIEKLEFRVRELEQALLVSADTFQKVEDRKHFGAVEAKPELSLEVQLQAERDAIDRKEKEITNLEEQLEQFREELENKNEEVQQLHMQLEIQKKESTTRLQELEQENKLFKDDMEKLGLAIKESDAMSTQDQHVLFGKFAQIIQEKEVEIDQLNEQVTKLQQQLKITTDNKVIEEKNELIRDLETQIECLMSDQECVKRNREEEIEQLNEVIEKLQQELANIGQKTSMNAHSLSEEADSLKHQLDVVIAEKLALEQQVETANEEMTFMKNVLKETNFKMNQLTQELFSLKRERESVEKIQSIPENSVNVAIDHLSKDKPELEVVLTEDALKSLENQTYFKSFEENGKGSIINLETRLLQLESTVSAKDLELTQCYKQIKDMQEQGQFETEMLQKKIVNLQKIVEEKVAAALVSQIQLEAVQEYAKFCQDNQTISSEPERTNIQNLNQLREDELGSDISALTLRISELESQVVEMHTSLILEKEQVEIAEKNVLEKEKKLLELQKLLEGNEKKQREKEKKRSPQDVEVLKTTTELFHSNEESGFFNELEALRAESVATKAELASYKEKAEKLQEELLVKETNMTSLQKDLSQVRDHLAEAKEKLSILEKEDETEVQESKKACMFEPLPIKLSKSIASQTDGTLKISSSNQTPQILVKNAGIQINLQSECSSEEVTEIISQFTEKIEKMQELHAAEILDMESRHISETETLKREHYVAVQLLKEECGTLKAVIQCLRSKEGSSIPELAHSDAYQTREICSSDSGSDWGQGIYLTHSQGFDIASEGRGEESESATDSFPKKIKGLLRAVHNEGMQVLSLTESPYSDGEDHSIQQVSEPWLEERKAYINTISSLKDLITKMQLQREAEVYDSSQSHESFSDWRGELLLALQQVFLEERSVLLAAFRTELTALGTTDAVGLLNCLEQRIQEQGVEYQAAMECLQKADRRSLLSEIQALHAQMNGRKITLKREQESEKPSQELLEYNIQQKQSQMLEMQVELSSMKDRATELQEQLSSEKMVVAELKSELAQTKLELETTLKAQHKHLKELEAFRLEVKDKTDEVHLLNDTLASEQKKSRELQWALEKEKAKLGRSEERDKEELEDLKFSLESQKQRNLQLNLLLEQQKQLLNESQQKIESQRMLYDAQLSEEQGRNLELQVLLESEKVRIREMSSTLDRERELHAQLQSSDGTGQSRPPLPSEDLLKELQKQLEEKHSRIVELLNETEKYKLDSLQTRQQMEKDRQVHRKTLQTEQEANTEGQKKMHELQSKVEDLQRQLEEKRQQVYKLDLEGQRLQGIMQEFQKQELEREEKRESRRILYQNLNEPTTWSLTSDRTRNWVLQQKIEGETKESNYAKLIEMNGGGTGCNHELEMIRQKLQCVASKLQVLPQKASERLQFETADDEDFIWVQENIDEIILQLQKLTGQQGEEPSLVSPSTSCGSLTERLLRQNAELTGHISQLTEEKNDLRNMVMKLEEQIRWYRQTGAGRDNSSRFSLNGGANIEAIIASEKEVWNREKLTLQKSLKRAEAEVYKLKAELRNDSLLQTLSPDSEHVTLKRIYGKYLRAESFRKALIYQKKYLLLLLGGFQECEDATLALLARMGGQPAFTDLEVITNRPKGFTRFRSAVRVSIAISRMKFLVRRWHRVTGSVSININRDGFGLNQGAEKTDSFYHSSGGLELYGEPRHTTYRSRSDLDYIRSPLPFQNRYPGTPADFNPGSLACSQLQNYDPDRALTDYITRLEALQRRLGTIQSGSTTQFHAGMRR

SEQ ID NO: 7211 - protein, 587 aa, Homo sapiens
MASEDIAKLAETLAKTQVAGGQLSFKGKSLKLNTAEDAKDVIKEIEDFDSLEALRLEGNTVGVEAARVIAKALEKKSELKRCHWSDMFTGRLRTEIPPALISLGEGLITAGAQLVELDLSDNAFGPDGVQGFEALLKSSACFTLQELKLNNCGMGIGGGKILAAALTECHRKSSAQGKPLALKVFVAGRNRLENDGATALAEAFRVIGTLEEVHMPQNGINHPGITALAQAFAVNPLLRVINLNDNTFTEKGAVAMAETLKTLRQVEVINFGDCLVRSKGAVAIADAIRGGLPKLKELNLSFCEIKRDAALAVAEAMADKAELEKLDLNGNTLGEEGCEQLQEVLEGFNMAKVLASLSDDEDEEEEEEGEEEEEEAEEEEEEDEEEEEEEEEEEEEEPQQRGQGEKSATPSRKILDPNTGEPAPVLSSPPPADVSTFLAFPSPEKLLRLGPKSSVLIAQQTDTSDPEKVVSAFLKVSSVFKDEATVRMAVQDAVDALMQKAFNSSSFNSNTFLTRLLVHMGLLKSEDKVKAIANLYGPLMALNHMVQQDYFPKALAPLLLAFVTKPNSALESCSFARHSLLQTLYKV

SEQ ID NO: 7212 - protein, 466 aa, Homo sapiens
MVMEKPSPLLVGREFVRQYYTLLNQAPDMLHRFYGKNSSYVHGGLDSNGKPADAVYGQKEIHRKVMSQNFTNCHTKIRHVDAHATLNDGVVVQVMGLLSNNNQALRRFMQTFVLAPEGSVANKFYVHNDIFRYQDEVFGGFVTEPQEESEEEVEEPEERQQTPEVVPDDSGTFYDQAVVSNDMEEHLEEPVAEPEPDPEPEPEQEPVSEIQEEKPEPVLEETAPEDAQKSSSPAPADIAQTVQEDLRTFSWASVTSKNLPPSGAVPVTGIPPHVVKVPASQPRPESKPESQIPPQRPQRDQRVREQRINIPPQRGPRPIREAGEQGDIEPRRMVRHPDSHQLFIGNLPHEVDKSELKDFFQSYGNVVELRINSGGKLPNFGFVVFDDSEPVQKVLSNRPIMFRGEVRLNVEEKKTRAAREGDRRDNRLRGPGGPRGGLGGGMRGPPRGGMVQKPGFGVGRGLAPRQ

SEQ ID NO: 7213 - protein, 1103 aa, Homo sapiens
MAAGCLLALTLTLFQSLLIGPSSEEPFPSAVTIKSWVDKMQEDLVTLAKTASGVNQLVDIYEKYQDLYTVEPNNARQLVEIAARDIEKLLSNRSKALVRLALEAEKVQAAHQWREDFASNEVVYYNAKDDLDPEKNDSEPGSQRIKPVFIEDANFGRQISYQHAAVHIPTDIYEGSTIVLNELNWTSALDEVFKKNREEDPSLLWQVFGSATGLARYYPASPWVDNSRTPNKIDLYDVRRRPWYIQGAASPKDMLILVDVSGSVSGLTLKLIRTSVSEMLETLSDDDFVNVASFNSNAQDVSCFQHLVQANVRNKKVLKDAVNNITAKGITDYKKGFSFAFEQLLNYNVSRANCNKIIMLFTDGGEERAQEIFNKYNKDKKVRVFTFSVGQHNYDRGPIQWMACENKGYYYEIPSIGAIRINTQEYLDVLGRPMVLAGDKAKQVQWTNVYLDALELGLVITGTLPVFNITGQFENKTNLKNQLILGVMGVDVSLEDIKRLTPRFTLCPNGYYFAIDPNGYVLLHPNLQPKPIGVGIPTINLRKRRPNIQNPKSQEPVTLDFLDAELENDIKVEIRNKMIDGESGEKTFRTLVKSQDERYIDKGNRTYTWTPVNGTDYSLALVLPTYSFYYIKAKLEETITQARYSETLKPDNFEESGYTFIAPRDYCNDLKISDNNTEFLLNFNEFIDRKTPNNPSCNADLINRVLLDAGFTNELVQNYWSKQKNIKGVKARFVVTDGGITRVYPKEAGENWQENPETYEDSFYKRSLDNDNYVFTAPYFNKSGPGAYESGIMVSKAVEIYIQGKLLKPAVVGIKIDVNSWIENFTKTSIRDPCAGPVCDCKRNSDVMDCVILDDGGFLLMANHDDYTNQIGRFFGEIDPSLMRHLVNISVYAFNKSYDYQSVCEPGAAPKQGAGHRSAYVPSVADILQIGWWATAAAWSILQQFLLSLTFPRLLEAVEMEDDDFTASLSKQSCITEQTQYFFDNDSKSFSGVLDCGNCSRIFHGEKLMNTNLIFIMVESKGTCPCDTRLLIQAEQTSDGPNPCDMVKQPRYRKGPDVCFDNNVLEDYTDCGGVSGLNPSLWYIIGIQFLLLWLVSGSTHRLL

SEQ ID NO: 7214 - protein, 687 aa, Homo sapiens
MSNRNNNKLPSNLPQLQNLIKRDPPAYIEEFLQQYNHYKSNVEIFKLQPNKPSKELAELVMFMAQISHCYPEYLSNFPQEVKDLLSCNHTVLDPDLRMTFCKALILLRNKNLINPSSLLELFFELFRCHDKLLRKTLYTHIVTDIKNINAKHKNNKVNVVLQNFMYTMLRDSNATAAKMSLDVMIELYRRNIWNDAKTVNVITTACFSKVTKILVAALTFFLGKDEDEKQDSDSESEDDGPTARDLLVQYATGKKSSKNKKKLEKAMKVLKKQKKKKKPEVFNFSAIHLIHDPQDFAEKLLKQLECCKERFEVKMMLMNLISRLVGIHELFLFNFYPFLQRFLQPHQREVTKILLFAAQASHHLVPPEIIQSLLMTVANNFVTDKNSGEVMTVGINAIKEITARCPLAMTEELLQDLAQYKTHKDKNVMMSARTLIHLFRTLNPQMLQKKFRGKPTEASIEARVQEYGELDAKDYIPGAEVLEVEKEENAENDEDGWESTSLSEEEDADGEWIDVQHSSDEEQQEISKKLNSMPMEERKAKAAAISTSRVLTQEDFQKIRMAQMRKELDAAPGKSQKRKYIEIDSDEEPRGELLSLRDIERLHKKPKSDKETRLATAMAGKTDRKEFVRKKTKTNPFSSSTNKEKKKQKNFMMMRYSQNVRSKNKRSFREKQLALRDALLKKRKRMK

SEQ ID NO: 7215 - protein, 695 aa, Homo sapiens
MADIKTGIFAKNVQKRLNRAQEKVLQKLGKADETKDEQFEEYVQNFKRQEAEGTRLQRELRGYLAAIKGMQEASMKLTESLHEVYEPDWYGREDVKMVGEKCDVLWEDFHQKLVDGSLLTLDTYLGQFPDIKNRIAKRSRKLVDYDSARHHLEALQSSKRKDESRISKAEEEFQKAQKVFEEFNVDLQEELPSLWSRRVGFYVNTFKNVSSLEAKFHKEIAVLCHKLYEVMTKLGDQHADKAFTIQGAPSDSGPLRIAKTPSPPEEPSPLPSPTASPNHTLAPASPAPARPRSPSQTRKGPPVPPLPKVTPTKELQQENIISFFEDNFVPEISVTTPSQNEVPEVKKEETLLDLDFDPFKPEVTPAGSAGVTHSPMSQTLPWDLWTTSTDLVQPASGGSFNGFTQPQDTSLFTMQTDQSMICNLAESEQAPPTEPKAEEPLAAVTPAVGLDLGMDTRAEEPVEEAVIIPGADADAAVGTLVSAAEGAPGEEAEAEKATVPAGEGVSLEEAKIGTETTEGAESAQPEAEELEATVPQEKVIPSVVIEPASNHEEEGENEITIGAEPKETTEDAAPPGPTSETPELATEQKPIQDPQPTPSAPAMGAADQLASAREASQELPPGFLYKVETLHDFEAANSDELTLQRGDVVLVVPSDSEADQDAGWLVGVKESDWLQYRDLATYKGLFPENFTRRLD

SEQ ID NO: 7216 - protein, 976 aa, Homo sapiens
MKVVNLKQAILQAWKERWSDYQWAINMKKFFPKGATWDILNLADALLEQAMIGPSPNPLILSYLKYAISSQFDDFSRDLCVQALLDIMDMFCDRLSCHGKAEECIGLCRALLSALHWLLRCTAASAERLREGLEAGTPAAGEKQLAMCLQRLEKTLSSTKNRALLHIAKLEEASSWTAIEHSLLKLGEILANLSNPQLRSQAEQCGTLIRSIPTMLSVHAEQMHKTGFPTVHAVILLEGTMNLTGETQSLVEQLTMVKRMQHIPTPLFVLEIWKACFVGLIESPEGTEELKWTAFTFLKIPQVLVKLKKYSHGDKDFTEDVNCAFEFLLKLTPLLDKADQRCNCDCTNFLLQECGKQGLLSEASVNNLMAKRKADREHAPQQKSGENANIQPNIQLILRAEPTVTNILKTMDADHSKSPEGLLGVLGHMLSGKSLDLLLAAAAATGKLKSFARKFINLNEFTTYGSEESTKPASVRALLFDISFLMLCHVAQTYGSEVILSESRTGAEVPFFETWMQTCMPEEGKILNPDHPCFRPDSTKVESLVALLNNSSEMKLVQMKWHEACLSISAAILEILNAWENGVLAFESIQKITDNIKGKVCSLAVCAVAWLVAHVRMLGLDEREKSLQMIRQLAGPLFSENTLQFYNERVVIMNSILERMCADVLQQTATQIKFPSTGVDTMPYWNLLPPKRPIKEVLTDIFAKVLEKGWVDSRSIHIFDTLLHMGGVYWFCNNLIKELLKETRKEHTLRAVELLYSIFCLDMQQVTLVLLGHILPGLLTDSSKWHSLMDPPGTALAKLAVWCALSSYSSHKGQASTRQKKRHREDIEDYISLFPLDDVQPSKLMRLLSSNEDDANILSSPTDRSMSSSLSASQLHTVNMRDPLNRVLANLFLLISSILGSRTAGPHTQFVQWFMEECVDCLEQGGRGSVLQFMPFTTVSELVKVSAMSSPKVVLAITDLSLPLGRQVAAKAIAAL

SEQ ID NO: 7217 - protein, 446 aa, Homo sapiens
MLLPQLCWLPLLAGLLPPVPAQKFSALTFLRVDQDKDKDCSLDCAGSPQKPLCASDGRTFLSRCEFQRAKCKDPQLEIAYRGNCKDVSRCVAERKYTQEQARKEFQQVFIPECNDDGTYSQVQCHSYTGYCWCVTPNGRPISGTAVAHKTPRCPGSVNEKLPQREGTGKTDDAAAPALETQPQGDEEDIASRYPTLWTEQVKSRQNKTNKNSVSSCDQEHQSALEEAKQPKNDNVVIPECAHGGLYKPVQCHPSTGYCWCVLVDTGRPIPGTSTRYEQPKCDNTARAHPAKARDLYKGRQLQGCPGAKKHEFLTSVLDALSTDMVHAASDPSSSSGRLSEPDPSHTLEERVVHWYFKLLDKNSSGDIGKKEIKPFKRFLRKKSKPKKCVKKFVEYCDVNNDKSISVQELMGCLGVAKEDGKADTKKRHTPRGHAESTSNRQPRKQG

SEQ ID NO: 7218 - protein, 394 aa, Homo sapiens
MFCPLKLILLPVLLDYSLGLNDLNVSPPELTVHVGDSALMGCVFQSTEDKCIFKIDWTLSPGEHAKDEYVLYYYSNLSVPIGRFQNRVHLMGDILCNDGSLLLQDVQEADQGTYICEIRLKGESQVFKKAVVLHVLPEEPKELMVHVGGLIQMGCVFQSTEVKHVTKVEWIFSGRRAKEEIVFRYYHKLRMSVEYSQSWGHFQNRVNLVGDIFRNDGSIMLQGVRESDGGNYTCSIHLGNLVFKKTIVLHVSPEEPRTLVTPAALRPLVLGGNQLVIIVGIVCATILLLPVLILIVKKTCGNKSSVNSTVLVKNTKKTNPEIKEKPCHFERCEGEKHIYSPIIVREVIEEEEPSEKSEATYMTMHPVWPSLRSDRNNSLEKKSGGGMPKTQQAF

SEQ ID NO: 7219 - protein, 438 aa, Homo sapiens
MMYAPVEFSEAEFSRAEYQRKQQFWDSVRLALFTLAIVAIIGIAIGIVTHFVVEDDKSFYYLASFKVTNIKYKENYGIRSSREFIERSHQIERMMSRIFRHSSVGGRFIKSHVIKLSPDEQGVDILIVLIFRYPSTDSAEQIKKKIEKALYQSLKTKQLSLTINKPSFRLTPIDSKKMRNLLNSRCGIRMTSSNMPLPASSSTQRIVQGRETAMEGEWPWQASLQLIGSGHQCGASLISNTWLLTAAHCFWKNKDPTQWIATFGATITPPAVKRNVRKIILHENYHRETNENDIALVQLSTGVEFSNIVQRVCLPDSSIKLPPKTSVFVTGFGSIVDDGPIQNTLRQARVETISTDVCNRKDVYDGLITPGMLCAGFMEGKIDACKGDSGGPLVYDNHDIWYIVGIVSWGQSCALPKKPGVYTRVTKYRDWIASKTGM

SEQ ID NO: 7220 - protein, 603 aa, Homo sapiens
MNKLRQSFRRKKDVYVPEASRPHQWQTDEEGVRTGKCSFPVKYLGHVEVDESRGMHICEDAVKRLKAERKFFKGFFGKTGKKAVKAVLWVSADGLRVVDEKTKDLIVDQTIEKVSFCAPDRNFDRAFSYICRDGTTRRWICHCFMAVKDTGERLSHAVGCAFAACLERKQKREKECGVTATFDASRTTFTREGSFRVTTATEQAEREEIMKQMQDAKKAETDKIVVGSSVAPGNTAPSPSSPTSPTSDATTSLEMNNPHAIPRRHAPIEQLARQGSFRGFPALSQKMSPFKRQLSLRINELPSTMQRKTDFPIKNAVPEVEGEAESISSLCSQITNAFSTPEDPFSSAPMTKPVTVVAPQSPTFQGTEWGQSSGAASPGLFQAGHRRTPSEADRWLEEVSKSVRAQQPQASAAPLQPVLQPPPPTAISQPASPFQGNAFLTSQPVPVGVVPALQPAFVPAQSYPVANGMPYPAPNVPVVGITPSQMVANVFGTAGHPQAAHPHQSPSLVRQQTFPHYEASSATTSPFFKPPAQHLNGSAAFNGVDDGRLASADRHTEVPTGTCPVDPFEAQWAALENKSKQRTNPSPTNPFSSDLQKTFEIEL

SEQ ID NO: 7221 - protein, 1463 aa, Homo sapiens
MEPRLFCWTTLFLLAGWCLPGLPCPSRCLCFKSTVRCMHLMLDHIPQVPQQTTVLDLRFNRIREIPGSAFKKLKNLNTLLLNNNHIRKISRNAFEGLENLLYLYLYKNEIHALDKQTFKGLISLEHLYIHFNQLEMLQPETFGDLLRLERLFLHNNKLSKIPAGSFSNLDSLKRLRLDSNALVCDCDLMWLGELLQGFAQHGHTQAAATCEYPRRLHGRAVASVTVEEFNCQSPRITFEPQDVEVPSGNTVYFTCRAEGNPKPEIIWIHNNHSLDLEDDTRLNVFDDGTLMIRNTRESDQGVYQCMARNSAGEAKTQSAMLRYSSLPAKPSFVIQPQDTEVLIGTSTTLECMATGHPHPLITWTRDNGLELDGSRHVATSSGLYLQNITQRDHGRFTCHANNSHGTVQAAANIIVQAPPQFTVTPKDQVVLEEHAVEWLCEADGNPPPVIVWTKTGGQLPVEGQHTVLSSGTLRIDRAAQHDQGQYECQAVSSLGVKKVSVQLTVKPKALAVFTQLPQDTSVEVGKNINISCHAQGEPQPIITWNKEGVQITESGKFHVDDEGTLTIYDAGFPDQGRYECVARNSFGLAVTNMFLTVTAIQGRQAGDDFVESSILDAVQRVDSAINSTRRHLFSQKPHTSSDLLAQFHYPRDPLIVEMARAGEIFEHTLQLIRERVKQGLTVDLEGKEFRYNDLVSPRSLSLIANLSGCTARRPLPNCSNRCFHAKYRAHDGTCNNLQQPTWGAALTAFARLLQPAYRDGIRAPRGLGLPVGSRQPLPPPRLVATVWARAAAVTPDHSYTRMLMHWGWFLEHDLDHTVPALSTARFSDGRPCSSVCTNDPPCFPMNTRHADPRGTHAPCMLFARSSPACASGRPSATVDSVYAREQINQQTAYIDGSNVYGSSERESQALRDPSVPRGLLKTGFPWPPSGKPLLPFSTGPPTECARQEQESPCFLAGDHRANEHLALAAMHTLWFREHNRMATELSALNPHWEGNTVYQEARKIVGAELQHITYSHWLPKVLGDPGTRMLRGYRGYNPNVNAGIINSFATAAFRFGHTLINPILYRLNATLGEISEGHLPFHKALFSPSRIIKEGGIDPVLRGLFGVAAKWRAPSYLLSPELTQRLFSAAYSAAVDSAATIIQRGRDHGIPPYVDFRVFCNLTSVKNFEDLQNEIKDSEIRQKLRKLYGSPGDIDLWPALMVEDLIPGTRVGPTLMCLFVTQFQRLRDGDRFWYENPGVFTPAQLTQLKQASLSRVLCDNGDSIQQVQADVFVKAEYPQDYLNCSEIPKVDLRVWQDCCADCRSRGQFRAVTQESQKKRSAQYSYPVDKDMELSHLRSRQQDKIYVGEDARNVTVLAKTKFSQDFSTFAAEIQETITALREQINKLEARLRQAGCTDVRGVPRKAEERWMKEDCTHCICESGQVTCVVEICPPAPCPSPELVKGTCCPVCRDRGMPSDSPEKR

SEQ ID NO: 7222 - protein, 628 aa, Homo sapiens
MSPGGKFDFDDGGCYVGGWEAGRAHGYGVCTGPGAQGEYSGCWAHGFESLGVFTGPGGHSYQGHWQQGKREGLGVERKSRWTYRGEWLGGLKGRSGVWESVSGLRYAGLWKDGFQDGYGTETYSDGGTYQGQWQAGKRHGYGVRQSVPYHQAALLRSPRRTSLDSGHSDPPTPPPPLPLPGDEGGSPASGSRGGFVLAGPGDADGASSRKRTPAAGGFFRRSLLLSGLRAGGRRSSLGSKRGSLRSEVSSEVGSTGPPGSEASGPPAAAPPALIEGSATEVYAGEWRADRRSGFGVSQRSNGLRYEGEWLGNRRHGYGRTTRPDGSREEGKYKRNRLVHGGRVRSLLPLALRRGKVKEKVDRAVEGARRAVSAARQRQEIAAARAADALLKAVAASSVAEKAVEAARMAKLIAQDLQPMLEAPGRRPRQDSEGSDTEPLDEDSPGVYENGLTPSEGSPELPSSPASSRQPWRPPACRSPLPPGGDQGPFSSPKAWPEEWGGAGAQAEELAGYEAEDEAGMQGPGPRDGSPLLGGCSDSSGSLREEEGEDEEPLPPLRAPAGTEPEPIAMLVLRGSSSRGPDAGCLTEELGEPAATERPAQPGAANPLVVGAVALLDLSLAFLFSQLLT

SEQ ID NO: 7223 - protein, 325 aa, Homo sapiens
MESTGSVGEAPGGPRVLVVGGGIAGLGAAQRLCGHSAFPHLRVLEATARAGGRIRSERCFGGVVEVGAHWIHGPSRGNPVFQLAAEYGLLGEKELSQENQLVETGGHVGLPSVSYASSGASVSLQLVAEMATLFYGLIDQTREFLHAAETPVPSVGEYLKKEIGQHVAGWTEDEETRKLKLAVLNSFFNLECCVSGTHSMDLVALAPFGEYTVLPGLDCTFSKGYQGLTNCMMAALPEDTVVFEKPVKTIHWNGSFQEAAFPGETFPVSVECEDGDRFPAHHVIVTVPLGLSTFSVGSLPDLSLSSWRLCRMKKYFCVSPKCSGE

SEQ ID NO: 7224 - protein, 1143 aa, Homo sapiens
MEKRETFVQAVSKELVGEFLQFVQLDKEASDPFSLNELLDELSRKQKEELWQRLKNLLTDVLLESPVDGWQVVEAQGEDNMETEHGSKMRKSIEIIYAITSVILASVSVINESENYEALLECVIILNGILYALPESERKLQSSIQDLCVTWWEKGLPAKEDTGKTAFVMLLRRSLETKTGADVCRLWRIHQALYCFDYDLEESGEIKDMLLECFININYIKKEEGRRFLSCLFNWNINFIKMIHGTIKNQLQGLQKSLMVYIAEIYFRAWKKASGKILEAIENDCIQDFMFHGIHLPRRSPVHSKVREVLSYFHHQKKVRQGVEEMLYRLYKPILWRGLKARNSEVRSNAALLFVEAFPIRDPNLHAIEMDSEIQKQFEELYSLLEDPYPMVRSTGILGVCKITSKYWEMMPPTILIDLLKKVTGELAFDTSSADVRCSVFKCLPMILDNKLSHPLLEQLLPALRYSLHDNSEKVRVAFVDMLLKIKAVRAAKFWKICPMEHILVRLETDSRPVSRRLVSLIFNSFLPVNQPEEVWCERCVTLVQMNHAAARRFYQYAHEHTACTNIAKLIHVIRHCLNACIQRAVREPPEDEEEEDGREKENVTVLDKTLSVNDVACMAGLLEIIVILWKSIDRSMENNKEAKLYTINKFASVLPEYLKVFKDDRCKIPLFMLMSFMPASAVPPFSCGVISTLRSREEGAVDKSYCTLLDCLCSWGQVGHILELVDNWLPTEHAQAKSNTASKGRVQIHDTRPVKPELALVYIEYLLTHPKNRECLLSAPRKKLNHLLKALETSKADLESLLQTPGGKPRGFSEAAAPRAFGLHCRLSIHLQHKFCSEGKVYLSMLEDTGFWLESKILSFIQDQEEDYLKLHRVIYQQIIQTYLTVCKDVVMVGLGDHQFQMQLLQRSLGIMQTVKGFFYVSLLLDILKEITGSSLIQKTDSDEEVAMLLDTVQKVFQKMLECIARSFRKQPEEGLRLLYSVQRPLHEFITAVQSRHTDTPVHRGVLSTLIAGPVVEISHQLRKVSDVEELTPPEHLSDLPPFSRCLIGIIIKSSNVVRSFLDELKACVASNDIEGIVCLTAAVHIILVINAGKHKSSKVREVAATVHRKLKTFMEITLEEDSIERFLYESSSRTLGELLNS

SEQ ID NO: 7225 - protein, 622 aa, Homo sapiens
MRLLRRRHMPLRLAMVGCAFVLFLFLLHRDVSSREEATEKPWLKSLVSRKDHVLDLMLEAMNNLRDSMPKLQIRAPEAQQTLFSINQSCLPGFYTPAELKPFWERPPQDPNAPGADGKAFQKSKWTPLETQEKEEGYKKHCFNAFASDRISLQRSLGPDTRPPECVDQKFRRCPPLATTSVIIVFHNEAWSTLLRTVYSVLHTTPAILLKEIILVDDASTEEHLKEKLEQYVKQLQVVRVVRQEERKGLITARLLGASVAQAEVLTFLDAHCECFHGWLEPLLARIAEDKTVVVSPDIVTIDLNTFEFAKPVQRGRVHSRGNFDWSLTFGWETLPPHEKQRRKDETYPIKSPTFAGGLFSISKSYFEHIGTYDNQMEIWGGENVEMSFRVWQCGGQLEIIPCSVVGHVFRTKSPHTFPKGTSVIARNQVRLAEVWMDSYKKIFYRRNLQAAKMAQEKSFGDISERLQLREQLHCHNFSWYLHNVYPEMFVPDLTPTFYGAIKNLGTNQCLDVGENNRGGKPLIMYSCHGLGGNQYFEYTTQRDLRHNIAKQLCLHVSKGALGLGSCHFTGKNSQVPKDEEWELAQDQLIRNSGSGTCLTSQDKKPAMAPCNPSDPHQLWLFV

SEQ ID NO: 7226 - protein, 691 aa, Homo sapiens
MMAENNLKMLKIQQCVVANKLPRNRPYVCNICFKHFETPSKLARHYLIHTGQKPFECDVCHKTFRQLVHLERHQLTHSLPFKCSICQRHFKNLKTFVKHQQLHNETYQNNVKQVRRLLEAKQEKSMYGVYNTFTTEERWALHPCSKSDPMYSMKRRKNIHACTICGKMFPSQSKLDRHVLIHTGQRPFKCVLCTKSFRQSTHLKIHQLTHSEERPFQCCFCQKGFKIQSKLLKHKQIHTRNKAFRALLLKKRRTESRPLPNKLNANQGGFENGEIGESEENNPLDVHSIYIVPFQCPKCEKCFESEQILNEHSCFAARSGKIPSRFKRSYNYKTIVKKILAKLKRARSKKLDNFQSEKKVFKKSFLRNCDLISGEQSSEQTQRTFVGSLGKHGTYKTIGNRKKKTLTLPFSWQNMGKNLKGILTTENILSIDNSVNKKDLSICGSSGEEFFNNCEVLQCGFSVPRENIRTRHKICPCDKCEKVFPSISKLKRHYLIHTGQRPFGCNICGKSFRQSAHLKRHEQTHNEKSPYASLCQVEFGNFNNLSNHSGNNVNYNASQQCQAPGVQKYEVSESDQMSGVKAESQDFIPGSTGQPCLPNVLLESEQSNPFCSYSEHQEKNDVFLYRCSVCAKSFRSPSKLERHYLIHAGQKPFECSVCGKTFRQAPHWKRHQLTHFKERPQGKVVALDSVM

SEQ ID NO: 7227 - protein, 198 aa, Homo sapiens
MIKTQESLTLEDVAVEFSWEEWQLLDTAQKNLYRDVMVENYNHLVSLGYQTSKPDVLSKLAHGQEPWTTDAKIQNKNCPGIGKVDSHLQEHSPNQRLLKSVQQCNGQNTLRNIVHLSKTHFPIVQNHDTFDLYRKNLKSSLSLINQKRRHGINNPVEFIGETGSLERPRQADHLRSEVQDQPGQRGETLCLLKIHTKN

SEQ ID NO: 7228 - protein, 1036 aa, Homo sapiens
MSLKNEPRVNTSALQKIAADMSNIIENLDTRELHFEGEEVDYDVSPSDPKIQEVYIPFSAIYNTQGFKEPNIQTYLSGCPIKAQVLEVERFTSTTRVPSINLYTIELTHGEFKWQVKRKFKHFQEFHRELLKYKAFIRIPIPTRRHTFRRQNVREEPREMPSLPRSSENMIREEQFLGRRKQLEDYLTKILKMPMYRNYHATTEFLDISQLSFIHDLGPKGIEGMIMKRSGGHRIPGLNCCGQGRACYRWSKRWLIVKDSFLLYMKPDSGAIAFVLLVDKEFKIKVGKKETETKYGIRIDNLSRTLILKCNSYRHARWWGGAIEEFIQKHGTNFLKDHRFGSYAAIQENALAKWYVNAKGYFEDVANAMEEANEEIFITDWWLSPEIFLKRPVVEGNRWRLDCILKRKAQQGVRIFIMLYKEVELALGINSEYTKRTLMRLHPNIKVMRHPDHVSSTVYLWAHHEKLVIIDQSVAFVGGIDLAYGRWDDNEHRLTDVGSVKRVTSGPSLGSLPPAAMESMESLRLKDKNEPVQNLPIQKSIDDVDSKLKGIGKPRKFSKFSLYKQLHRHHLHDADSISSIDSTSNTGSIRSLQTGVGELHGETRFWHGKDYCNFVFKDWVQLDKPFADFIDRYSTPRMPWHDIASAVHGKAARDVARHFIQRWNFTKIMKSKYRSLSYPFLLPKSQTTAHELRYQVPGSVHANVQLLRSAADWSAGIKYHEESIHAAYVHVIENSRHYIYIENQFFISCADDKVVFNKIGDAIAQRILKAHRENQKYRVYVVIPLLPGFEGDISTGGGNALQAIMHFNYRTMCRGENSILGQLKAELGNQWINYISFCGLRTHAELEGNLVTELIYVHSKLLIADDNTVIIGSANINDRSMLGKRDSEMAVIVQDTETVPSVMDGKEYQAGRFARGLRLQCFRVVLGYLDDPSEDIQDPVSDKFFKEVWVSTAARNATIYDKVFRCLPNDEVHNLIQLRDFINKPVLAKEDPIRAEEELKKIRGFLVQFPFYFLSEESLLPSVGTKEAIVPMEVWT

SEQ ID NO: 7229 - protein, 561 aa, Homo sapiens
MAAEEMHWPVPMKAIGAQNLLTMPGGVAKAGYLHKKGGTQLQLLKWPLRFVIIHKRCVYYFKSSTSASPQGAFSLSGYNRVMRAAEETTSNNVFPFKIIHISKKHRTWFFSASSEEERKSWMALLRREIGHFHEKKDLPLDTSDSSSDTDSFYGAVERPVDISLSPYPTDNEDYEHDDEDDSYLEPDSPEPGRLEDALMHPPAYPPPPVPTPRKPAFSDMPRAHSFTSKGPGPLLPPPPPKHGLPDVGLAAEDSKRDPLCPRRAEPCPRVPATPRRMSDPPLSTMPTAPGLRKPPCFRESASPSPEPWTPGHGACSTSSAAIMATATSRNCDKLKSFHLSPRGPPTSEPPPVPANKPKFLKIAEEDPPREAAMPGLFVPPVAPRPPALKLPVPEAMARPAVLPRPEKPQLPHLQRSPPDGQSFRSFSFEKPRQPSQADTGGDDSDEDYEKVPLPNSVFVNTTESCEVERLFKATSPRGEPQDGLYCIRNSSTKSGKVLVVWDETSNKVRNYRIFEKDSKFYLEGEVLFVSVGSMVEHYHTHVLPSHQSLLLRHPYGYTGPR

SEQ ID NO: 7230 - protein, 1828 aa, Homo sapiens
MAASELYTKFARVWIPDPEEVWKSAELLKDYKPGDKVLLLHLEEGKDLEYHLDPKTKELPHLRNPDILVGENDLTALSYLHEPAVLHNLRVRFIDSKLIYTYCGIVLVAINPYEQLPIYGEDIINAYSGQNMGDMDPHIFAVAEEAYKQMARDERNQSIIVSGESGAGKTVSAKYAMRYFATVSGSASEANVEEKVLASNPIMESIGNAKTTRNDNSSRFGKYIEIGFDKRYRIIGANMRTYLLEKSRVVFQAEEERNYHIFYQLCASAKLPEFKMLRLGNADNFNYTKQGGSPVIEGVDDAKEMAHTRQACTLLGISESHQMGIFRILAGILHLGNVGFTSRDADSCTIPPKHEPLCIFCELMGVDYEEMCHWLCHRKLATATETYIKPISKLQATNARDALAKHIYAKLFNWIVDNVNQALHSAVKQHSFIGVLDIYGFETFEINSFEQFCINYANEKLQQQFNMHVFKLEQEEYMKEQIPWTLIDFYDNQPCINLIESKLGILDLLDEECKMPKGTDDTWAQKLYNTHLNKCALFEKPRLSNKAFIIQHFADKVEYQCEGFLEKNKDTVFEEQIKVLKSSKFKMLPELFQDDEKAISPTSATSSGRTPLTRTPAKPTKGRPGQMAKEHKKTVGHQFRNSLHLLMETLNATTPHYVRCIKPNDFKFPFTFDEKRAVQQLRACGVLETIRISAAGFPSRWTYQEFFSRYRVLMKQKDVLSDRKQTCKNVLEKLILDKDKYQFGKTKIFFRAGQVAYLEKLRADKLRAACIRIQKTIRGWLLRKKYLRMRKAAITMQRYVRGYQARCYAKFLRRTKAATIIQKYWRMYVVRRRYKIRRAATIVLQSYLRGFLARNRYRKILREHKAVIIQKRVRGWLARTHYKRSMHAIIYLQCCFRRMMAKRELKKLKIEARSVERYKKLHIGMENKIMQLQRKVDEQNKDYKCLVEKLTNLEGIYNSETEKLRSDLERLQLSEEEAKVATGRVLSLQEEIAKLRKDLEQTRSEKKCIEEHADRYKQETEQLVSNLKEENTLLKQEKEALNHRIVQQAKEMTETMEKKLVEETKQLELDLNDERLRYQNLLNEFSRLEERYDDLKEEMTLMVHVPKPGHKRTDSTHSSNESEYIFSSEIAEMEDIPSRTEEPSEKKVPLDMSLFLKLQKRVTELEQEKQVMQDELDRKEEQVLRSKAKEEERPQIRGAELEYESLKRQELESENKKLKNELNELRKALSEKSAPEVTAPGAPAYRVLMEQLTSVSEELDVRKEEVLILRSQLVSQKEAIQPKDDKNTMTDSTILLEDVQKMKDKGEIAQAYIGLKETNRLLESQLQSQKRSHENEAEALRGEIQSLKEENNRQQQLLAQNLQLPPEARIEASLQHEITRLTNENLDLMEQLEKQDKTVRKLKKQLKVFAKKIGELEVGQMENISPGQIIDEPIRPVNIPRKEKDFQGMLEYKKEDEQKLVKNLILELKPRGVAVNLIPGLPAYILFMCVRHADYLNDDQKVRSLLTSTINSIKKVLKKRGDDFETVSFWLSNTCRFLHCLKQYSGEEGFMKHNTSRQNEHCLTNFDLAEYRQVLSDLAIQIYQQLVRVLENILQPMIVSGMLEHETIQGVSGVKPTGLRKRTSSIADEGTYTLDSILRQLNSFHSVMCQHGMDPELIKQVVKQMFYIIGAITLNNLLLRKDMCSWSKGMQIRYNVSQLEEWLRDKNLMNSGAKETLEPLIQAAQLLQVKKKTDDDAEAICSMCNALTTAQIVKVLNLYTPVNEFEERVSVSFIRTIQMRLRDRKDSPQLLMDAKHIFPVTFPFNPSSLALETIQIPASLGLGFISRV

SEQ ID NO: 7231 - protein, 4533 aa, Homo sapiens
MAGPLPDEQDFIQAYEEVREKYKDERDRVQKKTFTKWVNKHLIKAQRHISDLYEDLRDGHNLISLLEVLSGDSLPREKGRMRFHKLQNVQIALDYLRHRQVKLVNIRNDDIADGNPKLTLGLIWTIILHFQISDIQVSGQSEDMTAKEKLLLWSQRMVEGYQGLRCDNFTSSWRDGRLFNAIIHRHKPLLIDMNKVYRQTNLENLDQAFSVAERDLGVTRLLDPEDVDVPQPDEKSIITYVSSLYDAMPRVPDVQDGVRANELQLRWQEYRELVLLLLQWMRHHTAAFEERRFPSSFEEIEILWSQFLKFKEMELPAKEADKNRSKGIYQSLEGAVQAGQLKVPPGYHPLDVEKEWGKLHVAILEREKQLRSEFERLECLQRIVTKLQMEAGLCEEQLNQADALLQSDVRLLAAGKVPQRAGEVERDLDKADSMIRLLFNDVQTLKDGRHPQGEQMYRRVYRLHERLVAIRTEYNLRLKAGVAAPATQVAQVTLQSVQRRPELEDSTLRYLQDLLAWVEENQHRVDGAEWGVDLPSVEAQLGSHRGLHQSIEEFRAKIERARSDEGQLSPATRGAYRDCLGRLDLQYAKLLNSSKARLRSLESLHSFVAAATKELMWLNEKEEEEVGFDWSDRNTNMTAKKESYSALMRELELKEKKIKELQNAGDRLLREDHPARPTVESFQAALQTQWSWMLQLCCCIEAHLKENAAYFQFFSDVREAEGQLQKLQEALRRKYSCDRSATVTRLEDLLQDAQDEKEQLNEYKGHLSGLAKRAKAVVQLKPRHPAHPMRGRLPLLAVCDYKQVEVTVHKGDECQLVGPAQPSHWKVLSSSGSEAAVPSVCFLVPPPNQEAQEAVTRLEAQHQALVTLWHQLHVDMKSLLAWQSLRRDVQLIRSWSLATFRTLKPEEQRQALHSLELHYQAFLRDSQDAGGFGPEDRLMAEREYGSCSHHYQQLLQSLEQGAQEESRCQRCISELKDIRLQLEACETRTVHRLRLPLDKEPARECAQRIAEQQKAQAEVEGLGKGVARLSAEAEKVLALPEPSPAAPTLRSELELTLGKLEQVRSLSAIYLEKLKTISLVIRGTQGAEEVLRAHEEQLKEAQAVPATLPELEATKASLKKLRAQAEAQQPTFDALRDELRGAQEVGERLQQRHGERDVEVERWRERVAQLLERWQAVLAQTDVRQRELEQLGRQLRYYRESADPLGAWLQDARRRQEQIQAMPLADSQAVREQLRQEQALLEEIERHGEKVEECQRFAKQYINAIKDYELQLVTYKAQLEPVASPAKKPKVQSGSESVIQEYVDLRTHYSELTTLTSQYIKFISETLRRMEEEERLAEQQRAEERERLAEVEAALEKQRQLAEAHAQAKAQAEREAKELQQRMQEEVVRREEAAVDAQQQKRSIQEELQQLRQSSEAEIQAKARQAEAAERSRLRIEEEIRVVRLQLEATERQRGGAEGELQALRARAEEAEAQKRQAQEEAERLRRQVQDESQRKRQAEVELASRVKAEAEAAREKQRALQALEELRLQAEEAERRLRQAEVERARQVQVALETAQRSAEAELQSKRASFAEKTAQLERSLQEEHVAVAQLREEAERRAQQQAEAERAREEAERELERWQLKANEALRLRLQAEEVAQQKSLAQAEAEKQKEEAEREARRRGKAEEQAVRQRELAEQELEKQRQLAEGTAQQRLAAEQELIRLRAETEQGEQQRQLLEEELARLQREAAAATQKRQELEAELAKVRAEMEVLLASKARAEEESRSTSEKSKQRLEAEAGRFRELAEEAARLRALAEEAKRQRQLAEEDAARQRAEAERVLAEKLAAIGEATRLKTEAEIALKEKEAENERLRRLAEDEAFQRRRLEEQAAQHKADIEERLAQLRKASDSELERQKGLVEDTLRQRRQVEEEILALKASFEKAAAGKAELELELGRIRSNAEDTLRSKEQAELEAARQRQLAAEEERRRREAEERVQKSLAAEEEAARQRKAALEEVERLKAKVEEARRLRERAEQESARQLQLAQEAAQKRLQAEEKAHAFAVQQKEQELQQTLQQEQSVLDQLRGEAEAARRAAEEAEEARVQAEREAAQSRRQVEEAERLKQSAEEQAQARAQAQAAAEKLRKEAEQEAARRAQAEQAALRQKQAADAEMEKHKKFAEQTLRQKAQVEQELTTLRLQLEETDHQKNLLDEELQRLKAEATEAARQRSQVEEELFSVRVQMEELSKLKARIEAENRALILRDKDNTQRFLQEEAEKMKQVAEEAARLSVAAQEAARLRQLAEEDLAQQRALAEKMLKEKMQAVQEATRLKAEAELLQQQKELAQEQARRLQEDKEQMAQQLAEETQGFQRTLEAERQRQLEMSAEAERLKLRVAEMSRAQARAEEDAQRFRKQAEEIGEKLHRTELATQEKVTLVQTLEIQRQQSDHDAERLREAIAELEREKEKLQQEAKLLQLKSEEMQTVQQEQLLQETQALQQSFLSEKDSLLQRERFIEQEKAKLEQLFQDEVAKAQQLREEQQRQQQQMEQERQRLVASMEEARRRQHEAEEGVRRKQEELQQLEQQRRQQEELLAEENQRLREQLQLLEEQHRAALAHSEEVTASQVAATKTLPNGRDALDGPAAEAEPEHSFDGLRRKVSAQRLQEAGILSAEELQRLAQGHTTVDELARREDVRHYLQGRSSIAGLLLKATNEKLSVYAALQRQLLSPGTALILLEAQAASGFLLDPVRNRRLTVNEAVKEGVVGPELHHKLLSAERAVTGYKDPYTGQQISLFQAMQKGLIVREHGIRLLEAQIATGGVIDPVHSHRVPVDVAYRRGYFDEEMNRVLADPSDDTKGFFDPNTHENLTYLQLLERCVEDPETGLCLLPLTDKAAKGGELVYTDSEARDVFEKATVSAPFGKFQGKTVTIWEIINSEYFTAEQRRDLLRQFRTGRITVEKIIKIIITVVEEQEQKGRLCFEGLRSLVPAAELLESRVIDRELYQQLQRGERSVRDVAEVDTVRRALRGANVIAGVWLEEAGQKLSIYNALKKDLLPSDMAVALLEAQAGTGHIIDPATSARLTVDEAVRAGLVGPEFHEKLLSAEKAVTGYRDPYTGQSVSLFQALKKGLIPREQGLRLLDAQLSTGGIVDPSKSHRVPLDVACARGCLDEETSRALSAPRADAKAYSDPSTGEPATYGELQQRCRPDQLTGLSLLPLSEKAARARQEELYSELQARETFEKTPVEVPVGGFKGRTVTVWELISSEYFTAEQRQELLRQFRTGKVTVEKVIKILITIVEEVETLRQERLSFSGLRAPVPASELLASGVLSRAQFEQLKDGKTTVKDLSELGSVRTLLQGSGCLAGIYLEDTKEKVSIYEAMRRGLLRATTAALLLEAQAATGFLVDPVRNQRLYVHEAVKAGVVGPELHEQLLSAEKAVTGYRDPYSGSTISLFQAMQKGLVLRQHGIRLLEAQIATGGIIDPVHSHRVPVDVAYQRGYFSEEMNRVLADPSDDTKGFFDPNTHENLTYRQLLERCVEDPETGLRLLPLKGAEKAEVVETTQVYTEEETRRAFEETQIDIPGGGSHGGSTMSLWEVMQSDLIPEEQRAQLMADFQAGRVTKERMIIIIIEIIEKTEIIRQQGLASYDYVRRRLTAEDLFEARIISLETYNLLREGTRSLREALEAESAWCYLYGTGSVAGVYLPGSRQTLSIYQALKKGLLSAEVARLLLEAQAATGFLLDPVKGERLTVDEAVRKGLVGPELHDRLLSAERAVTGYRDPYTEQTISLFQAMKKELIPTEEALRLLDAQLATGGIVDPRLGFHLPLEVAYQRGYLNKDTHDQLSEPSEVRSYVDPSTDERLSYTQLLRRCRRDDGTGQLLLPLSDARKLTFRGLRKQITMEELVRSQVMDEATALQLREGLTSIEEVTKNLQKFLEGTSCIAGVFVDATKERLSVYQAMKKGIIRPGTAFELLEAQAATGYVIDPIKGLKLTVEEAVRMGIVGPEFKDKLLSAERAVTGYKDPYSGKLISLFQAMKKGLILKDHGIRLLEAQIATGGIIDPEESHRLPVEVAYKRGLFDEEMNEILTDPSDDTKGFFDPNTEENLTYLQLMERCITDPQTGLCLLPLKEKKRERKTSSKSSVRKRRVVIVDPETGKEMSVYEAYRKGLIDHQTYLELSEQECEWEEITISSSDGVVKSMIIDRRSGRQYDIDDAIAKNLIDRSALDQYRAGTLSITEFADMLSGNAGGFRSRSSSVGSSSSYPISPAVSRTQLASWSDPTEETGPVAGILDTETLEKVSITEAMHRNLVDNITGQRLLEAQACTGGIIDPSTGERFPVTDAVNKGLVDKIMVDRINLAQKAFCGFEDPRTKTKMSAAQALKKGWLYYEAGQRFLEVQYLTGGLIEPDTPGRVPLDEALQRGTVDARTAQKLRDVGAYSKYLTCPKTKLKISYKDALDRSMVEEGTGLRLLEAAAQSTKGYYSPYSVSGSGSTAGSRTGSRTGSRAGSRRGSFDATGSGFSMTFSSSSYSSSGYGRRYASGSSASLGGPESAVA

SEQ ID NO: 7232 - protein, 539 aa, Homo sapiens
MDAMASPGKDNYRMKSYKNKALNPQEMRRRREEEGIQLRKQKREEQLFKRRNVYLPRNDESMLESPIQDPDISSTVPIPEEEVVTTDMVQMIFSNNADQQLTATQKFRKLLSKEPNPPIDQVIQKPGVVQRFVKFLERNENCTLQFEAAWALTNIASGTFLHTKVVIETGAVPIFIKLLNSEHEDVQEQAVWALGNIAGDNAECRDFVLNCEILPPLLELLTNSNRLTTTRNAVWALSNLCRGKNPPPNFSKVSPCLNVLSRLLFSSDPDVLADVCWALSYLSDGPNDKIQAVIDSGVCRRLVELLMHNDYKVVSPALRAVGNIVTGDDIQTQVILNCSALPCLLHLLSSPKESIRKEACWTVSNITAGNRAQIQAVIDANIFPVLIEILQKAEFRTRKEAAWAITNATSGGTPEQIRYLVALGCIKPLCDLLTVMDSKIVQVALNGLENILRLGEQESKQNGIGINPYCALIEEAYGLDKIEFLQSHENQEIYQKAFDLIEHYFGVEEDDPSIVPQVDENQQQFIFQQQEAPMDGFQL

SEQ ID NO: 7233 - protein, 1272 aa, Homo sapiens
MPAERKKPASMEEKDSLPNNKEKDCSERRTVSSKERPKDDIKLTAKKEVSKAPEDKKKRLEDDKRKKEDKERKKKDEEKVKAEEESKKKEEEEKKKHQEEERKKQEEQAKRQQEEEAAAQMKEKEESIQLHQEAWERHHLRKELRSKNQNAPDSRPEENFFSRLDSSLKKNTAFVKKLKTITEQQRDSLSHDFNGLNLSKYIAEAVASIVEAKLKISDVNCAVHLCSLFHQRYADFAPSLLQVWKKHFEARKEEKTPNITKLRTDLRFIAELTIVGIFTDKEGLSLIYEQLKNIINADRESHTHVSVVISFCRHCGDDIAGLVPRKVKSAAEKFNLSFPPSEIISPEKQQPFQNLLKEYFTSLTKHLKRDHRELQNTERQNRRILHSKGELSEDRHKQYEEFAMSYQKLLANSQSLADLLDENMPDLPQDKPTPEEHGPGIDIFTPGKPGEYDLEGGIWEDEDARNFYENLIDLKAFVPAILFKDNEKSCQNKESNKDDTKEAKESKENKEVSSPDDLELELENLEINDDTLELEGGDEAEDLTKKLLDEQEQEDEEASTGSHLKLIVDAFLQQLPNCVNRDLIDKAAMDFCMNMNTKANRKKLVRALFIVPRQRLDLLPFYARLVATLHPCMSDVAEDLCSMLRGDFRFHVRKKDQINIETKNKTVRFIGELTKFKMFTKNDTLHCLKMLLSDFSHHHIEMACTLLETCGRFLFRSPESHLRTSVLLEQMMRKKQAMHLDARYVTMVENAYYYCNPPPAEKTVKKKRPPLQEYVRKLLYKDLSKVTTEKVLRQMRKLPWQDQEVKDYVICCMINIWNVKYNSIHCVANLLAGLVLYQEDVGIHVVDGVLEDIRLGMEVNQPKFNQRRISSAKFLGELYNYRMVESAVIFRTLYSFTSFGVNPDGSPSSLDPPEHLFRIRLVCTILDTCGQYFDRGSSKRKLDCFLVYFQRYVWWKKSLEVWTKDHPFPIDIDYMISDTLELLRPKIKLCNSLEESIRQVQDLEREFLIKLGLVNDKDSKDSMTEGENLEEDEEEEEGGAETEEQSGNESEVNEPEEEEGSDNDDDEGEEEEEENTDYLTDSNKENETDEENTEVMIKGGGLKHVPCVEDEDFIQALDKMMLENLQQRSGESVKVHQLDVAIPLHLKSQLRKGPPLGGGEGEAESADTMPFVMLTRKGNKQQFKILNVPMSSQLAANHWNQQQAEQEERMRMKKLTLDINERQEQEDYQEMLQSLAQRPAPANTNRERRPRYQHPKGAPNADLIFKTGGRRR

SEQ ID NO: 7234 - protein, 823 aa, Homo sapiens
MFYVIGGITVSVVAFFFTIKFLFELAARVVSFLQNEDRERRGDRTIYDYVRGNYLDPRSCKVSWDWKDPYEVGHSMAFRVHLFYKNGQPFPAHRPVGLRVHISHVELAVEIPVTQEVLQEPNSNVVKVAFTVRKAGRYEITVKLGGLNVAYSPYYKIFQPGMVVPSKTKIVCHFSTLVLTCGQPHTLQIVPRDEYDNPTNNSMSLRDEHNYTLSIHELGPQEEESTGVSFEKSVTSNRQTFQVFLRLTLHSRGCFHACISYQNQPINNGEFDIIVLSEDEKNIVERNVSTSGVSIYFEAYLYNATNCSSTPWHLPPMHMTSSQRRPSTAVDEEDEDSPSECHTPEKVKKPKKVYCYVSPKQFSVKEFYLKIIPWRLYTFRVCPGTKFSYLGPDPVHKLLTLVVDDGIQPPVELSCKERNILAATFIRSLHKNIGGSETFQDKVNFFQRELRQVHMKRPHSKVTLKVSRHALLESSLKATRNFSISDWSKNFEVVFQDEEALDWGGPRREWFELICKALFDTTNQLFTRFSDNNQALVHPNPNRPAHLRLKMYEFAGRLVGKCLYESSLGGAYKQLVRARFTRSFLAQIIGLRMHYKYFETDDPEFYKSKVCFILNNDMSEMELVFAEEKYNKSGQLDKVVELMTGGAQTPVTNANKIFYLNLLAQYRLASQVKEEVEHFLKGLNELVPENLLAIFDENELELLMCGTGDISVSDFKAHAVVVGGSWHFREKVMRWFWTVVSSLTQEELARLLQFTTGSSQLPPGGFAALCPSFQIIAAPTHSTLPTAHTCFNQLCLPTYDSYEEVHRMLQLAISEGCEGFGML

SEQ ID NO: 7235 - protein, 661 aa, Homo sapiens
MEMTEMTGVSLKRGALVVEDNDSGVPVEETKKQKLSECSLTKGQDGLQNDFLSISEDVPRPPDTVSTGKGGKNSEAQLEDEEEEEEDGLSEECEEEESESFADMMKHGLTEADVGITKFVSSHQGFSGILKERYSDFVVHEIGKDGRISHLNDLSIPVDEEDPSEDIFTVLTAEEKQRLEELQLFKNKETSVAIEVIEDTKEKRTIIHQAIKSLFPGLETKTEDREGKKYIVAYHAAGKKALANPRKHSWPKSRGSYCHFVLYKENKDTMDAINVLSKYLRVKPNIFSYMGTKDKRAITVQEIAVLKITAQRLAHLNKCLMNFKLGNFSYQKNPLKLGELQGNHFTVVLRNITGTDDQVQQAMNSLKEIGFINYYGMQRFGTTAVPTYQVGRAILQNSWTEVMDLILKPRSGAEKGYLVKCREEWAKTKDPTAALRKLPVKRCVEGQLLRGLSKYGMKNIVSAFGIIPRNNRLMYIHSYQSYVWNNMVSKRIEDYGLKPVPGDLVLKGATATYIEEDDVNNYSIHDVVMPLPGFDVIYPKHKIQEAYREMLTADNLDIDNMRHKIRDYSLSGAYRKIIIRPQNVSWEVVAYDDPKIPLFNTDVDNLEGKTPPVFASEGKYRALKMDFSLPPSTYATMAIREVLKMDTSIKNQTQLNTTWLR

SEQ ID NO: 7236 - protein, 773 aa, Homo sapiens
MKAAVLDLGSLLAKLFETSTAPPAGPSSRPSGGAAAAGSGGSRAGTPLGTAPTLLRALAPDSPSASRRSPAPLLSSPYSRGSAASRAAGAVGTLLSWPSSPRAGKAPPQPPTPSGGGCSPARLVVPARPPSGPGGVWAALPRNPLQPGPGERELGACVAPGAGPRTLFLTLPDIGEEGASDGDSGDGEARGLSEGRRRHGFTVRSKDSLPTHFTRNVQKAIDKYTCKSLSSFSSSGSHTPTGAHTSWSGSATQSSTTGSSTERGSVYSWRDDEFDEASSQSVQRLLWEVEEMLFEGKVNPQTQSLLAECGEWTRRSLHLRVLGRQLILPTDKGVQHFQGSTPASAVHRPPLSACGHSSNIRELCISGSQIVPAALSASALPGPDDTGVADLTARSSLEEEVYHVDGKIEEYFAFDRKEDDDECLEQKPAQPGRKWRKLGLPPVSPRDCVKDAVAAEVFDHVWTNMVELLEELIRKHWETTLTEGKKQRETLKVAGNRFPHVLVPHAHADGASGPPSGHAEAHGISLASRLNPPQIHHFSSSFYSDMNGVMTIQAKPLQRRPAYFADRTQNEKEDKASGGGAGALSSAPHRLGRASDTHGLSPSAKKTPVPWRLPSLASDSQRLKTPNIYSDEVLRGTKLPTGVDHMASPLVQTSRSRFPPLVTETRGQNTAVPGCRLVSYRGRHLQNRVLSAMPDGTERSRLRERTATLERLSRPSTTHTFRQSDTPRKSSLTQMEFAAHTWTGQSILTGSQYVPKSFQRTTLTFKRRFQVTS

SEQ ID NO: 7237 - protein, 418 aa, Homo sapiens
MTEETHPDDDSYIVRVKAVVMTRDDSSGGWFPQEGGGISRVGVCKVMHPEGNGRSGFLIHGERQKDKLVVLECYVRKDLVYTKANPTFHHWKVDNRKFGLTFQSPADARAFDRGVRKAIEDLIEGSTTSSSTIHNEAELGDDDVFTTATDSSSNSSQKREQPTRTISSPTSCEHRRIYTLGHLHDSYPTDHYHLDQPMPRPYRQVSFPDDDEEIVRINPREKIWMTGYEDYRHAPVRGKYPDPSEDADSSYVRFAKGEVPKHDYNYPYVDSSDFGLGEDPKGRGGSVIKTQPSRGKSRRRKEDGERSRCVYCRDMFNHEENRRGHCQDAPDSVRTCIRRVSCMWCADSMLYHCMSDPEGDYTDPCSCDTSDEKFCLRWMALIALSFLAPCMCCYLPLRACYHCGVMCRCCGGKHKAAA

SEQ ID NO: 7238 - protein, 595 aa, Homo sapiens
MTSPLCRAASANALPPQDQASTPSSRVKGREASGKPSHLRGKGTAQAWTPGRSKGGSFHRGAGKPSVHSQVAELHKKIQLLEGDRKAFFESSQWNIKKNQETISQLRKETKALELKLLDLLKGDEKVVQAVIREWKWEKPYLKNRTGQALEHLDHRLREKVKQQNALRHQVVLRQRRLEELQLQHSLRLLEMAEAQNRHTEVAKTMRNLENRLEKAQMKAQEAEHITSVYLQLKAYLMDESLNLENRLDSMEAEVVRTKHELEALHVVNQEALNARDIAKNQLQYLEETLVRERKKRERYISECKKRAEEKKLENERMERKTHREHLLLQSDDTIQDSLHAKEEELRQRWSMYQMEVIFGKVKDATGTDETHSLVRRFLAQGDTFAQLETLKSENEQTLVRLKQEKQQLQRELEDLKYSGEATLVSQQKLQAEAQERLKKEERRHAEAKDQLERALRAMQVAKDSLEHLASKLIHITVEDGRFAGKELDPQADNYVPNLLGLVEEKLLKLQAQLQGHDVQEMLCHIANREFLASLEGRLPEYNTRIALPLATSKDKFFDEESEEEDNEVVTRASLKIRSQKLIESHKKHRRSRRS

SEQ ID NO: 7239 - protein, 732 aa, Homo sapiens
MTEGTCLRRRGGPYKTEPATDLGRWRLNCERGRQTWTYLQDERAGREQTGLEAYALGLDTKNYFKDLPKAHTAFEGALNGMTFYVGLQAEDGHWTGDYGGPLFLLPGLLITCHVARIPLPAGYREEIVRYLRSVQLPDGGWGLHIEDKSTVFGTALNYVSLRILGVGPDDPDLVRARNILHKKGGAVAIPSWGKFWLAVLNVYSWEGLNTLFPEMWLFPDWAPAHPSTLWCHCRQVYLPMSYCYAVRLSAAEDPLVQSLRQELYVEDFASIDWLAQRNNVAPDELYTPHSWLLRVVYALLNLYEHHHSAHLRQRAVQKLYEHIVADDRFTKSISIGPISKTINMLVRWYVDGPASTAFQEHVSRIPDYLWMGLDGMKMQGTNGSQIWDTAFAIQALLEAGGHHRPEFSSCLQKAHEFLRLSQVPDNPPDYQKYYRQMRKGGFSFSTLDCGWIVSDCTAEALKAVLLLQEKCPHVTEHIPRERLCDAVAVLLNMRNPDGGFATYETKRGGHLLELLNPSEVFGDIMIDYTYVECTSAVMQALKYFHKRFPEHRAAEIRETLTQGLEFCRRQQRADGSWEGSWGVCFTYGTWFGLEAFACMGQTYRDGTACAEVSRACDFLLSRQMADGGWGEDFESCEERRYLQSAQSQIHNTCWAMMGLMAVRHPDIEAQERGVRCLLEKQLPNGDWPQENIAGVFNKSCAISYTSYRNIFPIWALGRFSQLYPERALAGHP

SEQ ID NO: 7240 - protein, 493 aa, Homo sapiens
MSVDMNSQGSDSNEEDYDPNCEEEEEEEEDDPGDIEDYYVGVASDVEQQGADAFDPEEYQFTCLTYKESEGALNEHMTSLASVLKVSHSVAKLILVNFHWQVSEILDRYKSNSAQLLVEARVQPNPSKHVPTSHPPHHCAVCMQFVRKENLLSLACQHQFCRSCWEQHCSVLVKDGVGVGVSCMAQDCPLRTPEDFVFPLLPNEELREKYRRYLFRDYVESHYQLQLCPGADCPMVIRVQEPRARRVQCNRCNEVFCFKCRQMYHAPTDCATIRKWLTKCADDSETANYISAHTKDCPKCNICIEKNGGCNHMQCSKCKHDFCWMCLGDWKTHGSEYYECSRYKENPDIVNQSQQAQAREALKKYLFYFERWENHNKSLQLEAQTYQRIHEKIQERVMNNLGTWIDWQYLQNAAKLLAKCRYTLQYTYPYAYYMESGPRKKLFEYQQAQLEAEIENLSWKVERADSYDRGDLENQMHIAEQRRRTLLKDFHDT

SEQ ID NO: 7241 - protein, 1244 aa, Homo sapiens
MLIKEYHILLPMSLDEYQVAQLYMIQKKSREESSGEGSGVEILANRPYTDGPGGSGQYTHKVYHVGSHIPGWFRALLPKAALQVEEESWNAYPYTRTRYTCPFVEKFSIEIETYYLPDGGQQPNVFNLSGAERRQRILDTIDIVRDAVAPGEYKAEEDPRLYHSVKTGRGPLSDDWARTAAQTGPLMCAYKLCKVEFRYWGMQAKIEQFIHDVGLRRVMLRAHRQAWCWQDEWTELSMADIRALEEETARMLAQRMAKCNTGSEGSEAQPPGKPSTEARSAASNTGTPDGPEAPPGPDASPDASFGKQWSSSSRSSYSSQHGGAVSPQSLSEWRMQNIARDSENSSEEEFFDAHEGFSDSEEVFPKEMTKWNSNDFIDAFASPVEAEGTPEPGAEAAKGIEDGAQAPRDSEGLDGAGELGAEACAVHALFLILHSGNILDSGPGDANSKQADVQTLSSAFEAVTRIHFPEALGHVALRLVPCPPICAAAYALVSNLSPYSHDGDSLSRSQDHIPLAALPLLATSSSRYQGAVATVIARTNQAYSAFLRSPEGAGFCGQVALIGDGVGGILGFDALCHSANAGTGSRGSSRRGSMNNELLSPEFGPVRDPLADGVEGLGRGSPEPSALPPQRIPSDMASPEPEGSQNSLQAAPATTSSWEPRRASTAFCPPAASSEAPDGPSSTARLDFKVSGFFLFGSPLGLVLALRKTVMPALEAAQMRPACEQIYNLFHAADPCASRLEPLLAPKFQAIAPLTVPRYQKFPLGDGSSLLLADTLQTHSSLFLEELEMLVPSTPTSTSGAFWKGSELATDPPAQPAAPSTTSEVVKILERWWGTKRIDYSLYCPEALTAFPTVTLPHLFHASYWESADVVAFILRQVIEKERPQLAECEEPSIYSPAFPREKWQRKRTQVKIRNVTSNHRASDTVVCEGRPQVLSGRFMYGPLDVVTLTGEKVDVYIMTQPLSGKWIHFGTEVTNSSGRLTFPVPPERALGIGVYPVRMVVRGDHTYAECCLTVVARGTEAVVFSIDGSFTASVSIMGSDPKVRAGAVDVVRHWQDSGYLIVYVTGRPDMQKHRVVAWLSQHNFPHGVVSFCDGLTHDPLRQKAMFLQSLVQEVELNIVAGYGSPKDVAVYAALGLSPSQTYIVGRAVRKLQAQCQFLSDGYVAHLGQLEAGSHSHASSGPPRAALGKSSYGVAAPVDFLRKQSQLLRSRGPSQAEREGPGTPPTTLARGKARSISLKLDSEE

SEQ ID NO: 7242 - protein, 700 aa, Homo sapiens
MASTVEGGDTALLPEFPRGPLDAYRARASFSWKELALFTEGEGMLRFKKTIFSALENDPLFARSPGADLSLEKYRELNFLRCKRIFEYDFLSVEDMFKSPLKVPALIQCLGMYDSSLAAKYLLHSLVFGSAVYSSGSERHLTYIQKIFRMEIFGCFALTELSHGSNTKAIRTTAHYDPATEEFIIHSPDFEAAKFWVGNMGKTATHAVVFAKLCVPGDQCHGLHPFIVQIRDPKTLLPMPGVMVGDIGKKLGQNGLDNGFAMFHKVRVPRQSLLNRMGDVTPEGTYVSPFKDVRQRFGASLGSLSSGRVSIVSLAILNLKLAVAIALRFSATRRQFGPTEEEEIPVLEYPMQQWRLLPYLAAVYALDHFSKSLFLDLVELQRGLASGDRSARQAELGREIHALASASKPLASWTTQQGIQECREACGGHGYLAMNRLGVLRDDNDPNCTYEGDNNILLQQTSNYLLGLLAHQVHDGACFRSPLKSVDFLDAYPGILDQKFEVSSVADCLDSAVALAAYKWLVCYLLRETYQKLNQEKRSGSSDFEARNKCQVSHGRPLALAFVELTVVQRFHEHVHQPSVPPSLRAVLGRLSALYALWSLSRHAALLYRGGYFSGEQAGEVLESAVLALCSQLKDDAVALVDVIAPPDFVLDSPIGRADGELYKNLWGAVLQESKVLERASWWPEFSVNKPVIGSLKSKL

SEQ ID NO: 7243 - protein, 682 aa, Homo sapiens
MASPDRSKRKILKAKKTMPLSCRKQVEMLNKSRNVEALKTAIGSNVPSGNQSFSPSVITRTTEITKCSPSENGASSLDSNKNSISEKSKVFSQNCIKPVEEIVHSETKLEQVVCSYQKPSRTTESPSRVFTEEAKDSLNTSENDSEHQTNVTRSLFEHEGACSLKSSCCPPSVLSGVVQMPESTVTSTVGDKKTDQMVFHLETNSNSESHDKRQSDNILCSEDSGFVPVEKTPNLVNSVTSNNCADDILKTDECSRTSISNCESADSTWQSSLDTNNNSHYQKKRMFSENEENVKRMKTSEQINENICVSLERQTAFLEQVRHLIQQEIYSINYELFDKKLKELNQRIGKTECRNKHEGIADKLLAKIAKLQRRIKTVLLFQRNCLKPNMLSSNGASKVANSEAMILDKNLESVNSPIEKSSVNYEPSNPSEKGSKKINLSSDQNKSVSESNNDDVMLISVESPNLTTPITSNPTDTRKITSGNSSNSPNAEVMAVQKKLDSIIDLTKEGLSNCNTESPVSPLESHSKAASNSKETTPLAQNAVQVPESFEHLPPLPEPPAPLPELVDKTRDTLPPQKPELKVKRVFRPNGIALTWNITKINPKCAPVESYHLFLCHENSNNKLIWKKIGEIKALPLPMACTLSQFLASNRYYFTVQSKDIFGRYGPFCDIKSIPGFSENLT

SEQ ID NO: 7244 - protein, 587 aa, Homo sapiens
MVSPRMSGLLSQTVILALIFLPQTRPAGVFELQIHSFGPGPGPGAPRSPCSARLPCRLFFRVCLKPGLSEEAAESPCALGAALSARGPVYTEQPGAPAPDLPLPDGLLQVPFRDAWPGTFSFIIETWREELGDQIGGPAWSLLARVAGRRRLAAGGPWARDIQRAGAWELRFSYRARCEPPAVGTACTRLCRPRSAPSRCGPGLRPCAPLEDECEAPLVCRAGCSPEHGFCEQPGECRCLEGWTGPLCTVPVSTSSCLSPRGPSSATTGCLVPGPGPCDGNPCANGGSCSETPRSFECTCPRGFYGLRCEVSGVTCADGPCFNGGLCVGGADPDSAYICHCPPGFQGSNCEKRVDRCSLQPCRNGGLCLDLGHALRCRCRAGFAGPRCEHDLDDCAGRACANGGTCVEGGGAHRCSCALGFGGRDCRERADPCAARPCAHGGRCYAHFSGLVCACAPGYMGARCEFPVHPDGASALPAAPPGLRPGDPQRYLLPPALGLLVAAGVAGAALLLVHVRRRGHSQDAGSRLLAGTPEPSVHALPDALNNLRTQEGSGDGPSSSVDWNRPEDVDPQGIYVISAPSIYAREA

SEQ ID NO: 7245 - protein, 1912 aa, Homo sapiens
MVHVARLLLLLLTFFLRTDAETPPRFTRTPVDQTGVSGGVASFICQATGDPRPKIVWNKKGKKVSNQRFEVIEFDDGSGSVLRIQPLRTPRDEAIYECVASNNVGEISVSTRLTVLREDQIPRGFPTIDMGPQLKVVERTRTATMLCAASGNPDPEITWFKDFLPVDTSNNNGRIKQLRSESIGGTPIRGALQIEQSEESDQGKYECVATNSAGTRYSAPANLYVRELREVRRVPPRFSIPPTNHEIMPGGSVNITCVAVGSPMPYVKWMLGAEDLTPEDDMPIGRNVLELNDVRQSANYTCVAMSTLGVIEAIAQITVKALPKPPGTPVVTESTATSITLTWDSGNPEPVSYYIIQHKPKNSEELYKEIDGVATTRYSVAGLSPYSDYEFRVVAVNNIGRGPPSEPVLTQTSEQAPSSAPRDVQARMLSSTTILVQWKEPEEPNGQIQGYRVYYTMDPTQHVNNWMKHNVADSQITTIGNLVPQKTYSVKVLAFTSIGDGPLSSDIQVITQTGVPGQPLNFKAEPESETSILLSWTPPRSDTIANYELVYKDGEHGEEQRITIEPGTSYRLQGLKPNSLYYFRLAARSPQGLGASTAEISARTMQSKPSAPPQDISCTSPSSTSILVSWQPPPVEKQNGIITEYSIKYTAVDGEDDKPHEILGIPSDTTKYLLEQLEKWTEYRITVTAHTDVGPGPESLSVLIRTNEDVPSGPPRKVEVEAVNSTSVKVSWRSPVPNKQHGQIRGYQVHYVRMENGEPKGQPMLKDVMLADAQWEFDDTTEHDMIISGLQPETSYSLTVTAYTTKGDGARSKPKLVSTTGAVPGKPRLVINHTQMNTALIQWHPPVDTFGPLQGYRLKFGRKDMEPLTTLEFSEKEDHFTATDIHKGASYVFRLSARNKVGFGEEMVKEISIPEEVPTGFPQNLHSEGTTSTSVQLSWQPPVLAERNGIITKYTLLYRDINIPLLPMEQLIVPADTTMTLTGLKPDTTYDVKVRAHTSKGPGPYSPSVQFRTLPVDQVFAKNFHVKAVMKTSVLLSWEIPENYNSAMPFKILYDDGKMVEEVDGRATQKLIVNLKPEKSYSFVLTNRGNSAGGLQHRVTAKTAPDVLRTKPAFIGKTNLDGMITVQLPEVPANENIKGYYIIIVPLKKSRGKFIKPWESPDEMELDELLKEISRKRRSIRYGREVELKPYIAAHFDVLPTEFTLGDDKHYGGFTNKQLQSGQEYVFFVLAVMEHAESKMYATSPYSDPVVSMDLDPQPITDEEEGLIWVVGPVLAVVFIICIVIAILLYKRKRAESDSRKSSIPNNKEIPSHHPTDPVELRRLNFQTPGMASHPPIPILELADHIERLKANDNLKFSQEYESIDPGQQFTWEHSNLEVNKPKNRYANVIAYDHSRVLLSAIEGIPGSDYVNANYIDGYRKQNAYIATQGSLPETFGDFWRMIWEQRSATVVMMTKLEERSRVKCDQYWPSRGTETHGLVQVTLLDTVELATYCVRTFALYKNGSSEKREVRQFQFTAWPDHGVPEHPTPFLAFLRRVKTCNPPDAGPMVVHCSAGVGRTGCFIVIDAMLERIKHEKTVDIYGHVTLMRAQRNYMVQTEDQYIFIHDALLEAVTCGNTEVPARNLYAYIQKLTQIETGENVTGMELEFKRLASSKAHTSRFISANLPCNKFKNRLVNIMPYESTRVCLQPIRGVEGSDYINASFIDGYRQQKAYIATQGPLAETTEDFWRMLWEHNSTIVVMLTKLREMGREKCHQYWPAERSARYQYFVVDPMAEYNMPQYILREFKVTDARDGQSRTVRQFQFTDWPEQGVPKSGEGFIDFIGQVHKTKEQFGQDGPISVHCSAGVGRTGVFITLSIVLERMRYEGVVDIFQTVKMLRTQRPAMVQTEDQYQFSYRAALEYLGSFDHYAT

SEQ ID NO: 7246 - protein, 293 aa, Homo sapiens
MTEDSQRNFRSVYYEKVGFRGVEEKKSLEILLKDDRLDTEKLCTFSQRFPLPSMYRALVWKVLLGILPPHHESHAKVMMYRKEQYLDVLHALKVVRFVSDATPQAEVYLRMYQLESGKLPRSPSFPLEPDDEVFLAIAKAMEEMVEDSVDCYWITRRFVNQLNTKYRDSLPQLPKAFEQYLNLEDGRLLTHLRMCSAAPKLPYDLWFKRCFAGCLPESSLQRVWDKVVSGSCKILVFVAVEILLTFKIKVMALNSAEKITKFLENIPQDSSDAIVSKAIDLWHKHCGTPVHSS

SEQ ID NO: 7247 - protein, 1685 aa, Homo sapiens
MSLPFYQRCHQHYDLSYRNKDVRSTVSHYQREKKRSAVYTQGSTAYSSRSSAAHRRESEAFRRASASSSQQQASQHALSSEVSRKAASAYDYGSSHGLTDSSLLLDDYSSKLSPKPKRAKHSLLSGEEKENLPSDYMVPIFSGRQKHVSGITDTEEERIKEAAAYIAQRNLLASEEGITTSKQSTASKQTTASKQSTASKQSTASKQSTASRQSTASRQSVVSKQATSALQQEETSEKKSRKVVIREKAERLSLRKTLEETETYHAKLNEDHLLHAPEFIIKPRSHTVWEKENVKLHCSIAGWPEPRVTWYKNQVPINVHANPGKYIIESRYGMHTLEINGCDFEDTAQYRASAMNVKGELSAYASVVVKRYKGEFDETRFHAGASTMPLSFGVTPYGYASRFEIHFDDKFDVSFGREGETMSLGCRVVITPEIKHFQPEIQWYRNGVPLSPSKWVQTLWSGERATLTFSHLNKEDEGLYTIRVRMGEYYEQYSAYVFVRDADAEIEGAPAAPLDVKCLEANKDYIIISWKQPAVDGGSPILGYFIDKCEVGTDSWSQCNDTPVKFARFPVTGLIEGRSYIFRVRAVNKMGIGFPSRVSEPVAALDPAEKARLKSRPSAPWTGQIIVTEEEPSEGIVPGPPTDLSVTEATRSYVVLSWKPPGQRGHEGIMYFVEKCEAGTENWQRVNTELPVKSPRFALFDLAEGKSYCFRVRCSNSAGVGEPSEATEVTVVGDKLDIPKAPGKIIPSRNTDTSVVVSWEESKDAKELVGYYIEASVAGSGKWEPCNNNPVKGSRFTCHGLVTGQSYIFRVRAVNAAGLSEYSQDSEAIEVKAAIGGGVSPDVCPALSDEPGGLTASRGRVHEASPPTFQKDALLGSKPNKPSLPSSSQNLGQTEVSKVSETVQEELTPPPQKAAPQGKSKSDPLKKKTDRAPPSPPCDITCLESFRDSMVLGWKQPDKIGGAEITGYYVNYREVIDGVPGKWREANVKAVSEEAYKISNLKENMVYQFQVAAMNMAGLGAPSAVSECFKCEEWTIAVPGPPHSLKCSEVRKDSLVLQWKPPVHSGRTPVTGYFVDLKEAKAKEDQWRGLNEAAIKNVYLKVRGLKEGVSYVFRVRAINQAGVGKPSDLAGPVVAETRPGTKEVVVNVDDDGVISLNFECDKMTPKSEFSWSKDYVSTEDSPRLEVESKGNKTKMTFKDLGMDDLGIYSCDVTDTDGIASSYLIDEEELKRLLALSHEHKFPTVPVKSELAVEILEKGQVRFWMQAEKLSGNAKVNYIFNEKEIFEGPKYKMHIDRNTGIIEMFMEKLQDEDEGTYTFQLQDGKATNHSTVVLVGDVFKKLQKEAEFQRQEWIRKQGPHFVEYLSWEVTGECNVLLKCKVANIKKETHIVWYKDEREISVDEKHDFKDGICTLLITEFSKKDAGIYEVILKDDRGKDKSRLKLVDEAFKELMMEVCKKIALSATDLKIQSTAEGIQLYSFVTYYVEDLKVNWSHNGSAIRYSDRVKTGVTGEQIWLQINEPTPNDKGKYVMELFDGKTGHQKTVDLSGQAYDEAYAEFQRLKQAAIAEKNRARVLGGLPDVVTIQEGKALNLTCNVWGDPPPEVSWLKNEKALASDDHCNLKFEAGRTAYFTINGVSTADSGKYGLVVKNKYGSETSDFTVSVFIPEEEARMAALESLKGGKKAK

SEQ ID NO: 7248 - protein, 862 aa, Homo sapiens
MRMCTPIRGLLMALAVMFGTAMAFAPIPRITWEHREVHLVQFHEPDIYNYSALLLSEDKDTLYIGAREAVFAVNALNISEKQHEVYWKVSEDKKAKCAEKGKSKQTECLNYIRVLQPLSATSLYVCGTNAFQPACDHLNLTSFKFLGKNEDGKGRCPFDPAHSYTSVMVDGELYSGTSYNFLGSEPIISRNSSHSPLRTEYAIPWLNEPSFVFADVIRKSPDSPDGEDDRVYFFFTEVSVEYEFVFRVLIPRIARVCKGDQGGLRTLQKKWTSFLKARLICSRPDSGLVFNVLRDVFVLRSPGLKVPVFYALFTPQLNNVGLSAVCAYNLSTAEEVFSHGKYMQSTTVEQSHTKWVRYNGPVPKPRPGACIDSEARAANYTSSLNLPDKTLQFVKDHPLMDDSVTPIDNRPRLIKKDVNYTQIVVDRTQALDGTVYDVMFVSTDRGALHKAISLEHAVHIIEETQLFQDFEPVQTLLLSSKKGNRFVYAGSNSGVVQAPLAFCGKHGTCEDCVLARDPYCAWSPPTATCVALHQTESPSRGLIQEMSGDASVCPDKSKGSYRQHFFKHGGTAELKCSQKSNLARVFWKFQNGVLKAESPKYGLMGRKNLLIFNLSEGDSGVYQCLSEERVKNKTVFQVVAKHVLEVKVVPKPVVAPTLSVVQTEGSRIATKVLVASTQGSSPPTPAVQATSSGAITLPPKPAPTGTSCEPKIVINTVPQLHSEKTMYLKSSDNRLLMSLFLFFFVLFLCLFFYNCYKGYLPRQCLKFRSALLIGKKKPKSDFCDREQSLKETLVEPGSFSQQNGEHPKPALDTGYETEQDTITSKVPTDREDSQRIDDLSARDKPFDVKCELKFADSDADGD

SEQ ID NO: 7249 - protein, 461 aa, Homo sapiens
MTPNSMTENGLTAWDKPKHCPDREHDWKLVGMSEACLHRKSHSERRSTLKNEQSSPHLIQTTWTSSIFHLDHDDVNDQSVSSAQTFQTEEKKCKGYIPSYLDKDELCVVCGDKATGYHYRCITCEGCKGFFRRTIQKNLHPSYSCKYEGKCVIDKVTRNQCQECRFKKCIYVGMATDLVLDDSKRLAKRKLIEENREKRRREELQKSIGHKPEPTDEEWELIKTVTEAHVATNAQGSHWKQKRKFLPEDIGQAPIVNAPEGGKVDLEAFSHFTKIITPAITRVVDFAKKLPMFCELPCEDQIILLKGCCMEIMSLRAAVRYDPESETLTLNGEMAVTRGQLKNGGLGVVSDAIFDLGMSLSSFNLDDTEVALLQAVLLMSSDRPGLACVERIEKYQDSFLLAFEHYINYRKHHVTHFWPKLLMKVTDLRMIGACHASRFLHMKVECPTELFPPLFLEVFED

SEQ ID NO: 7250 - protein, 871 aa, Homo sapiens
MDGESEVDFSSNSITPLWRRRSIPQPHQVLGRSKPRPQSYQSPNGLLITDFPVEDGGTLLAAQIPAQVPTASDSRTVHRSPLLLGAQRRAVANGGTASPEYRAASPRLRRPKSPKLPKAVPGGSPKSPANGAVTLPAPPPPPVLRPPRTPNAPAPCTPEEDLTGLTASPVPSPTANGLAANNDSPGSGSQSGRKAKDPERGLFPGPQKSSSEQKLPLQRLPSQENELLENPSVVLSTNSPAALKVGKQQIIPKSLASEIKISKSNNQNVEPHKRLLKVRSMVEGLGGPLGHAGEESEVDNDVDSPGSLRRGLRSTSYRRAVVSGFDFDSPTSSKKKNRMSQPVLKVVMEDKEKFSSLGRIKKKMLKGQGTFDGEENAVLYQNYKEKALDIDSDEESEPKEQKSDEKIVIHHKPLRSTWSQLSAVKRKGLSQTVSQEERKRQEAIFEVISSEHSYLLSLEILIRMFKNSKELSDTMTKTERHHLFSNITDVCEASKKFFIELEARHQNNIFIDDISDIVEKHTASTFDPYVKYCTNEVYQQRTLQKLLATNPSFKEVLSRIESHEDCRNLPMISFLILPMQRVTRLPLLMDTICQKTPKDSPKYEVCKRALKEVSKLVRLCNEGARKMERTEMMYTINSQLEFKIKPFPLVSSSRWLVKRGELTAYVEDTVLFSRRTSKQQVYFFLFNDVLIITKKKSEESYNVNDYSLRDQLLVESCDNEELNSSPGKNSSTMLYSRQSSASHLFTLTVLSNHANEKVEMLLGAETQSERARWITALGHSSGKPPADRTSLTQVEIVRSFTAKQPDELSLQVADVVLIYQRVSDGWYEGERLRDGERGWFPMECAKEITCQATIDKNVERMGRLLGLETNV

SEQ ID NO: 7251 - protein, 1958 aa, Homo sapiens
MADRTAPRCQLRLEWVYGYRGHQCRNNLYYTAGKEVVYFVAGVGVVYNTREHSQKFFLGHNDDIISLALHPDKTLVATGQVGKEPYICIWDSYNVQTVSLLKDVHTHGVACLAFDSDGQRLASVGLDAKNTVCIWDWRKGKLLASATGHSDRIFDISWDPYQPNRVVSCGVKHIKFWTLCGNALTAKRGIFGKTGDLQTILCLACAKEDITYSGALNGDIYVWKGLNLVRTIQGAHSAGIFSMYACEEGFATGGRDGCIRLWDTDFKPITKIDLRETEQGYKGLSIRSVCWKADRLLAGTQDSEIFEVIVRERDKPMLILQGHCEGELWALALHPKKPLAVTGSDDRSVRLWSLADHALIARCNMEEAVRSVAFSPDGSQLALGMKDGSFIVLRVRDMTEVVHIKDRKEVIHEMKFSPDGSYLAVGSNDGPVDVYAVAQRYKKIGECSKSLSFITHIDWSLDSKYLQTNDGAGERLFYRMPSGKPLTSKEEIKGIPWASWTCVKGPEVSGIWPKYTEVTDINSVDANYNSSVLVSGDDFGLVKLFKFPCLKRGAKFRKYVGHSAHVTNVRWSHDFQWVLSTGGADHSVFQWRFIPEGVSNGMLETAPQEGGADSYSEESDSDLSDVPELDSDIEQEAQINYDRQVYKEDLPQLKQQSKEKNHAVPFLKREKAPEDSLKLQFIHGYRGYDCRNNLFYTQAGEVVYHIAAVAVVYNRQQHSQRLYLGHDDDILSLTIHPVKDYVATGQVGRDAAIHVWDTQTLKCLSLLKGQHQRGVCALDFSADGKCLVSVGLDDFHSIVFWDWKKGEKIATTRGHKDKIFVVKCNPHHVDKLVTVGIKHIKFWQQAGGGFTSKRGTFGSVGKLETMMCVSYGRMEDLVFSGAATGDIFIWKDILLLKTVKAHDGPVFAMYALDKGFVTGGKDGIVELWDDMFERCLKTYAIKRSALSTSSKGLLLEDNPSIRAITLGHGHILVGTKNGEILEIDKSGPMTLLVQGHMEGEVWGLAAHPLLPICATVSDDKTLRIWELSAQHRMLAVRKLKKGGRCCAFSPDGKALAVGLNDGSFLVVNADTVEDMVSFHHRKEMISDIKFSKDTGKYLAVASHDNFVDIYNVLTSKRVGICKGASSYITHIDWDSRGKLLQVNSGAREQLFFEAPRGKRHIIRPSEIEKIEWDTWTCVLGPTCEGIWPAHSDITDVNAASLTKDCSLLATGDDFGFVKLFSYPVKGQHARFKKYVGHSAHVTNVRWLHNDSVLLTVGGADTALMIWTREFVGTQESKLVDSEESDTDVEEDGGYDSDVAREKAIDYTTKIYAVSIREMEGTKPHQQLKEVSVEERPPVSRAAPQPEKLQKNNITKKKKLVEELALDHVFGYRGFDCRNNLHYLNDGADIIFHTAAAGIVQNLSTGSQSFYLEHTDDILCLTVNQHPKYRNVVATSQIGTTPSIHIWDAMTKHTLSMLRCFHSKGVNYINFSATGKLLVSVGVDPEHTITVWRWQEGAKVASRGGHLERIFVVEFRPDSDTQFVSVGVKHMKFWTLAGSALLYKKGVIGSLGAAKMQTMLSVAFGANNLTFTGAINGDVYVWKDHFLIRLVAKAHTGPVFTMYTTLRDGLIVTGGKERPTKEGGAVKLWDQEMKRCRAFQLETGQLVECVRSVCRGKGKILVGTKDGEIIEVGEKNAASNILIDGHMEGEIWGLATHPSKDLFISASNDGTARIWDLADKKLLNKVSLGHAARCAAYSPDGEMVAIGMKNGEFVILLVNSLKVWGKKRDRKSAIQDIRISPDNRFLAVGSSEHTVDFYDLTQGTNLNRIGYCKDIPSFVIQMDFSADGKYIQVSTGAYKRQVHEVPLGKQVTEAVVIEKITWASWTSVLGDEVIGIWPRNADKADVNCACVTHAGLNIVTGDDFGLVKLFDFPCTEKFAKHKRYFGHSAHVTNIRFSYDDKYVVSTGGDDCSVFVWRCL

SEQ ID NO: 7252 - protein, 361 aa, Homo sapiens
MTQQPLRGVTSLRFNQDQSCFCCAMETGVRIYNVEPLMEKGHLDHEQVGSMGLVEMLHRSNLLALVGGGSSPKFSEISAVLIWDDAREGKDSKEKLVLEFTFTKPVLSVRMRHDKIVIVLKNRIYVYSFPDNPRKLFEFDTRDNPKGLCDLCPSLEKQLLVFPGHKCGSLQLVDLASTKPGTSSAPFTINAHQSDIACVSLNQPGTVVASASQKGTLIRLFDTQSKEKLVELRRGTDPATLYCINFSHDSSFLCASSDKGTVHIFALKDTRLNRRSALARVGKVGPMIGQYVDSQWSLASFTVPAESACICAFGRNTSKNVNSVIAICVDGTFHKYVFTPDGNCNREAFDVYLDICDDDDF

SEQ ID NO: 7253 - protein, 164 aa, Homo sapiens
MDGSGEQPRGGGPTSSEQIMKTGALLLQGFIQDRAGRMGGEAPELALDPVPQDASTKKLSECLKRIGDELDSNMELQRMIAAVDTDSPREVFFRVAADMFSDGNFNWGRVVALFYFASKLVLKAGVKWRDLGSLQPLPPGFKRFTCLSIPRSWDYRPCAPRCRN

SEQ ID NO: 7254 - protein, 786 aa, Homo sapiens
MLGARAWLGRVLLLPRAGAGLAASRRGSSSRDKDRSATVSSSVPMPAGGKGSHPSSTPQRVPNRLIHEKSPYLLQHAYNPVDWYPWGQEAFDKARKENKPIFLSVGYSTCHWCHMMEEESFQNEEIGRLLSEDFVSVKVDREERPDVDKVYMTFVQATSSGGGWPMNVWLTPNLQPFVGGTYFPPEDGLTRVGFRTVLLRIREQWKQNKNTLLENSQRVTTALLARSEISVGDRQLPPSAATVNNRCFQQLDEGYDEEYGGFAEAPKFPTPVILSFLFSYWLSHRLTQDGSRAQQMALHTLKMMANGGIRDHVGQGFHRYSTDRQWHVPHFEKMLYDQAQLAVAYSQAFQLSGDEFYSDVAKGILQYVARSLSHRSGGFYSAEDADSPPERGQRPKEGAYYVWTVKEVQQLLPEPVLGATEPLTSGQLLMKHYGLTEAGNISPSQDPKGELQGQNVLTVRYSLELTAARFGLDVEAVRTLLNSGLEKLFQARKHRPKPHLDSKMLAAWNGLMVSGYAVTGAVLGQDRLINYATNGAKFLKRHMFDVASGRLMRTCYTGPGGTVEHSNPPCWGFLEDYAFVVRGLLDLYEASQESAWLEWALRLQDTQDKLFWDSQGGGYFCSEAELGAGLPLRLKDDQDGAEPSANSVSAHNLLRLHGFTGHKDWMDKCVCLLTAFSERMRRVPVALPEMVRALSAQQQTLKQIVICGDRQAKDTKALVQCVHSVYIPNKVLILADGDPSSFLSRQLPFLSTLRRLEDQATAYVCENQACSVPITDPCELRKLLHP

SEQ ID NO: 7255 - protein, 764 aa, Homo sapiens
MLLFVLTCLLAVFPAISTKSPIFGPEEVNSVEGNSVSITCYYPPTSVNRHTRKYWCRQGARGGCITLISSEGYVSSKYAGRANLTNFPENGTFVVNIAQLSQDDSGRYKCGLGINSRGLSFDVSLEVSQGPGLLNDTKVYTVDLGRTVTINCPFKTENAQKRKSLYKQIGLYPVLVIDSSGYVNPNYTGRIRLDIQGTGQLLFSVVINQLRLSDAGQYLCQAGDDSNSNKKNADLQVLKPEPELVYEDLRGSVTFHCALGPEVANVAKFLCRQSSGENCDVVVNTLGKRAPAFEGRILLNPQDKDGSFSVVITGLRKEDAGRYLCGAHSDGQLQEGSPIQAWQLFVNEESTIPRSPTVVKGVAGGSVAVLCPYNRKESKSIKYWCLWEGAQNGRCPLLVDSEGWVKAQYEGRLSLLEEPGNGTFTVILNQLTSRDAGFYWCLTNGDTLWRTTVEIKIIEGEPNLKVPGNVTAVLGETLKVPCHFPCKFSSYEKYWCKWNNTGCQALPSQDEGPSKAFVNCDENSRLVSLTLNLVTRADEGWYWCGVKQGHFYGETAAVYVAVEERKAAGSRDVSLAKADAAPDEKVLDSGFREIENKAIQDPRLFAEEKAVADTRDQADGSRASVDSGSSEEQGGSSRALVSTLVPLGLVLAVGAVAVGVARARHRKNVDRVSIRSYRTDISMSDFENSREFGANDNMGASSITQETSLGGKEEFVATTESTTETKEPKKAKRSSKEEAEMAYKDFLLQSSTVAAEAQDGPQEA

SEQ ID NO: 7256 - protein, 272 aa, Homo sapiens
MVRCYVEIVEKLPERRPDPATIEGCAQLKPNNYLLAWHTPFNEKGSGFGAATKAMCIGLRYWKPERLETLIEVSVECGRMTHNHPTGFLGSLCTALFVSFAAQGKPLVQWGRDMLRAVPLAEEYCRKTIRHTAEYQEHWFYFEAKWQFYLEERKISKDSENKAIFPDNYDAEEREKTYRKWSSEGRGGRRGHDAPMIAYDALLAAGNSWTELCHRAMFHGGESAATGTIAGCLFGLLYGLDLVPKGLYQDLEDKEKLEDLGAALYRLSTEEK

SEQ ID NO: 7257 - protein, 451 aa, Homo sapiens
MKTKLNIYNMQFLLFVFLVWDPARLVLANIQEDEAKNNITIFTRILDRLLDGYDNRLRPGLGDSITEVFTNIYVTSFGPVSDTDMEYTIDVFFRQKWKDERLKFKGPMNILRLNNLMASKIWTPDTFFHNGKKSVAHNMTMPNKLLRIQDDGTLLYTMRLTVQAECPMHLEDFPMDAHSCPLKFGSYAYTTSEVTYIWTYNASDSVQVAPDGSRLNQYDLLGQSIGKETIKSSTGEYTVMTAHFHLKRKIGYFVIQTYLPCIMTVILSQVSFWLNRESVPARTVFGVTTVLTMTTLSISARNSLPKVAYATAMDWFIAVCYAFVFSALIEFATVNYFTKRGWAWDGKSVVNDKKKEKASVMIQNNAYAVAVANYAPNLSKDPVLSTISKSATTPEPNKKPENKPAEAKKTFNSVSKIDRMSRIVFPVLFGTFNLVYWATYLNREPVLGVSP

SEQ ID NO: 7258 - protein, 490 aa, Homo sapiens
MKPKLMYQELKVPAEEPANELPMNEIEAWKAAEKKARWVLLVLILAVVGFGALMTQLFLWEYGDLHLFGPNQRPAPCYDPCEAVLVESIPEGLDFPNASTGNPSTSQAWLGLLAGAHSSLDIASFYWTLTNNDTHTQEPSAQQGEEVLRQLQTLAPKGVNVRIAVSKPSGPQPQADLQALLQSGAQVRMVDMQKLTHGVLHTKFWVVDQTHFYLGSANMDWRSLTQVKELGVVMYNCSCLARDLTKIFEAYWFLGQAGSSIPSTWPRFYDTRYNQETPMEICLNGTPALAYLASAPPPLCPSGRTPDLKALLNVVDNARSFIYVAVMNYLPTLEFSHPHRFWPAIDDGLRRATYERGVKVRLLISCWGHSEPSMRAFLLSLAALRDNHTHSDIQVKLFVVPADEAQARIPYARVNHNKYMVTERATYIGTSNWSGNYFTETAGTSLLVTQNGRGGLRSQLEAIFLRDWDSPYSHDLDTSADSVGNACRLL

SEQ ID NO: 7259 - protein, 401 aa, Homo sapiens
MGLKALCLGLLCVLFVSHFYTPMPDNIEESWKIMALDAIAKTCTFTAMCFENMRIMRYEEFISMIFRLDYTQPLSDEYITVTDTTFVDIPVRLYLPKRKSETRRRAVIYFHGGGFCFGSSKQRAFDFLNRWTANTLDAVVVGVDYRLAPQHHFPAQFEDGLAAVKFFLLEKILTKYGVDPTRICIAGDSSGGNLATAVTQQVQNDAEIKHKIKMQVLLYPGLQITDSYLPSHRENEHGIVLTRDVAIKLVSLYFTKDEALPWAMRRNQHMPLESRHLFKFVNWSILLPEKYRKDYVYTEPILGGLSYSLPGLTDSRALPLLANDSQLQNLPLTYILTCQHDLLRDDGLMYVTRLRNVGVQVVHEHIEDGIHGALSFMTSPFYLRLGLRIRDMYVSWLDKNL

SEQ ID NO: 7260 - protein, 813 aa, Homo sapiens
MGWRPRRARGTPLLLLLLLLLLWPVPGAGVLQGHIPGQPVTPHWVLDGQPWRTVSLEEPVSKPDMGLVALEAEGQELLLELEKNHRLLAPGYIETHYGPDGQPVVLAPNHTDHCHYQGRVRGFPDSWVVLCTCSGMSGLITLSRNASYYLRPWPPRGSKDFSTHEIFRMEQLLTWKGTCGHRDPGNKAGMTSLPGGPQSRGRREARRTRKYLELYIVADHTLFLTRHRNLNHTKQRLLEVANYVDQLLRTLDIQVALTGLEVWTERDRSRVTQDANATLWAFLQWRRGLWAQRPHDSAQLLTGRAFQGATVGLAPVEGMCRAESSGGVSTDHSELPIGAAATMAHEIGHSLGLSHDPDGCCVEAAAESGGCVMAAATGHPFPRVFSACSRRQLRAFFRKGGGACLSNAPDPGLPVPPALCGNGFVEAGEECDCGPGQECRDLCCFAHNCSLRPGAQCAHGDCCVRCLLKPAGALCRQAMGDCDLPEFCTGTSSHCPPDVYLLDGSPCARGSGYCWDGACPTLEQQCQQLWGPGSHPAPEACFQVVNSAGDAHGNCGQDSEGHFLPCAGRDALCGKLQCQGGKPSLLAPHMVPVDSTVHLDGQEVTCRGALALPSAQLDLLGLGLVEPGTQCGPRMVCQSRRCRKNAFQELQRCLTACHSHGVCNSNHNCHCAPGWAPPFCDKPGFGGSMDSGPVQAENHDTFLLAMLLSVLLPLLPGAGLAWCCYRLPGAHLQRCSWGCRRDPACSGPKDGPHRDHPLGGVHPMELGPTATGQPWPLDPENSHEPSSHPEKPLPAVSPDPQADQVQMPRSCLW

SEQ ID NO: 7261 - protein, 692 aa, Homo sapiens
MDHHIPMHALPEEIQKMLPEEKVCKYCGVSYLILHEFKAMEEKVKAMEKEMKFYQGSVDREKRLQEKLHSLSQELEQYKIDNKSKTERIYDVGMQLKSQQNEFQKVKKQLSHLQDELKIKYRQSYIFSQRLSEYKYFWNKTLSLLTFTKRELTSIKNEVYDNYQNWTSLKGAVFLQIKSISETALTEIDILNKSLTVSQRNKVCLEKEMKNLKLLSDAAILRSQQIRTSRQQEVNLQTRCYDLQKEVLDLQCLVEALGLKLQKAVTEMDNYKEMLMNKSNEADDCQRELKKLKFESIISESQHTMLLKEKEDSLMTCQQIYKALQEELTVKEKQEEDIKRRINLAENELEITKTLLNQTREEVLTLKNERELMLISHQKSIEQLQETLRQKLLSDDNWKEKIEAELAKERAQHLVEFEEQALLFKEETKLQLDIEKEKHQDVIQKYKKEQEELQMKISDLITGATRDLRQEVTTLKEKLHKSHIRYTEESNSKEKEIENLKNLVAEFESRLKKEIDSNDSVSENLRKEMEQKSDELKRVMLAQTQLIEQFNQSQEENTFLQETVRRECEERFELTEALSQAREQLLELSKLRGSLPFSPCSLSKGSLTSPAAAVSNHGERSLARLNSEKGIQIPNLRGVSKPTTFPTSDKPKRVRSGVPILPQPHPPRGGASSANETRQRLAAILRRRRSQQ

SEQ ID NO: 7262 - protein, 641 aa, Homo sapiens
MTTPALLPLSGRRIPPLNLGPPSFPHHRATLRLSEKFILLLILSAFITLCFGAFFFLPDSSKHKRFDLGLEDVLIPHVDAGKGAKNPGVFLIHGPDEHRHREEEERLRNKIRADHEKALEEAKEKLRKSREEIRAEIQTEKNKVVQEMKIKENKPLPPVPIPNLVGIRGGDPEDNDIREKREKIKEMMKHAWDNYRTYGWGHNELRPIARKGHSPNIFGSSQMGATIVDALDTLYIMGLHDEFLDGQRWIEDNLDFSVNSEVSVFEVNIRFIGGLLAAYYLSGEEIFKIKAVQLAEKLLPAFNTPTGIPWAMVNLKSGVGRNWGWASAGSSILAEFGTLHMEFIHLSYLTGDLTYYKKVMHIRKLLQKMDRPNGLYPNYLNPRTGRWGQYHTSVGGLGDSFYEYLLKAWLMSDKTDHEARKMYDDAIEAIEKHLIKKSRGGLTFIGEWKNGHLEKKMGHLACFAGGMFALGADGSRADKAGHYLELGAEIARTCHESYDRTALKLGPESFKFDGAVEAVAVRQAEKYYILRPEVIETYWYLWRFTHDPRYRQWGWEAALAIEKYCRVNGGFSGVKDVYSSTPTHDDVQQSFFLAETLKYLYLLFSGDDLLPLDHWVFNTEAHPLPVLHLANTTLSGNPAVR

SEQ ID NO: 7263 - protein, 4646 aa, Homo sapiens [sequence omitted]

SEQ ID NO: 7264 - protein, 1541 aa, Homo sapiens
MSFLEEARAAGRAVVLALVLLLLPAVPVGASVPPRPLLPLQPGMPHVCAEQELTLVGRRQPCVQALSHTVPVWKAGCGWQAWCVGHERRTVYYMGYRQVYTTEARTVLRCCRGWMQQPDEEGCLSAECSASLCFHGGRCVPGSAQPCHCPPGFQGPRCQYDVDECRTHNGGCQHRCVNTPGSYLCECKPGFRLHTDSRTCLAINSCALGNGGCQHHCVQLTITRHRCQCRPGFQLQEDGRHCVRRSPCANRNGSCMHRCQVVRGLARCECHVGYQLAADGKACEDVDECAAGLAQCAHGCLNTQGSFKCVCHAGYELGADGRQCYRIEMEIVNSCEANNGGCSHGCSHTSAGPLCTCPRGYELDTDQRTCIDVDDCADSPCCQQVCTNNPGGYECGCYAGYRLSADGCGCEDVDECASSRGGCEHHCTNLAGSFQCSCEAGYRLHEDRRGCSPLEEPMVDLDGELPFVRPLPHIAVLQDELPQLFQDDDVGADEEEAELRGEHTLTEKFVCLDDSFGHDCSLTCDDCRNGGTCLLGLDGCDCPEGWTGLICNETCPPDTFGKNCSFSCSCQNGGTCDSVTGACRCPPGVSGTNCEDGCPKGYYGKHCRKKCNCANRGRCHRLYGACLCDPGLYGRFCHLTCPPWAFGPGCSEECQCVQPHTQSCDKRDGSCSCKAGFRGERCQAECELGYFGPGCWQACTCPVGVACDSVSGECGKRCPAGFQGEDCGQECPVGTFGVNCSSSCSCGGAPCHGVTGQCRCPPGRTGEDCEADCPEGRWGLGCQEICPACQHAARCDPETGACLCLPGFVGSRCQDVCPAGWYGPSCQTRCSCANDGHCHPATGHCSCAPGWTGFSCQRACDTGHWGPDCSHPCNCSAGHGSCDAISGLCLCEAGYVGPRCEQQCPQGHFGPGCEQRCQCQHGAACDHVSGACTCPAGWRGTFCEHACPAGFFGLDCRSACNCTAGAACDAVNGSCLCPAGRRGPRCAETCPAHTYGHNCSQACACFNGASCDPVHGQCHCAPGWMGPSCLQACPAGLYGDNCRHSCLCQNGGTCDPVSGHCACPEGWAGLACEKECLPRDVRAGCRHSGGCLNGGLCDPHTGRCLCPAGWTGDKCQSPCLRGWFGEACAQRCSCPPGAACHHVTGACRCPPGFTGSGCEQACPPGSFGEDCAQMCQCPGENPACHPATGTCSCAAGYHGPSCQQRCPPGRYGPGCEQLCGCLNGGSCDAATGACRCPTGFLGTDCNLTCPQGRFGPNCTHVCGCGQGAACDPVTGTCLCPPGRAGVRCERGCPQNRFGVGCEHTCSCRNGGLCHASNGSCSCGLGWTGRHCELACPPGRYGAACHLECSCHNNSTCEPATGTCRCGPGFYGQACEHPCPPGFHGAGCQGLCWCQHGAPCDPISGRCLCPAGFHGHFCERGCEPGSFGEGCHQRCDCDGGAPCDPVTGLCLCPPGRSGATCNLDCRRGQFGPSCTLHCDCGGGADCDPVSGQCHCVDGYMGPTCREGGPLRLPENPSLAQGSAGTLPASSRPTSRSGGPARH

SEQ ID NO: 7265 - protein, 2426 aa, Homo sapiens
MATNIEQIFRSFVVSKFREIQQELSSGRNEGQLNGETNTPIEGNQAGDAAASARSLPNEEIVQKIEEVLSGVLDTELRYKPDLKEGSRKSRCVSVQTDPTDEIPTKKSKKHKKHKNKKKKKKKEKEKKYKRQPEESESKTKSHDDGNIDLESDSFLKFDSEPSAVALELPTRAFGPSETNESPAVVLEPPVVSMEVSEPHILETLKPATKTAELSVVSTSVISEQSEQSVAVMPEPSMTKILDSFAAAPVPTTTLVLKSSEPVVTMSVEYQMKSVLKSVESTSPEPSKIMLVEPPVAKVLEPSETLVVSSETPTEVYPEPSTSTTMDFPESSAIEALRLPEQPVDVPSEIADSSMTRPQELPELPKTTALELQESSVASAMELPGPPATSMPELQGPPVTPVLELPGPSATPVPELPGPLSTPVPELPGPPATAVPELPGPSVTPVPQLSQELPGLPAPSMGLEPPQEVPEPPVMAQELPGLPLVTAAVELPEQPAVTVAMELTEQPVTTTELEQPVGMTTVEHPGHPEVTTATGLLGQPEATMVLELPGQPVATTALELPGQPSVTGVPELPGLPSATRALELSGQPVATGALELPGPLMAAGALEFSGQSGAAGALELLGQPLATGVLELPGQPGAPELPGQPVATVALEISVQSVVTTSELSTMTVSQSLEVPSTTALESYNTVAQELPTTLVGETSVTVGVDPLMAPESHILASNTMETHILASNTMDSQMLASNTMDSQMLASNTMDSQMLASSTMDSQMLATSSMDSQMLATSSMDSQMLATSTMDSQMLATSSMDSQMLATSSMDSQMLATSSMDSQMLATSSMDSQMLATSTMDSQMLATSTMDSQMLATSSMDSQMLASGTMDSQMLASGTMDAQMLASGTMDAQMLASSTQDSAMLGSKSPDPYRLAQDPYRLAQDPYRLGHDPYRLGHDAYRLGQDPYRLGHDPYRLTPDPYRMSPRPYRIAPRSYRIAPRPYRLAPRPLMLASRRSMMMSYAAERSMMSSYERSMMSYERSMMSPMAERSMMSAYERSMMSAYERSMMSPMAERSMMSAYERSMMSAYERSMMSPMADRSMMSMGADRSMMSSYSAADRSMMSSYSAADRSMMSSYTADRSMMSMAADSYTDSYTDTYTEAYMVPPLPPEEPPTMPPLPPEEPPMTPPLPPEEPPEGPALPTEQSALTAENTWPTEVPSSPSEESVSQPEPPVSQSEISEPSAVPTDYSVSASDPSVLVSEAAVTVPEPPPEPESSITLTPVESAVVAEEHEVVPERPVTCMVSETPAMSAEPTVLASEPPVMSETAETFDSMRASGHVASEVSTSLLVPAVTTPVLAESILEPPAMAAPESSAMAVLESSAVTVLESSTVTVLESSTVTVLEPSVVTVPEPPVVAEPDYVTIPVPVVSALEPSVPVLEPAVSVLQPSMIVSEPSVSVQESTVTVSEPAVTVSEQTQVIPTEVAIESTPMILESSIMSSHVMKGINLSSGDQNLAPEIGMQEIALHSGEEPHAEEHLKGDFYESEHGINIDLNINNHLIAKEMEHNTVCAAGTSPVGEIGEEKILPTSETKQRTVLDTYPGVSEADAGETLSSTGPFALEPDATGTSKGIEFTTASTLSLVNKYDVDLSLTTQDTEHDMVISTSPSGGSEADIEGPLPAKDIHLDLPSNNNLVSKDTEEPLPVKESDQTLAALLSPKESSGGEKEVPPPPKETLPDSGFSANIEDINEADLVRPLLPKDMERLTSLRAGIEGPLLASDVGRDRSAASPVVSSMPERASESSSEEKDDYEIFVKVKDTHEKSKKNKNRDKGEKEKKRDSSLRSRSKRSKSSEHKSRKRTSESRSRARKRSSKSKSHRSQTRSRSRSRRRRRSSRSRSKSRGRRSVSKEKRKRSPKHRSKSRERKRKRSSSRDNRKTVRARSRTPSRRSRSHTPSRRRRSRSVGRRRSFSISPSRRSRTPSRRSRTPSRRSRTPSRRSRTPSRRSRTPSRRSRTPSRRRRSRSVVRRRSFSISPVRLRRSRTPLRRRFSRSPIRRKRSRSSERGRSPKRLTDLDKAQLLEIAKANAAAMCAKAGVPLPPNLKPAPPPTIEEKVAKKSGGATIEELTEKCKQIAQSKEDDDVIVNKPHVSDEEEEEPPFYHHPFKLSEPKPIFFNLNIAAAKPTPPKSQVTLTKEFPVSSGSQHRKKEADSVYGEWVPVEKNGEENKDDDNVFSSNLPSEPVDISTAMSERALAQKRLSENAFDLEAMSMLNRAQERIDAWAQLNSIPGQFTGSTGVQVLTQEQLANTGAQAWIKKDQFLRAAPVTGGMGAVLMRKMGWREGEGLGKNKEGNKEPILVDFKTDRKGLVAVGERAQKRSGNFSAAMKDLSGKHPVSALMEICNKRRWQPPEFLLVHDSGPDHRKHFLFRVLRNGALTRPNCMFFLNRY

SEQ ID NO: 7266 - protein, 1340 aa, Homo sapiens
MHQRHPRARCPPLCVAGILACGFLLGCWGPSHFQQSCLQALEPQAVSSYLSPGAPLKGRPPSPGFQRQRQRQRRAAGGILHLELLVAVGPDVFQAHQEDTERYVLTNLNIGAELLRDPSLGAQFRVHLVKMVILTEPEGAPNITANLTSSLLSVCGWSQTINPEDDTDPGHADLVLYITRFDLELPDGNRQVRGVTQLGGACSPTWSCLITEDTGFDLGVTIAHEIGHSFGLEHDGAPGSGCGPSGHVMASDGAAPRAGLAWSPCSRRQLLSLLSANEQCRVAFGPKAVACTFAREHLDMCQALSCHTDPLDQSSCSRLLVPLLDGTECGVEKWCSKGRCRSLVELTPIAAVHGRWSSWGPRSPCSRSCGGGVVTRRRQCNNPRPAFGGRACVGADLQAEMCNTQACEKTQLEFMSQQCARTDGQPLRSSPGGASFYHWGAAVPHSQGDALCRHMCRAIGESFIMKRGDSFLDGTRCMPSGPREDGTLSLCVSGSCRTFGCDGRMDSQQVWDRCQVCGGDNSTCSPRKGSFTAGRAREYVTFLTVTPNLTSVYIANHRPLFTHLAVRIGGRYVVAGKMSISPNTTYPSLLEDGRVEYRVALTEDRLPRLEEIRIWGPLQEDADIQVYRRYGEEYGNLTRPDITFTYFQPKPRQAWVWAAVRGPCSVSCGAGLRWVNYSCLDQARKELVETVQCQGSQQPPAWPEACVLEPCPPYWAVGDFGPCSASCGGGLRERPVRCVEAQGSLLKTLPPARCRAGAQQPAVALETCNPQPCPARWEVSEPSSCTSAGGAGLALENETCVPGADGLEAPVTEGPGSVDEKLPAPEPCVGMSCPPGWGHLDATSAGEKAPSPWGSIRTGAQAAHVWTPAAGSCSVSCGRGLMELRFLCMDSALRVPVQEELCGLASKPGSRREVCQAVPCPARWQYKLAACSVSCGRGVVRRILYCARAHGEDDGEEILLDTQCQGLPRPEPQEACSLEPCPPRWKVMSLGPCSASCGLGTARRSVACVQLDQGQDVEVDEAACAALVRPEASVPCLIADCTYRWHVGTWMECSVSCGDGIQRRRDTCLGPQAQAPVPADFCQHLPKPVTVRGCWAGPCVGQGACGRQHLEPTGTIDMRGPGQADCAVAIGRPLGEVVTLRVLESSLNCSAGDMLLLWGRLTWRKMCRKLLDMTFSSKTNTLVVRQRCGRPGGGVLLRYGSQLAPETFYRECDMQLFGPWGEIVSPSLSPATSNAGGCRLFINVAPHARIAIHALATNMGAGTEGANASYILIRDTHSLRTTAFHGQQVLYWESESSQAEMEFSEGFLKAQASLRGQYWTLQSWVPEMQDPQSWKGKEGT

SEQ ID NO: 7267 - protein, 475 aa, Homo sapiens
YSTPVFSQKMTVWILLLLSLYPGFTSQKSDDDYEDYASNKTWVLTPKVPEGDVTVILNNLLEGYDNKLRPDIGVKPTLIHTDMYVNSIGPVNAINMEYTIDIFFAQTWYDRRLKFNSTIKVLRLNSNMVGKIWIPDTFFRNSKKADAHWITTPNRMLRIWNDGRVLYTLRLTIDAECQLQLHNFPMDEHSCPLEFSSYGYPREEIVYQWKRSSVEVGDTRSWRLYQFSFVGLRNTTEVVKTTSEDKLHEILVNLTLGDYVVMSVYFDLSRRMGYFTIQTYIPCTLIVVLSWVSFWINKDAVPARTSLGITTVLTMTTLSTIARKSLPKVSYVTAMDLFVSVCFIFVFSALVEYGTLHYFVSNRKPSKDKDKKKKNPLLRMFSFKAPTIDIRPRSATIQMNNATHLQERDEEYGYECLDGKDCASFFCCFEDCRTGAWRHGRIHIRIAKMDSYARIFFPTAFCLFNLVYWVSYLYL

SEQ ID NO: 7268 - protein, 418 aa, Homo sapiens
MKETRGYGGDAPFCTRLNHSYTGMWAPERSAEARGNLTRPPGSGEDCGSVSVAFPITMLLTGFVGNALAMLLVSRSYRRRESKRKKSFLLCIGWLALTDLVGQLLTTPVVIVVYLSKQRWEHIDPSGRLCTFFGLTMTVFGLSSLFIASAMAVERALAIRAPHWYASHMKTRATRAVLLGVWLAVLAFALLPVLGVGQYTVQWPGTWCFISTGRGGNGTSSSHNWGNLFFASAFAFLGLLALTVTFSCNLATIKALVSRCRAKATASQSSAQWGRITTETAIQLMGIMCVLSVCWSPLLIMMLKMIFNQTSVEHCKTHTEKQKECNFFLIAVRLASLNQILDPWVYLLLRKILLRKFCQMRKRRLREQLICSLQNSQIQRATAHCGQVQTYRVLNREEMEVLVSSINVYTRISTVKTE

SEQ ID NO: 7269 - protein, 1003 aa, Homo sapiens
MVFSVRQCGHVGRTEEVLLTFKIFLVIICLHVVLVTSLEEDTDNSSLSPPPAKLSVVSFAPSSNGTPEVETTSLNDVTLSLLPSNETGVKPQRNICNLSSICNDSAFFRGEIMFQYDKESTVPQNQHITNGTLTGVLSLSELKRSELNKTLQTLSETYFIMCATAEAQSTLNCTFTIKLNNTMNACAVIAALERVKIRPMEHCCCSVRIPCPSSPEELEKLQCDLQDPIVCLADHPRGPPFSSSQSIPVVPRATVLSQVPKATSFAEPPDYSPVTHNVPSPIGEIQPLSPQPSAPIASSPAIDMPPQSETISSPMPQTHVSGTPPPVKASFSSPTVSAPANVNTTSAPPVQTDIVNTSSISDLENQVLQMEKALSLGSLEPNLAGEMINQVSRLLHSPPDMLAPLAQRLLKVVDDIGLQLNFSNTTISLTSPSLALAVIRVNASSFNTTTFVAQDPANLQVSLETQAPENSIGTITLPSSLMNNLPAHDMELASRVQFNFFETPALFQDPSLENLSLISYVISSSVANLTVRNLTRNVTVTLKHINPSQDELTVRCVFWDLGRNGGRGGWSDNGCSVKDRRLNETICTCSHLTSFGVLLDLSRTSVLPAQMMALTFITYIGCGLSSIFLSVTLVTYIAFEKIRRDYPSKILIQLCAALLLLNLVFLLDSWIALYKMQGLCISVAVFLHYFLLVSFTWMGLEAFHMYLALVKVFNTYIRKYILKFCIVGWGVPAVVVTIILTISPDNYGLGSYGKFPNGSPDDFCWINNNAVFYITVVGYFCVIFLLNVSMFIVVLVQLCRIKKKKQLGAQRKTSIQDLRSIAGLTFLLGITWGFAFFAWGPVNVTFMYLFAIFNTLQGFFIFIFYCVAKENVRKQWRRYLCCGKLRLAENSDWSKTATNGLKKQTVNQGVSSSSNSLQSSSNSTNSTTLLVNNDCSVHASGNGNASTERNGVSFSVQNGDVCLHDFTGKQHMFNEKEDSCNGKGRMALRRTSKRGSLHFIEQM

SEQ ID NO: 7270 - protein, 1382 aa, Homo sapiens
MTRKRTYWVPNSSGGLVNRGIDIGDDMVSGLIYKTYTLQDGPWSQQERNPEAPGRAAVPPWGKYDAALRTMIPFRPKPRFPAPQPLDNAGLFSYLTVSWLTPLMIQSLRSRLDENTIPPLSVHDASDKNVQRLHRLWEEEVSRRGIEKASVLLVMLRFQRTRLIFDALLGICFCIASVLGPILIIPKILEYSEEQLGNVVHGVGLCFALFLSECVKSLSFSSSWIINQRTAIRFRAAVSSFAFEKLIQFKSVIHITSGEAISFFTGDVNYLFEGVCYGPLVLITCASLVICSISSYFIIGYTAFIAILCYLLVFPLAVFMTRMAVKAQHHTSEVSDQRIRVTSEVLTCIKLIKMYTWEKPFAKIIEDLRRKERKLLEKCGLVQSLTSITLFIIPTVATAVWVLIHTSLKLKLTASMAFSMLASLNLLRLSVFFVPIAVKGLTNSKSAVMRFKKFFLQESPVFYVQTLQDPSKALVFEEATLSWQQTCPGIVNGALELERNGHASEGMTRPRDALGPEEEGNSLGPELHKINLVVSKGMMLGVCGNTGSGKSSLLSAILEEMHLLEGSVGVQGSLAYVPQQAWIVSGNIRENILMGGAYDKARYLQVLHCCSLNRDLELLPFGDMTEIGERGLNLSGGQKQRISLARAVYSDRQIYLLDDPLSAVDAHVGKHIFEECIKKTLRGKTVVLVTHQLQYLEFCGQIILLENGKICENGTHSELMQKKGKYAQLIQKMHKEATSDMLQDTAKIAEKPKVESQALATSLEESLNGNAVPEHQLTQEEEMEEGSLSWRVYHHYIQAAGGYMVSCIIFFFVVLIVFLTIFSFWWLSYWLEQGSGTNSSRESNGTMADLGNIADNPQLSFYQLVYGLNALLLICVGVCSSGIFTKVTRKASTALHNKLFNKVFRCPMSFFDTIPIGRLLNCFAGDLEQLDQLLPIFSEQFLVLSLMVIAVLLIVSVLSPYILLMGAIIMVICFIYYMMFKKAIGVFKRLENYSRSPLFSHILNSLQGLSSIHVYGKTEDFISQFKRLTDAQNNYLLLFLSSTRWMALRLEIMTNLVTLAVALFVAFGISSTPYSFKVMAVNIVLQLASSFQATARIGLETEAQFTAVERILQYMKMCVSEAPLHMEGTSCPQGWPQHGEIIFQDYHMKYRDNTPTVLHGINLTIRGHEVVGIVGRTGSGKSSLGMALFRLVEPMAGRILIDGVDICSIGLEDLRSKLSVIPQDPVLLSGTIRFNLDPFDRHTDQQIWDALERTFLTKAISKFPKKLHTDVVENGGNFSVGERQLLCIARAVLRNSKIILIDEATASIDMETDTLIQRTIREAFQGCTVLVIAHRVTTVLNCDHILVMGNGKVVEFDRPEVLRKKPGSLFAALMATATSSLR

SEQ ID NO: 7271 - protein, 223 aa, Homo sapiens
MGRYSGKTCRLLFMLVLTVAFFVAELVSGYLGNSIALLSDSFNMLSDLISLCVGLSAGYIARRPTRGFSATYGYARAEVVGALSNAVFLTALCFTIFVEAVLRLARPERIDDPELVLIVGVLGLLVNVVGLLIFQDCAAWFACCLRGRSRRLQQRQQLAEGCVPGAFGGPQGAEDPRRAADPTAPGSDSAVTLRGTSVERKREKGATVFANVAELIHNTRFLL

SEQ ID NO: 7272 - protein, 852 aa, Homo sapiens
MLSGKKAAAAAAAAAAAATGTEAGPGTAGGSENGSEVAAQPAGLSGPAEVGPGAVGERTPRKKEPPRASPPGGLAEPPGSAGPQAGPTVVPGSATPMETGIAETPEGRRTSRRKRAKVEYREMDESLANLSEDEYYSEEERNAKAEKEKKLPPPPPQAPPEEENESEPEEPSGVEGAAFQSRLPHDRMTSQEAACFPDIISGPQQTQKVFLFIRNRTLQLWLDNPKIQLTFEATLQQLEAPYNSDTVLVHRVHSYLERHGLINFGIYKRIKPLPTKKTGKVIIIGSGVSGLAAARQLQSFGMDVTLLEARDRVGGRVATFRKGNYVADLGAMVVTGLGGNPMAVVSKQVNMELAKIKQKCPLYEANGQAVPKEKDEMVEQEFNRLLEATSYLSHQLDFNVLNNKPVSLGQALEVVIQLQEKHVKDEQIEHWKKIVKTQEELKELLNKMVNLKEKIKELHQQYKEASEVKPPRDITAEFLVKSKHRDLTALCKEYDELAETQGKLEEKLQELEANPPSDVYLSSRDRQILDWHFANLEFANATPLSTLSLKHWDQDDDFEFTGSHLTVRNGYSCVPVALAEGLDIKLNTAVRQVRYTASGCEVIAVNTRSTSQTFIYKCDAVLCTLPLGVLKQQPPAVQFVPPLPEWKTSAVQRMGFGNLNKVVLCFDRVFWDPSVNLFGHVGSTTASRGELFLFWNLYKAPILLALVAGEAAGIMENISDDVIVGRCLAILKGIFGSSAVPQPKETVVSRWRADPWARGSYSYVAAGSSGNDYDLMAQPITPGPSIPGAPQPIPRLFFAGEHTIRNYPATVHGALLSGLREAGRIADQFLGAMYTLPRQATPGVPAQQSPSM

SEQ ID NO: 7273 - protein, 944 aa, Homo sapiens
MAAVAAVAARRRRSWASLVLAFLGVCLGITLAVDRSNFKTCEESSFCKRQRSIRPGLSPYRALLDSLQLGPDSLTVHLIHEVTKVLLVLELQGLQKNMTRFRIDELEPRRPRYRVPDVLVADPPIARLSVSGRDENSVELTMAEGPYKIILTARPFRLDLLEDRSLLLSVNARGLLEFEHQRAPRVSQGSKDPAEGDGAQPEETPRDGDKPEETQGKAEKDEPGAWEETFKTHSDSKPYGPMSVGLDFSLPGMEHVYGIPEHADNLRLKVTEGGEPYRLYNLDVFQYELYNPMALYGSVPVLLAHNPHRDLGIFWLNAAETWVDISSNTAGKTLFGKMMDYLQGSGETPQTDVRWMSETGIIDVFLLLGPSISDVFRQYASLTGTQALPPLFSLGYHQSRWNYRDEADVLEVDQGFDDHNLPCDVIWLDIEHADGKRYFTWDPSRFPQPRTMLERLASKRRKLVAIVDPHIKVDSGYRVHEELRNLGLYVKTRDGSDYEGWCWPGSAGYPDFTNPTMRAWWANMFSYDNYEGSAPNLFVWNDMNEPSVFNGPEVTMLKDAQHYGGWEHRDVHNIYGLYVHMATADGLRQRSGGMERPFVLARAFFAGSQRFGAVWTGDNTAEWDHLKISIPMCLSLGLVGLSFCGADVGGFFKNPEPELLVRWYQMGAYQPFFRAHAHLDTGRREPWLLPSQHNDIIRDALGQRYSLLPFWYTLLYQAHREGIPVMRPLWVQYPQDVTTFNIDDQYLLGDALLVHPVSDSGAHGVQVYLPGQGEVWYDIQSYQKHHGPQTLYLPVTLSSIPVFQRGGTIVPRWMRVRRSSECMKDDPITLFVALSPQGTAQGELFLDDGHTFNYQTRQEFLLRRFSFSGNTLVSSSADPEGHFETPIWIERVVIIGAGKPAAVVLQTKGSPESRLSFQHDPETSVLVLRKPGINVASDWSIHLR

SEQ ID NO: 7274 - protein, 1525 aa, Homo sapiens
MSGTQSTITDRFPLKKPIRHGSILNRESPTDKKQKVERIASHDFDPTGLVQRCVIIQKDDNGFGLTVSGDNPVFVQSVKEDGAAMRAGVQTGDRIIKVNGTLVTHSNHLEVVKLIKSGSYVALTVQGRPPGSPQIPLADSEVEPSVIGHMSPIMTSPHSPGASGNMERITSPVLMGEENNVVHNQKVEILRKMLQKEQERLQLLQEDYNRTPAQRLLKEIQEAKKHIPQLQEQLSKATGSAQDGAVVTPSRPLGDTLTVSEAETDPGDVLGRTDCSSGDASRPSSDNADSPKSGPKERIYLEENPEKSETIQDTDTQSLVGSPSTRIAPHIIGAEDDDFGTEHEQINGQCSCFQSIELLKSRPAHLAVFLHHVVSQFDPATLLCYLYSDLYKHTNSKETRRIFLEFHQFFLDRSAHLKVSVPDEMSADLEKRRPELIPEDLHRHYIQTMQERVHPEVQRHLEDFRQKRSMGLTLAESELTKLDAERDKDRLTLEKERTCAEQIVAKIEEVLMTAQAVEEDKSSTMQYVILMYMKHLGVKVKEPRNLEHKRGRIGFLPKIKQSMKKDKEGEEKGKRRGFPSILGPPRRPSRHDNSAIGRAMELQKARHPKHLSTPSSVSPEPQDSAKLRQSGLANEGTDAGYLPANSMSSVASGASFSQEGGKENDTGSKQVGETSAPGDTLDGTPRTLNTVFDFPPPPLDQVQEEECEVERVTEHGTPKPFRKFDSVAFGESQSEDEQFENDLETDPPNWQQLVSREVLLGLKPCEIKRQEVINELFYTERAHVRTLKVLDQVFYQRVSREGILSPSELRKIFSNLEDILQLHIGLNEQMKAVRKRNETSVIDQIGEDLLTWFSGPGEEKLKHAAATFCSNQPFALEMIKSRQKKDSRFQTFVQDAESNPLCRRLQLKDIIPTQMQRLTKYPLLLDNIAKYTEWPTEREKVKKAADHCRQILNYVNQAVKEAENKQRLEDYQRRLDTSSLKLSEYPNVEELRNLDLTKRKMIHEGPLVWKVNRDKTIDLYTLLLEDILVLLQKQDDRLVLRCHSKILASTADSKHTFSPVIKLSTVLVRQVATDNKALFVISMSDNGAQIYELVAQTVSEKTVWQDLICRMAASVKEQSTKPIPLPQSTPGEGDNDEEDPSKLKEEQHGISVTGLQSPDRDLGLESTLISSKPQSHSLSTSGKSEVRDLFVAERQFAKEQHTDGTLKEVGEDYQIAIPDSHLPVSEERWALDALRNLGLLKQLLVQQLGLTEKSVQEDWQHFPRYRTASQGPQTDSVIQNSENIKAYHSGEGHMPFRTGTGDIATCYSPRTSTESFAPRDSVGLAPQDSQASNILVMDHMIMTPEMPTMEPEGGLDDSGEHFFDAREAHSDENPSEGDGAVNKEEKDVNLRISGNYLILDGYDPVQESSTDEEVASSLTLQPMTGIPAVESTHQQQHSPQNTHSDGAISPFTPEFLVQQRWGAMEYSCFEIQSPSSCADSQSQIMEYIHKIEADLEHLKKVEESYTILCQRLAGSALTDKHSDKS

SEQ ID NO: 7275 - protein, 1190 aa, Homo sapiens
MKTRQNKDSMSMRSGRKKEAPGPREELRSRGRASPGGVSTSSSDGKAEKSRQTAKKARVEEASTPKVNKQGRSEEISESESEETNAPKKTKTEQELPRPQSPSDLDSLDGRSLNDDGSSDPRDIDQDNRSTSPSIYSPGSVENDSDSSSGLSQGPARPYHPPPLFPPSPQPPDSTPRQPEASFEPHPSVTPTGYHAPMEPPTSRMFQAPPGAPPPHPQLYPGGTGGVLSGPPMGPKGGGAASSVGGPNGGKQHPPPTTPISVSSSGASGAPPTKPPTTPVGGGNLPSAPPPANFPHVTPNLPPPPALRPLNNASASPPGLGAQPLPGHLPSPHAMGQGMGGLPPGPEKGPTLAPSPHSLPPASSSAPAPPMRFPYSSSSSSSAAASSSSSSSSSSASPFPASQALPSYPHSFPPPTSLSVSNQPPKYTQPSLPSQAVWSQGPPPPPPYGRLLANSNAHPGPFPPSTGAQSTAHPPVSTHHHHHQQQQQQQQQQQQQQQQQQQHHGNSGPPPPGAFPHPLEGGSSHHAHPYAMSPSLGSLRPYPPGPAHLPPPHSQVSYSQAGPNGPPVSSSSNSSSSTSQGSYPCSHPSPSQGPQGAPYPFPPVPTVTTSSATLSTVIATVASSPAGYKTASPPGPPPYGKRAPSPGAYKTATPPGYKPGSPPSFRTGTPPGYRGTSPPAGPGTFKPGSPTVGPGPLPPAGPSGLPSLPPPPAAPASGPPLSATQIKQEPAEEYETPESPVPPARSPSPPPKVVDVPSHASQSARFNKHLDRGFNSCARSDLYFVPLEGSKLAKKRADLVEKVRREAEQRAREEKEREREREREKEREREKERELERSVKLAQEGRAPVECPSLGPVPHRPPFEPGSAVATVPPYLGPDTPALRTLSEYARPHVMSPGNRNHPFYVPLGAVDPGLLGYNVPALYSSDPAAREREREARERDLRDRLKPGFEVKPSELEPLHGVPGPGLDPFPRHGGLALQPGPPGLHPFPFHPSLGPLERERLALAAGPALRPDMSYAERLAAERQHAERVAALGNDPLARLQMLNVTPHHHQHSHIHSHLHLHQQDAIHAASASVHPLIDPLASGSHLTRIPYPAGTLPNPLLPHPLHENEVLRHQLFAAPYRDLPASLSAPMSAAHQLQAMHAQSAELQRLALEQQQWLHAHHPLHSVPLPAQEDYYSHLKKESDKPL

SEQ ID NO: 7276 - protein, 419 aa, Homo sapiens
MPLSRWLRSVGVFLLPAPYWAPRERWLGSLRRPSLVHGYPVLAWHSARCWCQAWTEEPRALCSSLRMNGDQNSDVYAQEKQDFVQHFSQIVRVLTEDEMGHPEIGDAIARLKEVLEYNAIGGKYNRGLTVVVAFRELVEPRKQDADSLQRAWTVGWCVELLQAFFLVADDIMDSSLTRRGQICWYQKPGVGLDAINDANLLEACIYRLLKLYCREQPYYLNLIELFLQSSYQTEIGQTLDLLTAPQGNVDLVRFTEKRYKSIVKYKTAFYSFYLPIAAAMYMAGIDGEKEHANAKKILLEMGEFFQIQDDYLDLFGDPSVTGKIGTDIQDNKCSWLVVQCLQRATPEQYQILKENYGQKEAEKVARVKALYEELDLPAVFLQYEEDSYSHIMALIEQYAAPLPPAVFLGLARKIYKRRK

SEQ ID NO: 7277 - protein, 247 aa, Homo sapiens
MTILFLTMVISYFGCMKAAPMKEANIRGQGGLAYPGVRTHGTLESVNGPKAGSRGLTSLADTFEHVIEELLDEDQKVRPNEENNKDADLYTSRVMLSSQVPLEPPLLFLLEEYKNYLDAANMSMRVRRHSDPARRGELSVCDSISEWVTAADKKTAVDMSGGTVTVLEKVPVSKGQLKQYFYETKCNPMGYTKEGCRGIDKRHWNSQCRTTQSYVRALTMDSKKRIGWRFIRIDTSCVCTLTIKRGR

SEQ ID NO: 7278 - protein, 309 aa, Homo sapiens
MSLEQRSLHCKPEEALEAQQEALGLVCVQAATSSSSPLVLGTLEEVPTAGSTDPPQSPQGASAFPTTINFTRQRQPSEGSSSREEEGPSTSCILESLFRAVITKKVADLVGFLLLKYRAREPVTKAEMLESVIKNYKHCFPEIFGKASESLQLVFGIDVKEADPTGHSYVLVTCLGLSYDGLLGDNQIMPKTGFLIIVLVMIAMEGGHAPEEEIWEELSVMEVYDGREHSAYGEPRKLLTQDLVQEKYLEYRQVPDSDPARYEFLWGPRALAETSYVKVLEYVIKVSARVRFFFPSLREAALREEEEGV

SEQ ID NO: 7279 - protein, 620 aa, Homo sapiens
MSEHVEPAAPGPGPNGGGGGPAPARGPRTPNLNPNPLINVRDRLFHALFFKMAVTYSRLFPPAFRRLFEFFVLLKALFVLFVLAYIHIVFSRSPINCLEHVRDKWPREGILRVEVRHNSSRAPVFLQFCDSGGRGSFPGLAVEPGSNLDMEDEEEEELTMEMFGNSSIKFELDIEPKVFKPPSSTEALNDSQEFPFPETPTKVWPQDEYIVEYSLEYGFLRLSQATRQRLSIPVMVVTLDPTRDQCFGDRFSRLLLDEFLGYDDILMSSVKGLAENEENKGFLRNVVSGEHYRFVSMWMARTSYLAAFAIMVIFTLSVSMLLRYSHHQIFVFIVDLLQMLEMNMAIAFPAAPLLTVILALVGMEAIMSEFFNDTTTAFYIILIVWLADQYDAICCHTSTSKRHWLRFFYLYHFAFYAYHYRFNGQYSSLALVTSWLFIQHSMIYFFHHYELPAILQQVRIQEMLLQAPPLGPGTPTALPDDMNNNSGAPATAPDSAGQPPALGPVSPGASGSPGPVAAAPSSLVAAAASVAAAAGGDLGWMAETAAIITDASFLSGLSASLLERRPASPLGPAGGLPHAPQDSVPPSDSAASDTTPLGAAVGGPSPASMAPTEAPSEVGS

SEQ ID NO: 7280 - protein, 544 aa, Homo sapiens
MASSEVARHLLFQSHMATKTTCMSSQGSDDEQIKRENIRSLTMSGHVGFESLPDQLVNRSIQQGFCFNILCVGETGIGKSTLIDTLFNTNFEDYESSHFCPNVKLKAQTYELQESNVQLKLTIVNTVGFGDQINKEESYQPIVDYIDAQFEAYLQEELKIKRSLFTYHDSRIHVCLYFISPTGHSLKTLDLLTMKNLDSKVNIIPVIAKADTVSKTELQKFKIKLMSELVSNGVQIYQFPTDDDTIAKVNAAMNGQLPFAVVGSMDEVKVGNKMVKARQYPWGVVQVENENHCDFVKLREMLICTNMEDLREQTHTRHYELYRRCKLEEMGFTDVGPENKPVSVQETYEAKRHEFHGERQRKEEEMKQMFVQRVKEKEAILKEAERELQAKFEHLKRLHQEERMKLEEKRRLLEEEIIAFSKKKATSEIFHSQSFLATGSNLRKDKDRKKEPGCRFELLCIDVRACETNGGRKDAEKAPIFCKTEVPEHRRSSSQANFIKKKLEVCFDFAVICFITSIFGEQPQLLIFMEKYFQVQGQYISQSE

SEQ ID NO: 7281 - protein, 719 aa, Homo sapiens
MWNLLHETDSAVATARRPRWLCAGALVLAGGFFLLGFLFGWFIKSSNEATNITPKHNMKAFLDELKAENIKKFLYNFTQIPHLAGTEQNFQLAKQIQSQWKEFGLDSVELAHYDVLLSYPNKTHPNYISIINEDGNEIFNTSLFEPPPPGYENVSDIVPPFSAFSPQGMPEGDLVYVNYARTEDFFKLERDMKINCSGKIVIARYGKVFRGNKVKNAQLAGAKGVILYSDPADYFAPGVKSYPDGWNLPGGGVQRGNILNLNGAGDPLTPGYPANEYAYRRGIAEAVGLPSIPVHPIGYYDAQKLLEKMGGSAPPDSSWRGSLKVPYNVGPGFTGNFSTQKVKMHIHSTNEVTRIYNVIGTLRGAVEPDRYVILGGHRDSWVFGGIDPQSGAAVVHEIVRSFGTLKKEGWRPRRTILFASWDAEEFGLLGSTEWAEENSRLLQERGVAYINADSSIEGNYTLRVDCTPLMYSLVHNLTKELKSPDEGFEGKSLYESWTKKSPSPEFSGMPRISKLGSGNDFEVFFQRLGIASGRARYTKNWETNKFSGYPLYHSVYETYELVEKFYDPMFKYHLTVAQVRGGMVFELANSIVLPFDCRDYAVVLRKYADKIYSISMKHPQEMKTYSVSFDSLFSAVKNFTEIASKFSERLQDFDKSKHVIYAPSSHNKYAGESFPGIYDALFDIESKVDPSKAWGEVKRQIYVAAFTVQAAAETLSEVA

SEQ ID NO: 7282 - protein, 272 aa, Homo sapiens
MHLRLISWLFIILNFMEYIGSQNASRGRRQRRMHPNVSQGCQGGCATCSDYNGCLSCKPRLFFALERIGMKQIGVCLSSCPSGYYGTRYPDINKCTKCKADCDTCFNKNFCTKCKSGFYLHLGKCLDNCPEGLEANNHTMECVSIVHCEVSEWNPWSPCTKKGKTCGFKRGTETRVREIIQHPSAKGNLCPPTNETRKCTVQRKKCQKGERGKKGRERKRKKPNKGESKEAIPDSKSLESSKEIPEQRENKQQQKKRKVQDKQKSVSVSTVH

SEQ ID NO: 7283 - protein, 298 aa, Homo sapiens
MFSRAGVAGLSAWTLQPQWIQVRNMATLKDITRRLKSIKNIQKITKSMKMVAAAKYARAERELKPARIYGLGSLALYEKADIKGPEDKKKHLLIGVSSDRGLCGAIHSSIAKQMKSEVATLTAAGKEVMLVGIGDKIRGILYRTHSDQFLVAFKEVGRKPPTFGDASVIALELLNSGYEFDEGSIIFNKFRSVISYKTEEKPIFSLNTVASADSMSIYDDIDADVLQNYQEYNLANIIYYSLKESTTSEQSARMTAMDNASKNASEMIDKLTLTFNRTRQAVITKELIEIISGAAALD

SEQ ID NO: 7284 - protein, 1858 aa, Homo sapiens
MEIDQCLLESLPLGQRQRLVKRMRCEQIKAYYEREKAFQKQEGFLKRLKHAKNPKVHFNLTDMLQDAIIHHNDKEVLRLLKEGADPHTLVSSGGSLLHLCARYDNAFIAEILIDRGVNVNHQDEDFWTPMHIACACDNPDIVLLLVLAGANVLLQDVNGNIPLDYAVEGTESSSILLTYLDENGVDLTSLRQMKLQRPMSMLTDVKHFLSSGGNVNEKNDEGVTLLHMACASGYKEVVSLILEHGGDLNIVDDQYWTPLHLAAKYGQTNLVKLLLMHQANPHLVNCNEEKASDIAASEFIEEMLLKAEIAWEEKMKEPLSASTLAQEEPYEEIIHDLPVLSSKLSPLVLPIAKQDSLLEKDIMFKDATKGLCKQQSQDSIPENPMMSGSTKPEQVKLMPPAPNDDLATLSELNDGSLLYEIQKRFGNNQIYTFIGDILLLVNPYKELPIYSSMVSQLYFSSSGKLCSSLPPHLFSCVERAFHQLFREQRPQCFILSGERGSGKSEASKQIIRHLTCRAGASRATLDSRFKHVVCILEAFGHAKTTLNDLSSCFIKYFELQFCERKQQLTGARIYTYLLEKSRLVSQPLGQSNFLIFYLLMDGLSAEEKYGLHLNNLCAHRYLNQTIQDDASTGERSLNREKLAVLKRALNVVGFSSLEVENLFVILAAILHLGDIRFTALNEGNSAFVSDLQLLEQVAGMLQVSTDELASALTTDIQYFKGDMIIRRHTIQIAEFFRDLLAKSLYSRLFSFLVNTMNSCLHSQDEQKSMQTLDIGILDIFGFEEFQKNEFEQLCVNMTNEKMHHYINEVLFLHEQVECVQEGVTMETAYSPGNQNGVLDFFFQKPSGFLTLLDEESQMIWSVESNFPKKLQSLLESSNTNAVYSPMKDGNGNVALKDHGTAFTIMHYAGRVMYDVVGAIEKNKDSLSQNLLFVMKTSENVVINHLFQSKLSQTGSLVSAYPSFKFRGHKSALLSKKMTASSIIGENKNYLELSKLLKKKGTSTFLQRLERGDPVTIASQLRKSLMDIIGKLQKCTPHFIHCIRPNNSKLPDTFDNFYVSAQLQYIGVLEMVKIFRYGYPVRLSFSDFLSRYKPLADTFLREKKEQSAAERCRLVLQQCKLQGWQMGVRKVFLKYWHADQLNDLCLQLQRKIITCQKVIRGFLARQHLLQRISIRQQEVTSINSFLQNTEDMGLKTYDALVIQNASDIARENDRLRSEMNAPYHKEKLEVRNMQEEGSKRTDDKSGPRHFHPSSMSVCAAVDGLGQCLVGPSIWSPSLHSVFSMDDSSSLPSPRKQPPPKPKRDPNTRLSASYEAVSACLSAAREAANEALARPRPHSDDYSTMKKIPPRKPKRSPNTKLSGSYEEISGSRPGDARPAGAPGAAARVLTPGTPQCALPPAAPPGDEDDSEPVYIEMLGHAARPDSPDPGESVYEEMKCCLPDDGGPGAGSFLLHGASPPLLHRAPEDEAAGPPGDACDIPPPFPNLLPHRPPLLVFPPTPVTCSPASDESPLTPLEVKKLPVLETNLKYPVQPEGSSPLSPQYSKSQKGDGDRPASPGLALFNGSGRASPPSTPPPPPPPPGPPPAPYRPCAHLAFPPEPAPVNAGKAGPSAEAPKVHPKPNSAPVAGPCSSFPKIPYSPVKATRADARKAGSSASPPAPYSPPSSRPLSSPLDELASLFNSGRSVLRKSAAGRKIREAEGFETNMNISSRDDPSTSEITSETQDRNANNHGIQLSNSLSSAITAENGNSISNGLPEEDGYSRLSISGTGTSTFQRHRDSHTTQVIHQLRLSENESVALQELLDWRRKLCEEGQDWQQILHHAEPRVPPPPPCKKPSLLKKPEGASCNRLPSELWDTTI

SEQ ID NO: 7285 - protein, 951 aa, Homo sapiens
MAAAAAAAAAVGVRLRDCCSRGAVLLLFFSLSPRPPAAAAWLLGLRPEDTAGGRVSLEGGTLRAAEGTSFLLRVYFQPGPPATAAPVPSPTLNSGENGTGDWAPRLVFIEEPPGGGGVAPSAVPTRPPGPQRCREQSDWASDVEVLGPLRPGGVAGSALVQVRVRELRKGEAERGGAGGGGKLFSLCAWDGRAWHHHGAAGGFLLRVRPRLYGPGGDLLPPAWLRALGALLLLALSALFSGLRLSLLSLDPVELRVLRNSGSAAEQEQARRVQAVRGRGTHLLCTLLLGQAGANAALAGWLYTSLPPGFGGTGEDYSEEGIHFPWLPALVCTGAVFLGAEICPYSVCSRHGLAIASHSVCLTRLLMAAAFPVCYPLGRLLDWALRQEISTFYTREKLLETLRAADPYSDLVKEELNIIQGALELRTKVVEEVLTPLGDCFMLRSDAVLDFATVSEILRSGYTRIPVYEGDQRHNIVDILFVKDLAFVDPDDCTPLLTVTRFYNRPLHCVFNDTRLDTVLEEFKKGKSHLAIVQRVNNEGEGDPFYEVMGIVTLEDIIEEIIKSEILDETDLYTDNRKKQRVPQRERKRHDFSLFKLSDTEMRVKISPQLLLATHRFMATEVEPFKSLYLSEKILLRLLKHPNVIQELKFDEKNKKAPEHYLYQRNRPVDYFVLLLQGKVEVEVGKEGLRFENGAFTYYGVPAIMTTACSDNDVRKVGSLAGSSVFLNRSPSRCSGLNRSESPNRERSDFGGSNTQLYSSSNNLYMPDYSVHILSDVQFVKITRQQYQNALTACHMDSSPQSPDMEAFTDGDSTKAPTTRGTPQTPKDDPAITLLNNRNSLPCSRSDGLRSPSEVVYLRMEELAFTQEEMTDFEEHSTQQLTLSPAAVPTRAASDSECCNINLDTETSPCSSDFEENVGKKLLRTLSGQKRKRSPEGERTSEDNSNLTPLIT

SEQ ID NO: 7286 - protein, 449 aa, Homo sapiens
MMLGTEGGEGFVVKVRGLPWSCSADEVQRFFSDCKIQNGAQGIRFIYTREGRPSGEAFVELESEDEVKLALKKDRETMGHRYVEVFKSNNVEMDWVLKHTGPNSPDTANDGFVRLRGLPFGCSKEEIVQFFSGLEIVPNGITLPVDFQGRSTGEAFVQFASQEIAEKALKKHKERIGHRYIEIFKSSRAEVRTHYDPPRKLMAMQRPGPYDRPGAGRGYNSIGRGAGFERMRRGAYGGGYGGYDDYNGYNDGYGFGSDRFGRDLNYCFSGMSDHRYGDGGSTFQSTTGHCVHMRGLPYRATENDIYNFFSPLNPVRVHIEIGPDGRVTGEADVEFATHEDAVAAMSKDKANMQHRYVELFLNSTAGASGGAYEHRYVELFLNSTAGASGGAYGSQMMGGMGLSNQSSYGGPASQQLSGGYGGGYGGQSSMSGYDQVLQENSSDFQSNIA

SEQ ID NO: 7287 - protein, 460 aa, Homo sapiens
MAPGRAVAGLLLLAAAGLGGVAEGPGLAFSEDVLSVFGANLSLSAAQLQHLLEQMGAASRVGVPEPGQLHFNQCLTAEEIFSLHGFSNATQITSSKFSVICPAVLQQLNFHPCEDRPKHKTRPSHSEVWGYGFLSVTIINLASLLGLILTPLIKKSYFPKILTFFVGLAIGTLFSNAIFQLIPEAFGFDPKVDSYVEKAVAVFGGFYLLFFFERMLKMLLKTYGQNGHTHFGNDNFGPQEKTHQPKALPAINGVTCYANPAVTEANGHIHFDNVSVVSLQDGKKEPSSCTCLKGPKLSEIGTIAWMITLCDALHNFIDGLAIGASCTLSLLQGLSTSIAILCEEFPHELGDFVILLNAGMSTRQALLFNFLSACSCYVGLAFGILVGNNFAPNIIFALAGGMFLYISLADMFPEMNDMLREKVTGRKTDFTFFMIQNAGMLTGFTAILLITLYAGEIELE

SEQ ID NO: 7288 - protein, 1358 aa, Homo sapiens
MGNQLAGIAPSQILSVESYFSDIHDFEYDKSLGSTRFFKVARAKHREGLVVVKVFAIQDPTLPLTSYKQELEELKIRLNSAQNCLPFQKASEKASEKAAMLFRQYVRDNLYDRISTRPFLNNIEKRWIAFQILTAVDQAHKSGVRHGDIKTENVMVTSWNWVLLTDFASFKPTYLPEDNPADFNYFFDTSRRRTCYIAPERFVDGGMFATELEYMRDPSTPLVDLNSNQRTRGELKRAMDIFSAGCVIAELFTEGVPLFDLSQLLAYRNGHFFPEQVLNKIEDHSIRELVTQMIHREPDKRLEAEDYLKQQRGNAFPEIFYTFLQPYMAQFAKETFLSADERILVIRKDLGNIIHNLCGHDLPEKAEGEPKENGLVILVSVITSCLQTLKYCDSKLAALELILHLAPRLSVEILLDRITPYLLHFSNDSVPRVRAEALRTLTKVLALVKEVPRNDINIYPEYILPGIAHLAQDDATIVRLAYAENIALLAETALRFLELVQLKNLNMENDPNNEEIDEVTHPNGNYDTELQALHEMVQQKVVTLLSDPENIVKQTLMENGITRLCVFFGRQKANDVLLSHMITFLNDKNDWHLRGAFFDSIVGVAAYVGWQSSSILKPLLQQGLSDAEEFVIVKALYALTCMCQLGLLQKPHVYEFASDIAPFLCHPNLWIRYGAVGFITVVARQISTADVYCKLMPYLDPYITQPIIQIERKLVLLSVLKEPVSRSIFDYALRSKDITSLFRHLHMRQKKRNGSLPDCPPPEDPAIAQLLKKLLSQGMTEEEEDKLLALKDFMMKSNKAKANIVDQSHLHDSSQKGVIDLAALGITGRQVDLVKTKQEPDDKRARKHVKQDSNVNEEWKSMFGSLDPPNMPQALPKGSDQEVIQTGKPPRSESSAGICVPLSTSSQVPEVTTVQNKKPVIPVLSSTILPSTYQIRITTCKTELQQLIQQKREQCNAERIAKQMMENAEWESKPPPPGWRPKGLLVAHLHEHKSAVNRIRVSDEHSLFATCSNDGTVKIWNSQKMEGKTTTTRSILTYSRIGGRVKTLTFCQGSHYLAIASDNGAVQLLGIEASKLPKSPKIHPLQSRILDQKEDGCVVDMHHFNSGAQSVLAYATVNGSLVGWDLRSSSNAWTLKHDLKSGLITSFAVDIHQCWLCIGTSSGTMACWDMRFQLPISSHCHPSRARIRRLSMHPLYQSWVIAAVQGNNEVSMWDMETGDRRFTLWASSAPPLSELQPSPHSVHGIYCSPADGNPILLTAGSDMKIRFWDLAYPERSYVVAGSTSSPSVSYYRKIIEGTEVVQEIQNKQKVGPSDDTPRRGPESLPVGHHDIITDVATFQTTQGFIVTASRDGIVKVWK

SEQ ID NO: 7289 - protein, 973 aa, Homo sapiens
MDPFRPSFRGQSPIHPSQCQAVRMPGCWPQASKPLDPALGRGAPAGRGHVFGKPEEPSTQRGPAQRESVGLVSMFRGLGIETVSKTPLKREMLPSGRGILGRGLSANLVRKDREELSPTFWDPKVLAAGDSKMAETSVGWSRTLGRGSSDASLLPLGRAAGGISREVDKPPCTFSTPSRGPPQLSSPPALPQSPLHSPDRPLVLTVEHKEKELIVKQGSKGTPQSLGLNLVKIQCHNEAVYQYHVTFSPNVECKSMRFGMLKDHQAVTGNVTAFDGSILYLPVKLQQVLELKSQRKTDSAEISIKIQMTKILEPCSDLCIPFYNVVFRRVMKLLDMKLVGRNFYDPTSAMVLQQHRLQIWPGYAASIRRTDGGLFLLADVSHKVIRNDCVLDVMHAIYQQNKEHFQDECTKLLVGNIVITRYNNRTYRIDDVDWNKTPKDSFTMSDGKEITFLEYYSKNYGITVKEEDQPLLIHRPSERQDNHGMLLKGEILLLPELSFMTGIPEKMKKDFRAMKDLAQQINLSPKQHHSALECLLQRIAKNEAATNELMRWGLRLQKDVHKIEGRVLPMERINLKNTSFITSQELNWVKEVTRDPSILTIPMHFWALFYPKRAMDQARELVNMLEKIAGPIGMRMSPPAWVELKDDRIETYVRTIQSTLGAEGKIQMVVCIIMGPRDDLYGAIKKLCCVQSPVPSQVVNVRTIGQPTRLRSVAQKILLQINCKLGGELWGVDIPLKQLMVIGMDVYHDPSRGMRSVVGFVASINLTLTKWYSRVVFQMPHQEIVDSLKLCLVGSLKKFYEVNHCLPEKIVVYRDGVSDGQLKTVANYEIPQLQKCFEAFENYQPKMVVFVVQKKISTNLYLAAPQNFVTPTPGTVVDHTITSCEWVDFYLLAHHVRQGCGIPTHYVCVLNTANLSPDHMQRLTFKLCHMYWNWPGTIRVPAPCKYAHKLAFLSGHILHHEPAIQLCENLFFL

SEQ ID NO: 7290 - protein, 335 aa, Homo sapiens
MDHAEENEILAATQRYYVERPIFSHPVLQERLHTKDKVPDSIADKLKQAFTCTPKKIRNIIYMFLPITKWLPAYKFKEYVLGDLVSGISTGVLQLPQGLAFAMLAAVPPIFGLYSSFYPVIMYCFLGTSRHISIGPFAVISLMIGGVAVRLVPDDIVIPGGVNATNGTEARDALRVKVAMSVTLLSGIIQFCLGVCRFGFVAIYLTEPLVRGFTTAAAVHVFTSMLKYLFGVKTKRYSGIFSVVYSTVAVLQNVKNLNVCSLGVGLMVFGLLLGGKEFNERFKEKLPAPIPLEFFAVVMGTGISAGFNLKESYNVDVVGTLPLGFHTEMTRRWRP

SEQ ID NO: 7291 - protein, 1602 aa, Homo sapiens
MGSKRRRATSPSSSVSGDFDDGHHSVSTPGPSRKRRRLSNLPTVDPIAVCHELYNTIRDYKDEQGRLLCELFIRAPKRRNQPDYYEVVSQPIDLMKIQQKLKMEEYDDVNLLTADFQLLFNNAKSYYKPDSPEYKAACKLWDLYLRTRNEFVQKGEADDEDDDEDGQDNQGTVTEGSSPAYLKEILEQLLEAIVVATNPSGRLISELFQKLPSKVQYPDYYAIIKEPIDLKTIAQRIQNGSYKSIHAMAKDIDLLAKNAKTYNEPGSQVFKDANSIKKIFYMKKAEIEHHEMAKSSLRMSNKRAVQGGRLSAITMALQYGSESEEDAALAAARYEEGESEAESITSFMDVSNPFYQLYDTVRSCRNNQGQLIAEPFYHLPSKKKYPDYYQQIKMPISLQQIRTKLKNQEYETLDHLECDLNLMFENAKRYNVPNSAIYKRVLKLQQVMQAKKKELARRDDIEDGDSMISSATSDTGSAKRKSKKNIRKQRMKILFNVVLEAREPGSGRRLCDLFMVKPSKKDYPDYYKIILEPMDLKIIEHNIRNDKYAGEEGMIEDMKLMFRNARHYNEEGSQVYNDAHILEKLLKEKRKELGPLPDDDDMASPKLKLSRKSGISPKKSKYMTPMQQKLNEVYEAVKNYTDKRGRRLSAIFLRLPSRSELPDYYLTIKKPMDMEKIRSHMMANKYQDIDSMVEDFVMMFNNACTYNEPESLIYKDALVLHKVLLETRRDLEGDEDSHVPNVTLLIQELIHNLFVSVMSHQDDEGRCYSDSLAEIPAVDPNFPNKPPLTFDIIRKNVENNRYRRLDLFQEHMFEVLERARRMNRTDSEIYEDAVELQQFFIKIRDELCKNGEILLSPALSYTTKHLHNDVEKERKEKLPKEIEEDKLKREEEKREAEKSEDSSGAAGLSGLHRTYSQDCSFKNSMYHVGDYVYVEPAEANLQPHIVCIERLWEDSAGEKWLYGCWFYRPNETFHLATRKFLEKEVFKSDYYNKVPVSKILGKCVVMFVKEYFKLCPENFRDEDVFVCESRYSAKTKSFKKIKLWTMPISSVRFVPRDVPLPVVRVASVFANADKGDDEKNTDNSEDSRAEDNFNLEKEKEDVPVEMSNGEPGCHYFEQLHYNDMWLKVGDCVFIKSHGLVRPRVGRIEKVWVRDGAAYFYGPIFIHPEETEHEPTKMFYKKEVFLSNLEETCPMTCILGKCAVLSFKDFLSCRPTEIPENDILLCESRYNESDKQMKKFKGLKRFSLSAKVVDDEIYYFRKPIVPQKEPSPLLEKKIQLLEAKFAELEGGDDDIEEMGEEDSEVIEPPSLPQLQTPLASELDLMPYTPPQSTPKSAKGSAKKEGSKRKINMSGYILFSSEMRAVIKAQHPDYSFGELSRLVGTEWRNLETAKKAEYEGMMGGYPPGLPPLQGPVDGLVSMGSMQPLHPGGPPPHHLPPGVPGLPGIPPPGVMNQGVAPMVGTPAPGGSPYGQQVGVLGPPGQQAPPPYPGPHPAGPPVIQQPTTPMFVAPPPKTQRLLHSEAYLKYIEGLSAESNSISKWDQTLAARRRDVHLSKEQESRLPSHWLKSKGAHTTMADALWRLRDLMLRDTLNIRQAYNLENV

SEQ ID NO: 7292 - protein, 588 aa, Homo sapiens
HIRIMKRRVHTHWDVNISFREASCSQDGNLPTLISSVHRSRHLVMPEHQSRCEFQRGSLEIGLRPAGDLLGKRLGRSPRISSDCFSEKRARSESPQEALLLPRELGPSMAPEDHYRRLVSALSEASTFEDPQRLYHLGLPSHDLLRVRQEVAAAALRGPSGLEAHLPSSTAGQRRKQGLAQHREGAAPAAAPSFSERELPQPPPLLSPQNAPHVALGPHLRPPFLGVPSALCQTPGYGFLPPAQAEMFAWQQELLRKQNLARLELPADLLRQKELESARPQLLAPETALRPNDGAEELQRRGALLVLNHGAAPLLALPPQGPPGSGPPTPSRDSARRAPRKGGPGPASARPSESKEMTGARLWAQDGSEDEPPKDSDGEDPETAAVGCRGPTPGQAPAGGAGAEGKGLFPGSTLPLGFPYAVSPYFHTGAVGGLSMDGEEAPAPEDVTKWTVDDVCSFVGGLSGCGEYTRVFREQGIDGETLPLLTEEHLLTNMGLKLGPALKIRAQVARRLGRVFYVASFPVALPLQPPTLRAPERELGTGEQPLSPTTATSPYGGGHALAGQTSPKQENGTLALLPGAPDPSQPLC

SEQ ID NO: 7293 - protein, 1476 aa, Homo sapiens
MEGGKGPRLRDFLSGSLATWALGLAGLVGEAEDSEGEEEEEEEEPPLWLEKRFLRLSDGALLLRVLGIIAPSSRGGPRMLRGLDGPAAWRVWNLNHLWGRLRDFYQEELQLLILSPPPDLQTLGFDPLSEEAVEQLEGVLRLLLGASVQCEHRELFIRHIQGLSLEVQSELAAAIQEVTQPGAGVVLALSGPDPGELAPAELEMLSRSLMGTLSKLARERDLGAQRLAELLLEREPLCLRPEAPSRAPAEGPSHHLALQLANAKAQLRRLRQELEEKAELLLDSQAEVQGLEAEIRRLRQEAQALSGQAKRAELYREEAEALRERAGRLPRLQEELRRCRERLQAAEAYKSQLEEERVLSGVLEASKALLEEQLEAARERCARLHETQRENLLLRTRLGEAHAELDSLRHQVDQLAEENVELELELQRSLEPPPGSPGEAPLAGAAPSLQDEVREAEAGRLRTLERENRELRGLLQVLQGQPGGQHPLLEAPREDPVLPVLEEAPQTPVAFDHSPQGLVQKARDGGPQALDLAPPALDSVLEASAECPQAPDSDPQEAESPLQAAAMDPQASDWSPQESGSPVETQESPEKAGRRSSLQSPASVAPPQGPGTKIQAPQLLGGETEGREAPQGELVPEAWGLRQEGPEHKPGPSEPSSVQLEEQEGPNQGLDLATGQAEAREHDQRLEGTVRDPAWQKPQQKSEGALEVQVWEGPIPGESLASGVAEQEALREEVAQLRRKAEALGDELEAQARKLEAQNTEAARLSKELAQARRAEAEAHREAEAQAWEQARLREAVEAAGQELESASQEREALVEALAAAGRERRQWEREGSRLRAQSEAAEERMQVLESEGRQHLEEAERERREKEALQAELEKAVVRGKELGDRLEHLQRELEQAALERQEFLREKESQHQRYQGLEQRLEAELQAAATSKEEALMELKTRALQLEEELFQLRQGPAGLGPKKRAEPQLVETQNVRLIEVERSNAMLVAEKAALQGQLQHLEGQLGSLQGRAQELLLQSQRAQEHSSRLQAEKSVLEIQGQELHRKLEVLEEEVRAARQSQEETRGQQQALLRDHKALAQLQRRQEAELEGLLVRHRDLKANMRALELAHRELQGRHEQLQAQRASVEAQEVALLAERERLMQDGHRQRGLEEELRRLQSEHDRAQMLLAELSRERGELQGERGELRGRLARLELERAQLEMQSQQLRESNQQLDLSACRLTTQCELLTQLRSAQEEENRQLLAEVQALSRENRELLERSLESRDHLHREQREYLDQLNALRREKQKLVEKIMDQYRVLEPVPLPRTKKGSWLADKVKRLMRPRREGGPPGGLRLGADGAGSTESLGGPPETELPEGREADGTGSPSPAPMRRAQSSLCLRDETLAGGQRRKLSSRFPVGRSSESFSPGDTPRQRFRQRHPGPLGAPVSHSKGPGVGWENSAETLQEHETDANREGPEVQEPEKRPLTPSLSQ

SEQ ID NO: 7294 - protein, 1238 aa, Homo sapiens
MGDAKEAGAEGPPAGAAARGGLSLLSQGESEESSAQGSALFLGGNEVKSRAVVKYSSAPPRTAFARLEEKTDLKLPPANWLRESAKLGPAGTTILGNSKKSKPFSSFGMAYDFIDSVGNDVDVVSDSENIKKLLKIPYSKSHVSMAVHRIGRTLLLDELDIQELFMRSSQTGDWTWLKEFYQRLIDQKWQRKKKSKEHWYQKAILSKFLYYSINGDGAAQPVSSTAEQQESSSSDQTNDSEGASWPAPFEMPSSVSEDPSASSQGSEPLEPSYIVGHVASAPKEQNLITLFNDGEHSQGLKNDFVRNILWTFEDIHMLVGSNMPIFGGGRYPAVSLRLRDNNKPINVLTGIDYWLDNLICNVPELVMCFHVNGIVQKYEMIKTEEIPNLENSNFSTKVIKDIAQNILSFLKSNCTKEGHTYWLFKASGSDIVKLYDLTTLCEETEDKYQNPFTMPVAILLYKVACNMMMKKNQNKKHYGTIRTLLLNCLKLLDKSRHPQIIASANYMLSELFQLDEPKKEENSESPLNENSDESYSEEEEEMPDSDENGSYSTSSDPSDDSKAVAIIKSVGELSVPEKYKSIHQIRPSCAFPVCHDTEERCRLVLSYVLEGLKSVDSSIKKESDLPAADPSTPIPLKYEDESSRGGPEGLEKQMALFLDKMGSLQKGNYSSQSGMIPGSWQHKMKLQLILKSSKAYYVLSDAAMSLQKYGRALRYIKLALQSHDTYCCLCTNMLSEVLLFLSQYLTLCGDIQLMLAQNANNRAAHLEEFHYQTKEDQEILHSLHRESSCQGFAWATDLSTDLESQLSVSCKCYEAANEILQFSDLKSQNPEHYVQVLKRMGNIRNEIGVFYMNQAAALQSERLVSKSVSAAEQQLWKKSFSCFEKGIHNFESIEDATNAALLLCNTGRLMRICAQAHCGAGDELKREFSPEEGLYYNKAIDYYLKALRSLGTRDIHPAVWDSVNWELSTTYFTMATLQQDYAPLSRKAQEQIEKEVSEAMMKSLKYCDVDSVSARQPLCQYRAATIHHRLASMYHSCLRNQVGDEHLRKQHRVLADLHYSKAAKLFQLLKDAPCELLRVQLERVAFAEFQMTSQNSNVGKLKTLSGALDIMVRTEHAFQLIQKELIEEFGQPKSGDAAAAADASPSLNREEVMKLLSIFESRLSFLLLQSIKLLSSTKKKTSNNIEDDTILKTNKHIYSQLLRATANKTATLLERINVIVHLLGQLAAGSAASSNAVQ

SEQ ID NO: 7295 - protein, 1170 aa, Homo sapiens
MKDSCITVMAMALLSGFFFFAPASSYNLDVRGARSFSPPRAGRHFGYRVLQVGNGVIVGAPGEGNSTGSLYQCQSGTGHCLPVTLRGSNYTSKYLGMTLATDPTDGSILACDPGLSRTCDQNTYLSGLCYLFRQNLQGPMLQGRPGFQECIKGNVDLVFLFDGSMSLQPDEFQKILDFMKDVMKKLSNTSYQFAAVQFSTSYKTEFDFSDYVKRKDPDALLKHVKHMLLLTNTFGAINYVATEVFREELGARPDATKVLIIITDGEATDSGNIDAAKDIIRYIIGIGKHFQTKESQETLHKFASKPASEFVKILDTFEKLKDLFTELQKKIYVIEGTSKQDLTSFNMELSSSGISADLSRGHAVVGAVGAKDWAGGFLDLKADLQDDTFIGNEPLTPEVRAGYLGYTVTWLPSRQKTSLLASGAPRYQHMGRVLLFQEPQGGGHWSQVQTIHGTQIGSYFGGELCGVDVDQDGETELLLIGAPLFYGEQRGGRVFIYQRRQLGFEEVSELQGDPGYPLGRFGEAITALTDINGDGLVDVAVGAPLEEQGAVYIFNGRHGGLSPQPSQRIEGTQVLSGIQWFGRSIHGVKDLEGDGLADVAVGAESQMIVLSSRPVVDMVTLMSFSPAEIPVHEVECSYSTSNKMKEGVNITICFQIKSLIPQFQGRLVANLTYTLQLDGHRTRRRGLFPGGRHELRRNIAVTTSMSCTDFSFHFPVCVQDLISPINVSLNFSLWEEEGTPRDQRAQGKDIPPILRPSLHSETWEIPFEKNCGEDKKCEANLRVSFSPARSRALRLTAFASLSVELSLSNLEEDAYWVQLDLHFPPGLSFRKVEMLKPHSQIPVSCEELPEESRLLSRALSCNVSSPIFKAGHSVALQMMFNTLVNSSWGDSVELHANVTCNNEDSDLLEDNSATTIIPILYPINILIQDQEDSTLYVSFTPKGPKIHQVKHMYQVRIQPSIHDHNIPTLEAVVGVPQPPSEGPITHQWSVQMEPPVPCHYEDLERLPDAAEPCLPGALFRCPVVFRQEILVQVIGTLELVGEIEASSMFSLCSSLSISFNSSKHFHLYGSNASLAQVVMKVDVVYEKQMLYLYVLSGIGGLLLLLLIFIVLYKVGFFKRNLKEKMEAGRGVPNGIPAEDSEQLASGQEAGDPGCLKPLHEKDSESGGGKD

SEQ ID NO: 7296 - protein, 2364 aa, Homo sapiens
MTTTVATDYDNIEIQQQYSDVNNRWDVDDWDNENSSARLFERSRIKALADEREAVQKKTFTKWVNSHLARVSCRITDLYTDLRDGRMLIKLLEVLSGERLPKPTKGRMRIHCLENVDKALQFLKEQRVHLENMGSHDIVDGNHRLTLGLIWTIILRFQIQDISVETEDNKEKKSAKDALLLWCQMKTAGYPNVNIHNFTTSWRDGMAFNALIHKHRPDLIDFDKLKKSNAHYNLQNAFNLAEQHLGLTKLLDPEDISVDHPDEKSIITYVVTYYHYFSKMKALAVEGKRIGKVLDNAIETEKMIEKYESLASDLLEWIEQTIIILNNRKFANSLVGVQQQLQAFNTYRTVEKPPKFTEKGNLEVLLFTIQSKMRANNQKVYMPREGKLISDINKAWERLEKAEHERELALRNELIRQEKLEQLARRFDRKAAMRETWLSENQRLVSQDNFGFDLPAVEAATKKHEAIETDIAAYEERVQAVVAVARELEAENYHDIKRITARKDNVIRLWEYLLELLRARRQRLEMNLGLQKIFQEMLYIMDWMDEMKVLVLSQDYGKHLLGVEDLLQKHTLVEADIGIQAERVRGVNASAQKFATDGEGYKPCDPQVIRDRVAHMEFCYQELCQLAAERRARLEESRRLWKFFWEMAEEEGWIREKEKILSSDDYGKDLTSVMRLLSKHRAFEDEMSGRSGHFEQAIKEGEDMIAEEHFGSEKIRERIIYIREQWANLEQLSAIRKKRLEEASLLHQFQADADDIDAWMLDILKIVSSSDVGHDEYSTQSLVKKHKDVAEEIANYRPTLDTLHEQASALPQEHAESPDVRGRLSGIEERYKEVAELTRLRKQALQDTLALYKMFSEADACELWIDEKEQWLNNMQIPEKLEDLEVIQHRFESLEPEMNNQASRVAVVNQIARQLMHSGHPSEKEIKAQQDKLNTRWSQFRELVDRKKDALLSALSIQNYHLECNETKSWIREKTKVIESTQDLGNDLAGVMALQRKLTGMERDLVAIEAKLSDLQKEAEKLESEHPDQAQAILSRLAEISDVWEEMKTTLKNREASLGEASKLQQFLRDLDDFQSWLSRTQTAIASEDMPNTLTEAEKLLTQHENIKNEIDNYEEDYQKMRDMGEMVTQGQTDAQYMFLRQRLQALDTGWNELHKMWENRQNLLSQSHAYQQFLRDTKQAEAFLNNQEYVLAHTEMPTTLEGAEAAIKKQEDFMTTMDANEEKINAVVETGRRLVSDGNINSDRIQEKVDSIDDRHRKNRETASELLMRLKDNRDLQKFLQDCQELSLWINEKMLTAQDMSYDEARNLHSKWLKHQAFMAELASNKEWLDKIEKEGMQLISEKPETEAVVKEKLTGLHKMWEVLESTTQTKAQRLFDANKAELFTQSCADLDKWLHGLESQIQSDDYGKDLTSVNILLKKQQMLENQMEVRKKEIEELQSQAQALSQEGKSTDEVDSKRLTVQTKFMELLEPLNERKHNLLASKEIHQFNRDVEDEILWVGERMPLATSTDHGHNLQTVQLLIKKNQTLQKEIQGHQPRIDDIFERSQNIVTDSSSLSAEAIRQRLADLKQLWGLLIEETEKRHRRLEEAHRAQQYYFDAAEAEAWMSEQELYMMSEEKAKDEQSAVSMLKKHQILEQAVEDYAETVHQLSKTSRALVADSHPESERISMRQSKVDKLYAGLKDLAEERRGKLDERHRLFQLNREVDDLEQWIAEREVVAGSHELGQDYEHVTMLQERFREFARDTGNIGQERVDTVNHLADELINSGHSDAATIAEWKDGLNEAWADLLELIDTRTQILAASYELHKFYHDAKEIFGRIQDKHKKLPEELGRDQNTVETLQRMHTTFEHDIQALGTQVRQLQEDAARLQAAYAGDKADDIQKRENEVLEAWKSLLDACESRRVRLVDTGDKFRFFSMVRDLMLWMEDVIRQIEAQEKPRDVSSVELLMNNHQGIKAEIDARNDSFTTCIELGKSLLARKHYASEEIKEKLLQLTEKRKEMIDKWEDRWEWLRLILEVHQFSRDASVAEAWLLGQEPYLSSREIGQSVDEVEKLIKRHEAFEKSAATWDERFSALERLTTLELLEVRRQQEEEERKRRPPSPEPSTKVSEEAESQQQWDTSKGEQVSQNGLPAEQGSPRMAETVDTSEMVNGATEQRTSSKESSPIPSPTSDRKAKTALPAQSAATLPARTQETPSAQMEGFLNRKHEWEAHNKKASSRSWHNVYCVINNQEMGFYKDAKTAASGIPYHSEVPVSLKEAVCEVALDYKKKKHVFKLRLNDGNEYLFQAKDDEEMNTWIQAISSAISSDKHEVSASTQSTPASSRAQTLPTSVVTITSESSPGKREKDKEKDKEKRFSLFGKKK

SEQ ID NO: 7297 - protein, 1209 aa, Homo sapiens
MFLMNASPVVALQSKWEAFGPPGSCRFPRCFSEADEGVESASVSARVQMLISTLQRDGAARGTSDERAAQRGHRAEGCHDARPAAKPTVHKEPPALAVCGLVADFDPMGEEETTDFGPLVLDSDSDDSVDRDIEEAIQEYLKAKSGAAQPGAGGAQPGAAQPSRAAGGGSRCKPEPAHGSAPTALCPPKLVPGSGGGPGSQVGSSKDQGSASPVSVSSDDSFEQSIRAEIEQFLNEKRQHETQKCDGSVEKKPDTNENSAKSLLKSHQEPPTKVVHRQGLLGVQKEFAFRKPPRLAKMNVQPRSLRSKVTTTQENEGSTKPATPCRPSEAAQNKGGIKRSASAARRGKRVMSAAQASEASDSSSDDGIEEAIQLYQLQKTRKEADGDLPQRVQLREERAPDPPAHSTSSATKSALPETHRKTPSKKKLVATKTMDPGPGGLDTDHAPKLLKETKAPPPASPASRSEFVERSSCRADTSAELMCAEAILDISKTILPAPVEGSDGSLSASPLFYSPNVPSRSDGDSSSVDSDDSIEQEIRTFLALKAQSGSLLARGESCPQAAQGPLLPPGLNSQTGGHKTPLSKTPDPLLGCKRKRRGGGHVRPSTPKKMQEVVKDGSQDADHSQGRAEPGHERRDLPIQGKASEALGGEGTARGPGDTRMSQGQGKTDEARRLDEKESSEDKSSSLDSDEDLDTAIKDLLRSKRKLKKRCREPRAACRKKVRFSTAQTHFLEQLGGLRRDWKDRGPPVLKSCLSKSKRDSGEGPGKKPPSVFGSTAERMRQEGAASQDAALAFRVRRPASASASEGNPFPRESQGPAPSPGSLSDDSSSVDSNDSIELEIRKFLAEKAKESVSSSEVQAEGPTALGTGGPARPEVLCRKEPAPPPGVCTRSQRARGVPHLAEGLRGTESAGAQGTAGLFSQGGKGLPAAPARGDPVPPRSTSGGVSAKGLSVSRRNVYVHKDQSPRGAEPAAKSAFGQLPSCATAGTEAGGARGTFHMGCGSPSFLTPSPGAERDAGAQADRTPPWSDFAHQSRLPSPWVLRSEGRDAVWRGGVGSERDKGSEGPARGLPSLPLAGFSPLLSTQLFHFGKGVSWGGRQAGLFSPHLGLPLQGPSFSAFREAQAGPSPVFGSPHLLAKKDGGPWPTRKAQAGLSLHDRRSSGSEESILDLRYRRRVNRDDQEQDALGSDASDFSDTSTEDSGGSSVVKV

SEQ ID NO: 7298 - protein, 637 aa, Homo sapiens
MSERKEGRGKGKGKKKERGSGKKPESAAGSQSPALPPRLKEMKSQESAAGSKLVLRCETSSEYSSLRFKWFKNGNELNRKNKPQNIKIQKKPGKSELRINKASLADSGEYMCKVISKLGNDSASANITIVESNEIITGMPASTEGAYVSSESPIRISVSTEGANTSSSTSTSTTGTSHLVKCAEKEKTFCVNGGECFMVKDLSNPSRYLCKCPNEFTGDRCQNYVMASFYKAEELYQKRVLTITGICIALLVVGIMCVVAYCKTKKQRKKLHDRLRQSLRSERNNMMNIANGPHHPNPPPENVQLVNQYVSKNVISSEHIVEREAETSFSTSHYTSTAHHSTTVTQTPSHSWSNGHTESILSESHSVIVMSSVENSRHSSPTGGPRGRLNGTGGPRECNSFLRHARETPDSYRDSPHSERYVSAMTTPARMSPVDFHTPSSPKSPPSEMSPPVSSMTVSMPSMAVSPFMEEERPLLLVTPPRLREKKFDHHPQQFSSFHHNPAHDSNSLPASPLRIVEDEEYETTQEYEPAQEPVKKLANSRRAKRTKPNGHIANRLEVDSNTSSQSSNSESETEDERVGEDTPFLGIQNPLAASLEATPAFRLADSRTNPAGRFSTQEEIQARLSSVIANQDPIAV

SEQ ID NO: 7299 - protein, 437 aa, Homo sapiens
MSSILPFTPPVVKRLLGWKKSAGGSGGAGGGEQNGQEEKWCEKAVKSLVKKLKKTGRLDELEKAITTQNCNTKCVTIPRSLDGRLQVSHRKGLPHVIYCRLWRWPDLHSHHELKAIENCEYAFNLKKDEVCVNPYHYQRVETPVLPPVLVPRHTEILTELPPLDDYTHSIPENTNFPAGIEPQSNYIPETPPPGYISEDGETSDQQLNQSMDTGSPAELSPTTLSPVNHSLDLQPVTYSEPAFWCSIAYYELNQRVGETFHASQPSLTVDGFTDPSNSERFCLGLLSNVNRNATVEMTRRHIGRGVRLYYIGGEVFAECLSDSAIFVQSPNCNQRYGWHPATVCKIPPGCNLKIFNNQEFAALLAQSVNQGFEAVYQLTRMCTIRMSFVKGWGAEYRRQTVTSTPCWIELHLNGPLQWLDKVLTQMGSPSVRCSSMS

SEQ ID NO: 7300 - protein, 1250 aa, Homo sapiens
MWLSPEEVLVANALWVTERANPFFVLQRRRGHGRGGGLTGLLVGTLDVVLDSSARVAPYRILHQTQDSQVYWTVACGSSRKEITKHWEWLENNLLQTLSIFDSEEDITTFVKGKIHGIIAEENKNLQPQGDEDPGKFKEAELKMRKQFGMPEGEKLVNYYSCSYWKGRVPRQGWLYLTVNHLCFYSFLLGKEVSLVVQWVDITRLEKNATLLFPESIRVDTRDQELFFSMFLNIGETFKLMEQLANLAMRQLLDSEGFLEDKALPRPIRPHRNISALKRDLDARAKNECYRATFRLPRDERLDGHTSCTLWTPFNKLHIPGQMFISNNYICFASKEEDACHLIIPLREVTIVEKADSSSVLPSPLSISTKSKMTFLFANLKDRDFLVQRISDFLQKTPSKQPGSIGSRKASVVDPSTESSPAPQEGSEQPASPASPLSSRQSFCAQEAPTASQGLLKLFQKNSPMEDLGAKGAKEKMKEESWHIHFFEYGRGVCMYRTAKTRALVLKGIPESLRGELWLLFSGAWNEMVTHPGYYAELVEKSTGKYSLATEEIERDLHRSMPEHPAFQNELGIAALRRVLTAYAFRNPTIGYCQAMNIVTSVLLLYGSEEEAFWLLVALCERMLPDYYNTRVVGALVDQGIFEELTRDFLPQLSEKMQDLGVISSISLSWFLTLFLSVMPFESAVVIVDCFFYEGIKVILQVALAVLDANMEQLLGCSDEGEAMTMLGRYLDNVVNKQSVSPPIPHLRALLSSSDDPPAEVDIFELLKVSYEKFSSLRAEDIEQMRFKQRLKVIQSLEDTAKRSVVRAIPVDIGFSIEELEDLYMVFKAKHLASQYWGCSRTMAGRRDPSLPYLEQYRIDASQFRELFASLTPWACGSHTPLLAGRMFRLLDENKDSLINFKEFVTGMSGMYHGDLTEKLKVLYKLHLPPALSPEEAESALEAAHYFTEDSSSEASPLASDLDLFLPWEAQEALPQEEQEGSGSEERGEEKGTSSPDYRHYLRMWAKEKEAQKETIKDLPKMNQEQFIELCKTLYNMFSEDPMEQDLYHAIATVASLLLRIGEVGKKFSARTGRKPRDCATEEDEPPAPELHQDAARELQPPAAGDPQAKAGGDTHLGKAPQESQVVVEGGSGEGQGSPSQLLSDDETKDDMSMSSYSVVSTGSLQCEDLADDTVLVGGEACSPTARIGGTVDTDWCISFEQILASILTESVLVNFFEKRVDIGLKIKDQKKVERQFSTASDHEQPGVSG

SEQ ID NO: 7301 - protein, 372 aa, Homo sapiens
MSRLLGGTLERVCKAVLLLCLLHFLVAVILYFDVYAQHLAFFSRFSARGPAHALHPAASSSSSSSNCSRPNATASSSGLPEVPSALPGPTAPTLPPCPDSPPGLVGRLLIEFTSPMPLERVQRENPGVLMGGRYTPPDCTPAQTVAVIIPFRHREHHLRYWLHYLHPILRRQRLRYGVYVINQHGEDTFNRAKLLNVGFLEALKEDAAYDCFIFSDVDLVPMDDRNLYRCGDQPRHFAIAMDKFGFRLPYAGYFGGVSGLSKAQFLRINGFPNEYWGWGGEDDDIFNRISLTGMKISRPDIRIGRYRMIKHDRDKHNEPNPQRFTKIQNTKLTMKRDGIGSVRYQVLEVSRQPLFTNITVDIGRPPSWPPRG

SEQ ID NO: 7302 - protein, 773 aa, Homo sapiens
MSRRKQGKPQHLSKREFSPEPLEAILTDDEPDHGPLGAPEGDHDLLTCGQCQMNFPLGDILIFIEHKRKQCNGSLCLEKAVDKPPSPSPIEMKKASNPVEVGIQVTPEDDDCLSTSSRGICPKQEHIADKLLHWRGLSSPRSAHGALIPTPGMSAEYAPQGICKDEPSSYTCTTCKQPFTSAWFLLQHAQNTHGLRIYLESEHGSPLTPRVGIPSGLGAECPSQPPLHGIHIADNNPFNLLRIPGSVSREASGLAEGRFPPTPPLFSPPPRHHLDPHRIERLGAEEMALATHHPSAFDRVLRLNPMAMEPPAMDFSRRLRELAGNTSSPPLSPGRPSPMQRLLQPFQPGSKPPFLATPPLPPLQSAPPPSQPPVKSKSCEFCGKTFKFQSNLVVHRRSHTGEKPYKCNLCDHACTQASKLKRHMKTHMHKSSPMTVKSDDGLSTASSPEPGTSDLVGSASSALKSVVAKFKSENDPNLIPENGDEEEEEDDEEEEEEEEEEEEELTESERVDYGFGLSLEAARHHENSSRGAVVGVGDESRALPDVMQGMVLSSMQHFSEAFHQVLGEKHKRGHLAEAEGHRDTCDEDSVAGESDRIDDGTVNGRGCSPGESASGGLSKKLLLGSPSSLSPFSKRIKLEKEFDLPPAAMPNTENVYSQWLAGYAASRQLKDPFLSFGDSRQSPFASSSEHSSENGSLRFSTPPGELDGGISGRSGTGSGGSTPHISGPGPGRPSSKEGRRSDTCSSHTPIRRSTQRAQDVWQFSDGSSRALKF

SEQ ID NO: 7303 - protein, 2243 aa, Homo sapiens
MFKKLKQKISEEQQQLQQALAPAQASSNSSTPTRMRSRTSSFTEQLDEGTPNRENASTHASKSPDSVNGSEPSIPQSGDTQSFAQKLQLRVPSVESLFRSPIKESLFRSSSKESLVRTSSRESLNRLDLDSSTASFDPPSDMDSEAEDLVGNSDSLNKEQLIQRLRRMERSLSSYRGKYSELVTAYQMLQREKKKLQGILSQSQDKSLRRIAELREELQMDQQAKKHLQEEFDASLEEKDQYISVLQTQVSLLKQRLRNGPMNVDVLKPLPQLEPQAEVFTKEENPESDGEPVVEDGTSVKTLETLQQRVKRQENLLKRCKETIQSHKEQCTLLTSEKEALQEQLDERLQELEKIKDLHMAEKTKLITQLRDAKNLIEQLEQDKGMVIAETKRQMHETLEMKEEEIAQLRSRIKQMTTQGEELREQKEKSERAAFEELEKALSTAQKTEEARRKLKAEMDEQIKTIEKTSEEERISLQQELSRVKQEVVDVMKKSSEEQIAKLQKLHEKELARKEQELTKKLQTREREFQEQMKVALEKSQSEYLKISQEKEQQESLALEELELQKKAILTESENKLRDLQQEAETYRTRILELESSLEKSLQENKNQSKDLAVHLEAEKNKHNKEITVMVEKHKTELESLKHQQDALWTEKLQVLKQQYQTEMEKLREKCEQEKETLLKDKEIIFQAHIEEMNEKTLEKLDVKQTELESLSSELSEVLKARHKLEEELSVLKDQTDKMKQELEAKMDEQKNHHQQQVDSIIKEHEVSIQRTEKALKDQINQLELLLKERDKHLKEHQAHVENLEADIKRSEGELQQASAKLDVFQSYQSATHEQTKAYEEQLAQLQQKLLDLETERILLTKQVAEVEAQKKDVCTELDAHKIQVQDLMQQLEKQNSEMEQKVKSLTQVYESKLEDGNKEQEQTKQILVEKENMILQMREGQKKEIEILTQKLSAKEDSIHILNEEYETKFKNQEKKMEKVKQKAKEMQETLKKKLLDQEAKLKKELENTALELSQKEKQFNAKMLEMAQANSAGISDAVSRLETNQKEQIESLTEVHRRELNDVISIWEKKLNQQAEELQEIHEIQLQEKEQEVAELKQKILLFGCEKEEMNKEITWLKEEGVKQDTTLNELQEQLKQKSAHVNSLAQDETKLKAHLEKLEVDLNKSLKENTFLQEQLVELKMLAEEDKRKVSELTSKLKTTDEEFQSLKSSHEKSNKSLEDKSLEFKKLSEELAIQLDICCKKTEALLEAKTNELINISSSKTNAILSRISHCQHRTTKVKEALLIKTCTVSELEAQLRQLTEEQNTLNISFQQATHQLEEKENQIKSMKADIESLVTEKEALQKEGGNQQQAASEKESCITQLKKELSENINAVTLMKEELKEKKVEISSLSKQLTDLNVQLQNSISLSEKEAAISSLRKQYDEEKCELLDQVQDLSFKVDTLSKEKISALEQVDDWSNKFSEWKKKAQSRFTQHQNTVKELQIQLELKSKEAYEKDEQINLLKEELDQQNKRFDCLKGEMEDDKSKMEKKESNLETELKSQTARIMELEDHITQKTIEIESLNEVLKNYNQQKDIEHKELVQKLQHFQELGEEKDNRVKEAEEKILTLENQVYSMKAELETKKKELEHVNLSVKSKEEELKALEDRLESESAAKLAELKRKAEQKIAAIKKQLLSQMEEKEEQYKKGTESHLSELNTKLQEREREVHILEEKLKSVESSQSETLIVPRSAKNVAAYTEQEEADSQGCVQKTYEEKISVLQRNLTEKEKLLQRVGQEKEETVSSHFEMRCQYQERLIKLEHAEAKQHEDQSMIGHLQEELEEKNKKYSLIVAQHVEKEGGKNNIQAKQNLENVFDDVQKTLQEKELTCQILEQKIKELDSCLVRQKEVHRVEMEELTSKYEKLQALQQMDGRNKPTELLEENTEEKSKSHLVQPKLLSNMEAQHNDLEFKLAGAEREKQKLGKEIVRLQKDLRMLRKEHQQELEILKKEYDQEREEKIKQEQEDLELKHNSTLKQLMREFNTQLAQKEQELEMTIKETINKAQEVEAELLESHQEETNQLLKKIAEKDDDLKRTAKRYEEILDAREEEMTAKVRDLQTQLEELQKKYQQKLEQEENPGNDNTQLAQKTTLISDSKLKEQEFREQIHNLEDRLKKYEKNVYATTVGTPYKGGNLYHTDVSLFGEPTEFEYLRKVLFEYMMGRETKTMAKVITTVLKFPDDQTQKILEREDARLMSWLRSSS

SEQ ID NO: 7304 - protein, 660 aa, Homo sapiens
MISSIVISQMIDENKSRENRASLPLPCAIAQSRAHHAKQSLANRSGVNIHRAFALLPGRLGIPAPSDERGPEAELPPKEERPCGGPRRGFASITITARRVGPPARALVWGTAGDSLCPKCRAEDTLFQAPPALANGAHPGRHQRSFACTEFSRNSSVVRLKVPEAHTGLCERRKYWVTHADDKETSFSPDTPLSGKSPLVFSSCVHLRVSQQCPDSIYYVDKSLSVPIEPPQIASPKMHRSVLSLNLNCSSHRLTADGVDGLVNREPISEALKQELLEGDQDLVGQRWNPGLQESHLKETPSLRRVHLGTGACPWSGSFPLENTELANVGANQVTVRKGEKDHTTHCHASDHANQLSIHIPGWSYRAVHTKVFSGSSKRQQGEVCMTVSAPPVEQKPTRHFLPIGDSSPSDDCLSRDLSEPTERRHQSFLKPRILFPGFLCPLQDVCASLQEDNGVQIESKFPKGDYTCCDLVVKIKECKKSEDPTTPEPSPAAPSPAPRDGAGSPGLSEDCSESQQTPARSLTLQEALEVRKPQFISRSQERLKKLEHMVQQRKAQRKEDLRQKQSLLPIRTSKKQFTIPHPLSDNLFKPKERCISEKEMHMRSKRIYDNLPEVKKKKEEQRKRVILQSNRLRAEVFKKVMASSPAGVMCVVHRCRIST

SEQ ID NO: 7305 - protein, 1091 aa, Homo sapiens
MAAGCLLALTLTLFQSLLIGPSSEEPFPSAVTIKSWVDKMQEDLVTLAKTASGVNQLVDIYEKYQDLYTVEPNNARQLVEIAARDIEKLLSNRSKALVRLALEAEKVQAAHQWREDFASNEVVYYNAKDDLDPEKNDSEPGSQRIKPVFIEDANFGRQISYQHAAVHIPTDIYEGSTIVLNELNWTSALDEVFKKNREEDPSLLWQVFGSATGLARYYPASPWVDNSRTPNKIDLYDVRRRPWYIQGAASPKDMLILVDVSGSVSGLTLKLIRTSVSEMLETLSDDDFVNVASFNSNAQDVSCFQHLVQANVRNKKVLKDAVNNITAKGITDYKKGFSFAFEQLLNYNVSRANCNKIIMLFTDGGEERAQEIFNKYNKDKKVRVFTFSVGQHNYDRGPIQWMACENKGYYYEIPSIGAIRINTQEYLDVLGRPMVLAGDKAKQVQWTNVYLDALELGLVITGTLPVFNITGQFENKTNLKNQLILGVMGVDVSLEDIKRLTPRFTLCPNGYYFAIDPNGYVLLHPNLQPKNPKSQEPVTLDFLDAELENDIKVEIRNKMIDGESGEKTFRTLVKSQDERYIDKGNRTYTWTPVNGTDYSLALVLPTYSFYYIKAKLEETITQARSKKGKMKDSETLKPDNFEESGYTFIAPRDYCNDLKISDNNTEFLLNFNEFIDRKTPNNPSCNADLINRVLLDAGFTNELVQNYWSKQKNIKGVKARFVVTDGGITRVYPKEAGENWQENPETYEDSFYKRSLDNDNYVFTAPYFNKSGPGAYESGIMVSKAVEIYIQGKLLKPAVVGIKIDVNSWIENFTKTSIRDPCAGPVCDCKRNSDVMDCVILDDGGFLLMANHDDYTNQIGRFFGEIDPSLMRHLVNISVYAFNKSYDYQSVCEPGAAPKQGAGHRSAYVPSVADILQIGWWATAAAWSILQQFLLSLTFPRLLEAVEMEDDDFTASLSKQSCITEQTQYFFDNDSKSFSGVLDCGNCSRIFHGEKLMNTNLIFIMVESKGTCPCDTRLLIQAEQTSDGPNPCDMVKQPRYRKGPDVCFDNNVLEDYTDCGGVSGLNPSLWYIIGIQFLLLWLVSGSTHRLL

SEQ ID NO: 7306 - protein, 887 aa, Homo sapiens
MDWQPDEQGLQQVLQLLKDSQSPNTATQRIVQDKLKQLNQFPDFNNYLIFVLTRLKSEDEPTRSLSGLILKNNVKAHYQSFPPPVADFIKQECLNNIGDASSLIRATIGILITTIASKGELQMWPELLPQLCNLLNSEDYNTCEGAFGALQKICEDSSELLDSDALNRPLNIMIPKFLQFFKHCSPKIRSHAIACVNQFIMDRAQALMDNIDTFIEHLFALAVDDDPEVRKNVCRALVMLLEVRIDRLIPHMHSIIQYMLQRTQDHDENVALEACEFWLTLAEQPICKEVLASHLVQLIPILVNGMKYSEIDIILLKGDVEEDEAVPDSEQDIKPRFHKSRTVTLPHEAERPDGSEDAEDDDDDDALSDWNLRKCSAAALDVLANVFREELLPHLLPLLKGLLFHPEWVVKESGILVLGAIAEGCMQGMVPYLPELIPHLIQCLSDKKALVRSIACWTLSRYAHWVVSQPPDMHLKPLMTELLKRILDGNKRVQEAACSAFATLEEEACTELVPYLSYILDTLVFAFGKYQHKNLLILYDAIGTLADSVGHHLNQPEYIQKLMPPLIQKWNELKDEDKDLFPLLECLSSVATALQSGFLPYCEPVYQRCVTLVQKTLAQAMMYTQHPEQYEAPDKDFMIVALDLLSGLAEGLGGHVEQLVARSNIMTLLFQCMQDSMPEVRQSSFALLGDLTKACFIHVKPCIAEFMPILGTNLNPEFISVCNNATWAIGEICMQMGAEMQPYVQMVLNNLVEIINRPNTPKTLLENTAITIGRLGYVCPQEVAPMLQQFIRPWCTSLRNIRDNEEKDSAFRGICMMIGVNPGGVVQDFIFFCDAVASWVSPKDDLRDMFYKILHGFKDQVGEDNWQQFSEQFPPLLKERLAAFYGV

SEQ ID NO: 7307 - protein, 1499 aa, Homo sapiens
MEREPAGTEEPGPPGRRRRREGRTRTVRSNLLPPPGAEDPAAGAAKGERRRRRGCAQHLADNRLKTTKYTLLSFLPKNLFEQFHRPANVYFVFIALLNFVPAVNAFQPGLALAPVLFILAITAFRDLWEDYSRHRSDHKINHLGCLVFSREEKKYVNRFWKEIHVGDFVRLRCNEIFPADILLLSSSDPDGLCHIETANLDGETNLKRRQVVRGFSELVSEFNPLTFTSVIECEKPNNDLSRFRGCIIHDNGKKAGLYKENLLLRGCTLRNTDAVVGIVIYAGHETKALLNNSGPRYKRSKLERQMNCDVLWCVLLLVCMSLFSAVGHGLWIWRYQEKKSLFYVPKSDGSSLSPVTAAVYSFLTMIIVLQVLIPISLYVSIEIVKACQVYFINQDMQLYDEETDSQLQCRALNITEDLGQIQYIFSDKTGTLTENKMVFRRCTVSGVEYSHDANAQRLARYQEADSEEEEVVPRGGSVSQRGSIGSHQSVRVVHRTQSTKSHRRTGSRAEAKRASMLSKHTAFSSPMEKDITPDPKLLEKVSECDKSLAVARHQEHLLAHLSPELSDVFDFFIALTICNTVVVTSPDQPRTKVRVRFELKSPVKTIEDFLRRFTPSCLTSGCSSIGSLAANKSSHKLGSSFPSTPSSDGMLLRLEERLGQPTSAIASNGYSSQADNWASELAQEQESERELRYEAESPDEAALVYAARAYNCVLVERLHDQVSVELPHLGRLTFELLHTLGFDSVRKRMSVVIRHPLTDEINVYTKGADSVVMDLLQPCSSVDARGRHQKKIRSKTQNYLNVYAAEGLRTLCIAKRVLSKEEYACWLQSHLEAESSLENSEELLFQSAIRLETNLHLLGATGIEDRLQDGVPETISKLRQAGLQIWVLTGDKQETAVNIAYACKLLDHDEEVITLNATSQEACAALLDQCLCYVQSRGLQRAPEKTKGKVSMRFSSLCPPSTSTASGRRPSLVIDGRSLAYALEKNLEDKFLFLAKQCRSVLCCRSTPLQKSMVVKLVRSKLKAMTLAIGDGANDVSMIQVADVGVGISGQEGMQAVMASDFAVPKFRYLERLLILHGHWCYSRLANMVLYFFYKNTMFVGLLFWFQFFCGFSASTMIDQWYLIFFNLLFSSLPPLVTGVLDRDVPANVLLTNPQLYKSGQNMEEYRPRTFWFNMADAAFQSLVCFSIPYLAYYDSNVDLFTWGTPIVTIALLTFLLHLGIETKTWTWLNWITCGFSVLLFFTVALIYNASCATCYPPSNPYWTMQALLGDPVFYLTCLMTPVAALLPRLFFRSLQGRVFPTQLQLARQLTRKSPRRCSAPKETFAQGRLPKDSGTEHSSGRTVKTSVPLSQPSWHTQQPVCSLEASGEPSTVDMSMPVREHTLLEGLSAPAPMSSAPGEAVLRSPGGCPEESKVRAASTGRVTPLSSLFSLPTFSLLNWISSWSLVSRLGSVLQFSRTEQLADGQAGRGLPVQPHSGRSGLQGPDHRLLIGASSRRSQ

SEQ ID NO: 7308 - protein, 789 aa, Homo sapiens
MVCPNGYDPGGRHLLLFIIILAAWEAGRGQLHYSVPEEAKHGNFVGRIAQDLGLELAELVPRLFRAVCKFRGDLLEVNLQNGILFVNSRIDREELCGRSAECSIHLEVIVERPLQVFHVDVEVKDINDNPPVFPATQRNLFIAESRPLDSRFPLEGASDADIGENALLTYRLSPNEYFFLDVPTSNQQVKPLGLVLRKLLDREETPELHLLLTATDGGKPELTGTVQLLITVLDNNDNAPVFDRTLYTVKLPENVSIGTLVIHPNASDLDEGLNGDIIYSFSSDVSPDIKSKFHMDPLSGAITVIGHMDFEESRAHKIPVEAVDKGFPPLAGHCTVLVEVVDVNDNAPQLTLTSLSLPIPEDAQPGTVITLISVFDRDFGVNGQVTCSLTPRVPFKLVSTFKNYYSLVLDSALDRESVSAYELVVTARDGGSPSLWATASVSVEVADVNDNAPAFAQPEYTVFVKENNPPGCHIFTVSAGDADAQKNALVSYSLVELRVGERALSSYVSVHAESGKVYALQPLDHEELELLQFQVSARDAGVPPLGSNVTLQVFVLDENDNAPALLAPRVGGTGGAVRELVPRSVGAGHVVAKVRAVDADSGYNAWLSYELQPVAAGASIPFRVGLYTGEISTTRALDETDAPRHRLLVLVKDHGEPSLTATATVLVSLVESGQAPKASSRASLGIAGPETELVDVNVYLIIAICAVSSLLVLTLLLYTALRCSAPSSEGACSLVKPTLVCSSAVGSWSFSQQRRQRVCSGEGPPKTDLMAFSPSLPQGPSSTDNVSHK

SEQ ID NO: 7309 - protein, 855 aa, Homo sapiens
MSAPSEEEEYARLVMEAQPEWLRAEVKRLSHELAETTREKIQAAEYGLAVLEEKHQLKLQFEELEVDYEAIRSEMEQLKEAFGQAHTNHKKVAADGESREESLIQESASKEQYYVRKVLELQTELKQLRNVLTNTQSENERLASVAQELKEINQNVEIQRGRLRDDIKEYKFREARLLQDYSELEEENISLQKQVSVLRQNQVEFEGLKHEIKRLEEETEYLNSQLEDAIRLKEISERQLEEALETLKTEREQKNSLRKELSHYMSINDSFYTSHLHVSLDGLKFSDDAAEPNNDAEALVNGFEHGGLAKLPLDNKTSTPKKEGLAPPSPSLVSDLLSELNISEIQKLKQQLMQMEREKAGLLATLQDTQKQLEHTRGSLSEQQEKVTRLTENLSALRRLQASKERQTALDNEKDRDSHEDGDYYEVDINGPEILACKYHVAVAEAGELREQLKALRSTHEAREAQHAEEKGRYEAEGQALTEKVSLLEKASRQDRELLARLEKELKKVSDVAGETQGSLSVAQDELVTFSEELANLYHHVCMCNNETPNRVMLDYYREGQGGAGRTSPGGRTSPEARGRRSPILLPKGLLAPEAGRADGGTGDSSPSPGSSLPSPLSDPRREPMNIYNLIAIIRDQIKHLQAAVDRTTELSRQRIASQELGPAVDKDKEALMEEILKLKSLLSTKREQITTLRTVLKANKQTAEVALANLKSKYENEKAMVTETMMKLRNELKALKEDAATFSSLRAMFATRCDEYITQLDEMQRQLAAAEDEKKTLNSLLRMAIQQKLALTQRLELLELDHEQTRRGRAKAAPKTKPATPSVSHTCACASDRAEGTGLANQVFCSEKHSIYCD

SEQ ID NO: 7310 - protein, 563 aa, Homo sapiens
MNPLFGPNLFLLQQEQQGLAGPLGDSLGGDHFAGGGDLPPAPLSPAGPAAYSPPGPGPAPPAAMALRNDLGSNINVLKTLNLRFRCFLAKVHELERRNRLLEKQLQQALEEGKQGRRGLGRRDQAVQTGFVSPIRPLGLQLGARPAAVCSPSARVLGSPARSPAGPLAPSAASLSSSSTSTSTTYSSSARFMPGTIWSFSHARRLGPGLEPTLVQGPGLSWVHPDGVGVQIDTITPEIRALYNVLAKVKRERDEYKRRWEEEYTVRIQLQDRVNELQEEAQEADACQEELALKVEQLKAELVVFKGLMSNNLSELDTKIQEKAMKVDMDICRRIDITAKLCDVAQQRNCEDMIQMFQKKLVPSMGGRKRERKAAVEEDTSLSESEGPRQPDGDEEESTALSINEEMQRMLNQLREYDFEDDCDSLTWEETEETLLLWEDFSGYAMAAAEAQGEQQEDSLEKVIKDTESLFKTREKEYQETIDQIELELATAKNDMNRHLHEYMEMCSMKRGLDVQMETCRRLITQSGDRKSPAFTAVPLSDPPPPPSEAEDSDRDVSSDSSMR

SEQ ID NO: 7311 - protein, 470 aa, Homo sapiens
MLKFQEAAKCVSGSTAISTYPKTLIARRYVLQQKLGSGSFGTVYLVSDKKAKRGEELKVLKEISVGELNPNETVQANLEAQLLSKLDHPAIVKFHASFVEQDNFCIITEYCEGRDLDDKIQEYKQAGKIFPENQIIEWFIQLLLGVDYMHERRILHRDLKSKNVFLKNNLLKIGDFGVSRLLMGSCDLATTLTGTPHYMSPEALKHQGYDTKSDIWSLACILYEMCCMNHAFAGSNFLSIVLKIVEGDTPSLPERYPKELNAIMESMLNKNPSLRPSAIEILKIPYLDEQLQNLMCRYSEMTLEDKNLDCQKEAAHIINAMQKRIHLQTLRALSEVQKMTPRERMRLRKLQAADEKARKLKKIVEEKYEENSKRMQELRSRNFQQLSVDVLHEKTHLKGMEEKEEQPEGRLSCSPQDEDEERWQGREEESDEPTLENLPESQPIPSMDLHELESIVEDATSDLGYHATHS

SEQ ID NO: 7312 - protein, 921 aa, Homo sapiens
MAWLRLQPLTSAFLHFGLVTFVLFLNGLRAEAGGSGDVPSTGQNNESCSGSSDCKEGVILPIWYPENPSLGDKIARVIVYFVALIYMFLGVSIIADRFMASIEVITSQEREVTIKKPNGETSTTTIRVWNETVSNLTLMALGSSAPEILLSLIEVCGHGFIAGDLGPSTIVGSAAFNMFIIIGICVYVIPDGETRKIKHLRVFFITAAWSIFAYIWLYMILAVFSPGVVQVWEGLLTLFFFPVCVLLAWVADKRLLFYKYMHKKYRTDKHRGIIIETEGDHPKGIEMDGKMMNSHFLDGNLVPLEGKEVDESRREMIRILKDLKQKHPEKDLDQLVEMANYYALSHQQKSRAFYRIQATRMMTGAGNILKKHAAEQAKKASSMSEVHTDEPEDFISKVFFDPCSYQCLENCGAVLLTVVRKGGDMSKTMYVDYKTEDGSANAGADYEFTEGTVVLKPGETQKEFSVGIIDDDIFEEDEHFFVRLSNVRIEEEQPEEGMPPAIFNSLPLPRAVLASPCVATVTILDDDHAGIFTFECDTIHVSESIGVMEVKVLRTSGARGTVIVPFRTVEGTAKGGGEDFEDTYGELEFKNDETVKTIRVKIVDEEEYERQENFFIALGEPKWMERGISDVTDRKLTMEEEEAKRIAEMGKPVLGEHPKLEVIIEESYEFKTTVDKLIKKTNLALVVGTHSWRDQFMEAITVSAAGDEDEDESGEERLPSCFDYVMHFLTVFWKVLFACVPPTEYCHGWACFAVSILIIGMLTAIIGDLASHFGCTIGLKDSVTAVVFVAFGTSVPDTFASKAAALQDVYADASIGNVTGSNAVNVFLGIGLAWSVAAIYWALQGQEFHVSAGTLAFSVTLFTIFAFVCISVLLYRRRPHLGGELGGPRGCKLATTWLFVSLWLLYILFATLEAYCYIKGF

SEQ ID NO: 7313 - protein, 911 aa, Homo sapiens
MAASQTSQTVASHVPFADLCSTLERIQKSKGRAEKIRHFREFLDSWRKFHDALHKNHKDVTDSFYPAMRLILPQLERERMAYGIKETMLAKLYIELLNLPRDGKDALKLLNYRTPTGTHGDAGDFAMIAYFVLKPRCLQKGSLTIQQVNDLLDSIASNNSAKRKDLIKKSLLQLITQSSALEQKWLIRMIIKDLKLGVSQQTIFSVFHNDAAELHNVTTDLEKVCRQLHDPSVGLSDISITLFSAFKPMLAAIADIEHIEKDMKHQSFYIETKLDGERMQMHKDGDVYKYFSRNGYNYTDQFGASPTEGSLTPFIHNAFKADIQICILDGEMMAYNPNTQTFMQKGTKFDIKRMVEDSDLQTCYCVFDVLMVNNKKLGHETLRKRYEILSSIFTPIPGRIEIVQKTQAHTKNEVIDALNEAIDKREEGIMVKQPLSIYKPDKRGEGWLKIKPEYVSGLMDELDILIVGGYWGKGSRGGMMSHFLCAVAEKPPPGEKPSVFHTLSRVGSGCTMKELYDLGLKLAKYWKPFHRKAPPSSILCGTEKPEVYIEPCNSVIVQIKAAEIVPSDMYKTGCTLRFPRIEKIRDDKEWHECMTLDDLEQLRGKASGKLASKHLYIGGDDEPQEKKRKAAPKMKKVIGIIEHLKAPNLTNVNKISNIFEDVEFCVMSGTDSQPKPDLENRIAEFGGYIVQNPGPDTYCVIAGSENIRVKNIILSNKHDVVKPAWLLECFKTKSFVPWQPRFMIHMCPSTKEHFAREYDCYGDSYFIDTDLNQLKEVFSGIKNSNEQTPEEMASLIADLEYRYSWDCSPLSMFRRHTVYLDSYAVINDLSTKNEGTRLAIKALELRFHGAKVVSCLAEGVSHVIIGEDHSRVADFKAFRRTFKRKFKILKESWVTDSIDKCELQEENQYLI

SEQ ID NO: 7314 - protein, 863 aa, Homo sapiens
MRLALLWALGLLGAGSPLPSWPLPNIGGTEEQQAESEKAPREPLEPQVLQDDLPISLKKVLQTSLPEPLRIKLELDGDSHILELLQNRELVPGRPTLVWYQPDGTRVVSEGHTLENCCYQGRVRGYAGSWVSICTCSGLRGLVVLTPERSYTLEQGPGDLQGPPIISRIQDLHLPGHTCALSWRESVHTQKPPEHPLGQRHIRRRRDVVTETKTVELVIVADHSEAQKYRDFQHLLNRTLEVALLLDTFFRPLNVRVALVGLEAWTQRDLVEISPNPAVTLENFLHWRRAHLLPRLPHDSAQLVTGTSFSGPTVGMAIQNSICSPDFSGGVNMDHSTSILGVASSIAHELGHSLGLDHDLPGNSCPCPGPAPAKTCIMEASTDFLPGLNFSNCSRRALEKALLDGMGSCLFERLPSLPPMAAFCGNMFVEPGEQCDCGFLDDCVDPCCDSLTCQLRPGAQCASDGPCCQNCQLRPSGWQCRPTRGDCDLPEFCPGDSSQCPPDVSLGDGEPCAGGQAVCMHGRCASYAQQCQSLWGPGAQPAAPLCLQTANTRGNAFGSCGRNPSGSYVSCTPRDAICGQLQCQTGRTQPLLGSIRDLLWETIDVNGTELNCSWVHLDLGSDVAQPLLTLPGTACGPGLVCIDHRCQRVDLLGAQECRSKCHGHGVCDSNRHCYCEEGWAPPDCTTQLKATSSLTTGLLLSLLVLLVLVMLGASYWYRARLHQRLCQLKGPTCQYRAAQSGPSERPGPPQRALLARGTKQASALSFPAPPSRPLPPDPVSKRLQAELADRPNPPTRPLPADPVVRSPKSQGPAKPPPPRKPLPADPQGRCPSGDLPGPGAGIPPLVVPSRPAPPPPTVSSLYL

SEQ ID NO: 7315 - protein, 2491 aa, Homo sapiens
MGAAAGRSPHLGPAPARRPQRSLLLLQLLLLVAAPGSTQAQAAPFPELCSYTWEAVDTKNNVLYKINICGSVDIVQCGPSSAVCMHDLKTRTYHSVGDSVLRSATRSLLEFNTTVSCDQQGTNHRVQSSIAFLCGKTLGTPEFVTATECVHYFEWRTTAACKKDIFKANKEVPCYVFDEELRKHDLNPLIKLSGAYLVDDSDPDTSLFINVCRDIDTLRDPGSQLRACPPGTAACLVRGHQAFDVGQPRDGLKLVRKDRLVLSYVREEAGKLDFCDGHSPAVTITFVCPSERREGTIPKLTAKSNCRYEIEWITEYACHRDYLESKTCSLSGEQQDVSIDLTPLAQSGGSSYISDGKEYLFYLNVCGETEIQFCNKKQAAVCQVKKSDTSQVKAAGRYHNQTLRYSDGDLTLIYFGGDECSSGFQRMSVINFECNKTAGNDGKGTPVFTGEVDCTYFFTWDTEYACVKEKEDLLCGATDGKKRYDLSALVRHAEPEQNWEAVDGSQTETEKKHFFINICHRVLQEGKARGCPEDAAVCAVDKNGSKNLGKFISSPMKEKGNIQLSYSDGDDCGHGKKIKTNITLVCKPGDLESAPVLRTSGEGGCFYEFEWHTAAACVLSKTEGENCTVFDSQAGFSFDLSPLTKKNGAYKVETKKYDFYINVCGPVSVSPCQPDSGACQVAKSDEKTWNLGLSNAKLSYYDGMIQLNYRGGTPYNNERHTPRATLITFLCDRDAGVGFPEYQEEDNSTYNFRWYTSYACPEEPLECVVTDPSTLEQYDLSSLAKSEGGLGGNWYAMDNSGEHVTWRKYYINVCRPLNPVPGCNRYASACQMKYEKDQGSFTEVVSISNLGMAKTGPVVEDSGSLLLEYVNGSACTTSDGRQTTYTTRIHLVCSRGRLNSHPIFSLNWECVVSFLWNTEAACPIQTTTDTDQACSIRDPNSGFVFNLNPLNSSQGYNVSGIGKIFMFNVCGTMPVCGTILGKPASGCEAETQTEELKNWKPARPVGIEKSLQLSTEGFITLTYKGPLSAKGTADAFIVRFVCNDDVYSGPLKFLHQDIDSGQGIRNTYFEFETALACVPSPVDCQVTDLAGNEYDLTGLSTVRKPWTAVDTSVDGRKRTFYLSVCNPLPYIPGCQGSAVGSCLVSEGNSWNLGVVQMSPQAAANGSLSIMYVNGDKCGNQRFSTRITFECAQISGSPAFQLQDGCEYVFIWRTVEACPVVRVEGDNCEVKDPRHGNLYDLKPLGLNDTIVSAGEYTYYFRVCGKLSSDVCPTSDKSKVVSSCQEKREPQGFHKVAGLLTQKLTYENGLLKMNFTGGDTCHKVYQRSTAIFFYCDRGTQRPVFLKETSDCSYLFEWRTQYACPPFDLTECSFKDGAGNSFDLSSLSRYSDNWEAITGTGDPEHYLINVCKSLAPQAGTEPCPPEAAACLLGGSKPVNLGRVRDGPQWRDGIIVLKYVDGDLCPDGIRKKSTTIRFTCSESQVNSRPMFISAVEDCEYTFAWPTATACPMKSNEHDDCQVTNPSTGHLFDLSSLSGRAGFTAAYSEKGLVYMSICGENENCPPGVGACFGQTRISVGKANKRLRYVDQVLQLVYKDGSPCPSKSGLSYKSVISFVCRPEARPTNRPMLISLDKQTCTLFFSWHTPLACEQATECSVRNGSSIVDLSPLIHRTGGYEAYDESEDDASDTNPDFYINICQPLNPMHGVPCPAGAAVCKVPIDGPPIDIGRVAGPPILNPIANEIYLNFESSTPCLADKHFNYTSLIAFHCKRGVSMGTPKLLRTSECDFVFEWETPVVCPDEVRMDGCTLTDEQLLYSFNLSSLSTSTFKVTRDSRTYSVGVCTFAVGPEQGGCKDGGVCLLSGTKGASFGRLQSMKLDYRHQDEAVVLSYVNGDRCPPETDDGVPCVFPFIFNGKSYEECIIESRAKLWCSTTADYDRDHEWGFCRHSNSYRTSSIIFKCDEDEDIGRPQVFSEVRGCDVTFEWKTKVVCPPKKLECKFVQKHKTYDLRLLSSLTGSWSLVHNGVSYYINLCQKIYKGPLGCSERASICRRTTTGDVQVLGLVHTQKLGVIGDKVVVTYSKGYPCGGNKTASSVIELTCTKTVGRPAFKRFDIDSCTYYFSWDSRAACAVKPQEVQMVNGTITNPINGKSFSLGDIYFKLFRASGDMRTNGDNYLYEIQLSSITSSRNPACSGANICQVKPNDQHFSRKVGTSDKTKYYLQDGDLDVVFASSSKCGKDKTKSVSSTIFFHCDPLVEDGIPEFSHETADCQYLFSWYTSAVCPLGVGFDSENPGDDGQMHKGLSERSQAVGAVLSLLLVALTCCLLALLLYKKERRETVISKLTTCCRRSSNVSYKYSKVNKEEETDENETEWLMEEIQLPPPRQGKEGQENGHITTKSVKALSSLHGDDQDSEDEVLTIPEVKVHSGRGAGAESSHPVRNAQSNALQEREDDRVGLVRGEKARKGKSSSAQQKTVSSTKLVSFHDDSDEDLLHI

SEQ ID NO: 7316 - protein, 714 aa, Homo sapiens
MLETYSHLLSVGYQVPEAEVVMLEQGKEPWALQGERPRQSCPGEKLWDHNQCRKILSYKQVSSQPQKMYPGEKAYECAKFEKIFTQKSQLKVHLKVLAGEKLYVCIECGKAFVQKPEFIIHQKTHMREKPFKCNECGKSFFQVSSLFRHQRIHTGEKLYECSQCGKGFSYNSDLSIHEKIHTGERHHECTDCGKAFTQKSTLKMHQKIHTGERSYICIECGQAFIQKTHLIAHRRIHTGEKPYECSNCGKSFISKSQLQVHQRVHTRVKPYICTEYGKVFSNNSNLVTHKKVQSREKSSICTECGKAFTYRSELIIHQRIHTGEKPYECSDCGKAFTQKSALTVHQRIHTGEKSYICMKCGLAFIQKAHLIAHQIIHTGEKPHKCGHCGKLFTSKSQLHVHKRIHTGEKPYMCNKCGKAFTNRSNLITHQKTHTGEKSYICSKCGKAFTQRSDLITHQRIHTGEKPYECNTCGKAFTQKSHLNIHQKIHTGERQYECHECGKAFNQKSILIVHQKIHTGEKPYVCTECGRAFIRKSNFITHQRIHTGEKPYECSDCGKSFTSKSQLLVHQPVHTGEKPYVCAECGKAFSGRSNLSKHQKTHTGEKPYICSECGKTFRQKSELITHHRIHTGEKPYECSDCGKSFTKKSQLQVHQRIHTGEKPYVCAECGKAFTDRSNLNKHQTTHTGDKPYKCGICGKGFVQKSVFSVHQSSHA

SEQ ID NO: 7317 - protein, 551 aa, Homo sapiens
MLCSLLLCECLLLVAGYAHDDDWIDPTDMLNYDAASGTMRKSQAKYGISGEKDVSPDLSCADEISECYHKLDSLTYKIDECEKKKREDYESQSNPVFRRYLNKILIEAGKLGLPDENKGDMHYDAEIILKRETLLEIQKFLNGEDWKPGALDDALSDILINFKFHDFETWKWRFEDSFGVDPYNVLMVLLCLLCIVVLVATELWTYVRWYTQLRRVLIISFLFSLGWNWMYLYKLAFAQHQAEVAKMEPLNNVCAKKMDWTGSIWEWFRSSWTYKDDPCQKYYELLLVNPIWLVPPTKALAVTFTTFVTEPLKHIGKGTGEFIKALMKEIPALLHLPVLIIMALAILSFCYGAGKSVHVLRHIGGPESEPPQALRPRDRRRQEEIDYRPDGGAGDADFHYRGQMGPTEQGPYAKTYEGRREILRERDVDLRFQTGNKSPEVLRAFDVPDAEAREHPTVVPSHKSPVLDTKPKETGGILGEGTPKESSTESSQSAKPVSGQDTSGNTEGSPAAEKAQLKSEAAGSPDQGSTYSPARGVAGPRGQDPVSSPCG

SEQ ID NO: 7318 - protein, 1655 aa, Homo sapiens
MLKCIPLWRCNRHVESVDKRHCSLQAVPEEIYRYSRSLEELLLDANQLRELPKPFFRLLNLRKLGLSDNEIQRLPPEVANFMQLVELDVSRNDIPEIPESIKFCKALEIADFSGNPLSRLPDGFTQLRSLAHLALNDVSLQALPGDVGNLANLVTLELRENLLKSLPASLSFLVKLEQLDLGGNDLEVLPDTLGALPNLRELWLDRNQLSALPPELGNLRRLVCLDVSENRLEELPAELGGLVLLTDLLLSQNLLRRLPDGIGQLKQLSILKVDQNRLCEVTEAIGDCENLSELILTENLLMALPRSLGKLTKLTNLNVDRNHLEALPPEIGGCVALSVLSLRDNRLAVLPPELAHTTELHVLDVAGNRLQSLPFALTHLNLKALWLAENQAQPMLRFQTEDDARTGEKVLTCYLLPQQPPPSLEDAGQQGSLSETWSDAPPSRVSVIQFLEAPIGDEDAEEAAAEKRGLQRRATPHPSELKVMKRSIEGRRSEACPCQPDSGSPLPAEEEKRLSAESGLSEDSRPSASTVSEAEPEGPSAEAQGGSQQEATTAGGEEDAEEDYQEPTVHFAEDALLPGDDREIEEGQPEAPWTLPGGRQRLIRKDTPHYKKHFKISKLPQPEAVVALLQGMQPDGEGPVAPGGWHNGPHAPWAPRAQKEEEEEEEGSPQEEEEEEEEENRAEEEEASTEEEDKEGAVVSAPSVKGVSFDQANNLLIEPARIEEEELTLTILRQTGGLGISIAGGKGSTPYKGDDEGIFISRVSEEGPAARAGVRVGDKLLEVNGVALQGAEHHEAVEALRGAGTAVQMRVWRERMVEPENAVTITPLRPEDDYSPRERRGGGLRLPLLPPESPGPLRQRHVACLARSERGLGFSIAGGKGSTPYRAGDAGIFVSRIAEGGAAHRAGTLQVGDRVLSINGVDVTEARHDHAVSLLTAASPTIALLLEREAGGPLPPSPLPHSSPPTAAVATTSITTATPGVPGLPSLAPSLLAAALEGPYPVEEIRLPRAGGPLGLSIVGGSDHSSHPFGVQEPGVFISKVLPRGLAARSGLRVGDRILAVNGQDVRDATHQEAVSALLRPCLELSLLVRRDPAPPGLRELCIQKAPGERLGISIRGGARGHAGNPRDPTDEGIFISKVSPTGAAGRDGRLRVGLRLLEVNQQSLLGLTHGEAVQLLRSVGDTLTVLVCDGFEASTDAALEVSPGVIANPFAAGIGHRNSLESISSIDRELSPEGPGKEKELPGQTLHWGPEATEAAGRGLQPLKLDYRALAAVPSAGSVQRVPSGAAGGKMAESPCSPSGQQPPSPPSPDELPANVKQAYRAFAAVPTSHPPEDAPAQPPTPGPAASPEQLSFRERQKYFELEVRVPQAEGPPKRVSLVGADDLRKMQEEEARKLQQKRAQMLREAAEAGAEARLALDGETLGEEEQEDEQPPWASPSPTSRQSPASPPPLGGGAPVRTAKAERRHQERLRVQSPEPPAPERALSPAELRALEAEKRALWRAARMKSLEQDALRAQMVLSRSQEGRGTRGPLERLAEAPSPAPTPSPTPVEDLGPQTSTSPGRLPLSGKKFDYRAFAALPSSRPVYDIQSPDFAEELRSLEPSPSPGPQEEDGEVALVLLGRPSPGAVGPEDVALCSSRRPVRPGRRGLGPVPS

SEQ ID NO: 7319 - protein, 659 aa, Homo sapiens
MPGPPRSLEMGLLTFRDVAIEFSLEEWQHLDIAQQNLYRNVMLENYRNLAFLGIAVSKPDLITCLEQGKEPWNMKRHEMVDEPPGMCPHFAQDLWPEQGMEDSFQKAILRRYGKYGHENLQLRKGCKSVDEYKVNKEGYNGLNQCFTTAQSKVFQCDKYLKVFYKFLNSNRPKIRHTEKKSFKCKKRVKLFCMLSHKTQHKSIYHREKSYKCKECGKTFNWSSTLTNHRKIYTEEKPYKCEEYNKSPKQLSTLTTHEIIHAGEKLYKCEECGEAFNRSSNLTTHKIIHTGEKPYKCEECGKAFIWSSTLTEHKKIHTRKKPYKCEECGKAFIWSSTLTRHKRMHTGEKPYKCEECGKAFSQSSTLTTHKIIHTGEKRYKCLECGKAFKQLSTLTTHKIIHVGEKLYKCEECGKGFNRSSNLTTHKIIHTGEKPYKCEECGKAFIWSSTLTKHKRIHTREKPYKCEECGKAFIWSSTLTRHKRMHTGEKPYKCEECGKSFSQSSTLTTHKIIHTGEKPYKCEECGKAFNWSSTLTKHKIIHTEEKPYKCEKCGKAFKQSSILTNHKRIHTGEKPYKCEECGKSFNRSSTFTKHKVIHTGVKPYKCEECGKAFFWSSTLTKHKRIHTGEQPYKWEKFGKAFNRSSHLTTDKITHWREILQV

SEQ ID NO: 7320 - protein, 1902 aa, Homo sapiens
MASGLGSPSPCSAGSEEEDMDALLNNSLPPPHPENEEDPEEDLSETETPKLKKKKKPKKPRDPKIPKSKRQKKERMLLCRQLGDSSGEGPEFVEEEEEVALRSDSEGSDYTPGKKKKKKLGPKKEKKSKSKRKEEEEEEDDDDDSKEPKSSAQLLEDWGMEDIDHVFSEEDYRTLTNYKAFSQFVRPLIAAKNPKIAVSKMMMVLGAKWREFSTNNPFKGSSGASVAAAAAAAVAVVESMVTATEVAPPPPPVEVPIRKAKTKEGKGPNARRKPKGSPRVPDAKKPKPKKVAPLKIKLGGFGSKRKRSSSEDDDLDVESDFDDASINSYSVSDGSTSRSSRSRKKLRTTKKKKKDHQDYCEVCQQGGEIILCDTCPRAYHMVCLDPDMEKAPEGKWSCPHCEKEGIQWEAKEDNSEGEEILEEVGGDLEEEDDHHMEFCRVCKDGGELLCCDTCPSSYHIHCLNPPLPEIPNGEWLCPRCTCPALKGKVQKILIWKWGQPPSPTPVPRPPDADPNTPSPKPLEGRPERQFFVKWQGMSYWHCSWVSELQLELHCQVMFRNYQRKNDMDEPPSGDFGGDEEKSRKRKNKDPKFAEMEERFYRYGIKPEWMMIHRILNHSVDKKGHVHYLIKWRDLPYDQASWESEDVEIQDYDLFKQSYWNHRELMRGEEGRPGKKLKKVKLRKLERPPETPTVDPTVKYERQPEYLDATGGTLHPYQMEGLNWLRFSWAQGTDTILADEMGLGKTVQTAVFLYSLYKEGHSKGPFLVSAPLSTIINWEREFEMWAPDMYVVTYVGDKDSRAIIRENEFSFEDNAIRGGKKASRMKKEASVKFHVLLTSYELITIDMAILGSIDWACLIVDEAHRLKNNQSKFFRVLNGYSLQHKLLLTGTPLQNNLEELFHLLNFLTPERFHNLEGFLEEFADIAKEDQIKKLHDMLGPHMLRRLKADVFKNMPSKTELIVRVELSPMQKKYYKYILTRNFEALNARGGGNQVSLLNVVMDLKKCCNHPYLFPVAAMEAPKMPNGMYDGSALIRASGKLLLLQKMLKNLKEGGHRVLIFSQMTKMLDLLEDFLEHEGYKYERIDGGITGNMRQEAIDRFNAPGAQQFCFLLSTRAGGLGINLATADTVIIYDSDWNPHNDIQAFSRAHRIGQNKKVMIYRFVTRASVEERITQVAKKKMMLTHLVVRPGLGSKTGSMSKQELDDILKFGTEELFKDEATDGGGDNKEGEDSSVIHYDDKAIERLLDRNQDETEDTELQGMNEYLSSFKVAQYVVREEEMGEEEEVEREIIKQEESVDPDYWEKLLRHHYEQQQEDLARNLGKGKRIRKQVNYNDGSQEDRDWQDDQSDNQSDYSVASEEGDEDFDERSEAPRRPSRKGLRNDKDKPLPPLLARVGGNIEVLGFNARQRKAFLNAIMRYGMPPQDAFTTQWLVRDLRGKSEKEFKAYVSLFMRHLCEPGADGAETFADGVPREGLSRQHVLTRIGVMSLIRKKVQEFEHVNGRWSMPELAEVEENKKMSQPGSPSPKTPTPSTPGDTQPNTPAPVPPAEDGIKIEENSLKEEESIEGEKEVKSTAPETAIECTQAPAPASEDEKVVVEPPEGEEKVEKAEVKERTEEPMETEPKGKGAADVEKVEEKSAIDLTPIVVEDKEEKKEEEEKKEVMLQNGETPKDLNDEKQKKNIKQRFMFNIADGGFTELHSLWQNEERAATVTKKTYEIWHRRHDYWLLAGIINHGYARWQDIQNDPRYAILNEPFKGEMNRGNFLEIKNKFLARRFKLLEQALVIEEQLRRAAYLNMSEDPSHPSMALNTRFAEVECLAESHQHLSKESMAGNKPANAVLHKGILKQLEELLSDMKADVTRLPATIARIPPVAVRLQMSERNILSRLANRAPEPTPQQVAQQQ

SEQ ID NO: 7321 - protein, 711 aa, Homo sapiens
MAGLTAAAPRPGVLLLLLSILHPSRPGGVPGAIPGGVPGGVFYPGAGLGALGGGALGPGGKPLKPVPGGLAGAGLGAGLGAFPAVTFPGALVPGGVADAAAAYKAAKAGAGLGGVPGVGGLGVSAAPSVPGAVVPQPGAGVKPGKVPGVGLPGVYPGGVLPGARFPGVGVLPGVPTGAGVKPKAPGVGGAFAGIPGVGPFGGPQPGVPLGYPIKAPKLPGGYGLPYTTGKLPYGYGPGGVAGAAGKAGYPTGTGVGPQAAAAAAAKAAAKFGAGAAGVLPGVGGAGVPGVPGAIPGIGGIAGVGTPAAAAAAAAAAKAAKYGAAAGLVPGGPGFGPGVVGVPGAGVPGVGVPGAGIPVVPGAGIPGAAVPGVVSPEAAAKAAAKAAKYGARPGVGVGGIPTYGVGAGGFPGFGVGVGGIPGVAGVPGVGGVPGVGGVPGVGISPEAQAAAAAKAAKYGVGTPAAAAAKAAAKAAQFGLVPGVGVAPGVGVAPGVGVAPGVGLAPGVGVAPGVGVAPGVGVAPGIGPGGVAAAAKSAAKVAAKAQLRAAAGLGAGIPGLGVGVGVPGLGVGAGVPGLGVGAGVPGFGAVPGALAAAKAAKYGAAVPGVLGGLGALGGVGIPGGVVGAGPAAAAAAAKAAAKAAQFGLVGAAGLGGLGVGGLGVPGVGGLGGIPPAAAAKAAKYGVAARPGFGLSPIFPGGACLGKACGRKRK

SEQ ID NO: 7322 - protein, 344 aa, Homo sapiens
MSGEPELIELRELAPAGRAGKGRTRLERANALRIARGTACNPTRQLVPGRGHRFQPAGPATHTWCDLCGDFIWGVVRKGLQCARLSADCKFTCHYRCRALVCLDCCGPRDLGWEPAVERDTNVDEPVEWETPDLSQAEIEQKIKEYNAQINSNLFMSLNKDGSYTGFIKVQLKLVRPVSVPSSKKPPSLQDARRGPGRGTSVRRRTSFYLPKDAVKHLHVLSRTRAREVIEALLRKFLVVDDPRKFALFERAERHGQVYLRKLLDDEQPLRLRLLAGPSDKALSFVLKENDSGEVNWDAFSMPELHNFLRILQREEEEHLRQILQKYSYCRQKIQEALHACPLG

SEQ ID NO: 7323 - protein, 432 aa, Homo sapiens
MSWKILLFGVINLICTGFLLMWCSSTNSIALTAYTYLTIFDLFSLMTCLISYWVTLRKPSPVYSFGFERLEVLAVFASTVLAQLGALFILKESAERFLEQPEIHTGRLLVGTFVALCFNLFTMLSIRNKPFAYVSEAASTSWLQEHVADLSRSLCGIIPGLSSIFLPRMNPFVLIDLAGAFALCITYMLIEINNYFAVDTASAIAIALMTFGTMYPMSVYSGKVLLQTTPPHVIGQLDKLIREVSTLDGVLEVRNEHFWTLGFGSLAGSVHVRIRRDANEQMVLAHVTNRLYTLVSTLTVQIFKDDWIRPALLSGPVAANVLNFSDHHVIPMPLLKGTDDLNPVTSTPAKPSSPPPEFSFNTPGKNVNPVILLNTQTRPYGFGLNHGHTPYSSMLNQGLGVPGIGATQGLRTGFTNIPSRYGTNNRIGQPRP

SEQ ID NO: 7324 - protein, 1665 aa, Homo sapiens
MAQGRERDEGPHSAGGASLSVRWVQGFPKQNVHFVNDNTICYPCGNYVIFINIETKKKTVLQCSNGIVGVMATNIPCEVVAFSDRKLKPLIYVYSFPGLTRRTKLKGNILLDYTLLSFSYCGTYLASYSSLPEFELALWNWESSIILCKKSQPGMDVNQMSFNPMNWRQLCLSSPSTVSVWTIERSNQEHCFRARSVKLPLEDGSFFNETDVVFPQSLPKDLIYGPVLPLSAIAGLVGKEAETFRPKDDLYPLLHPTMHCWTPTSDLYIGCEEGHLLMINGDTLQVTVLNKIEEESPLDRRNFISPVTLVYQKEGVLASGIDGFVYSFIIKDRSYMIEDFLEIERPVEHMTFSPNYTVLLIQTDKGSVYIYTFGKEPTLNKVLDACDGKFQAIDFITPGTQYFMTLTYSGEICVWWLEDCACVSKIYLNTLATVLACCPSSLSAAVGTEDGSVYFISVYDKESPQVVHKAFLSESSVQHVVYDQQGIFLLVGTAEGKVFIINANSSSSFQIIGFTEVAKDILQISTVSLLETDIVEVMVLSSLPEAGRSRLEMFTLPTLLPQVSTTFADERGRLKDEIIHKYLYELEHALSSAVLGFQSNQIYGFCSQVPYICSYLLPEEEHTGIYILKPYKKVQSRQYGPGLLYLSSHGLWLITIAKCGILCIRDVYTLETFAWCRSHSHQGHGIQSMRISMDGQNILVNGRDDGTLVYLKWKRFGGHLASEILDYYQKLLISLSSAMDKENHYLSTTPKVSVDLGSDSEHTKQKASTDLSQDELVLTDVKKEIPWIQQKSQEAIKKEVNLFSKKRKEIKQGIKSLSKTILNMMEENDKLENIAKLDQQEFGLDLEELERLHDESQEEVAKMIKDVEMHNLAKSYLAELIKEECWNSMAVKGRALKCFHIPCVVENFPMKARTVEELKELERVLQQKKIEAECLKLRKEIVEAQSGVKLIKQRHEEDDEEEEEEDKTVKYSNLPNYLLGSLSTDFGVDTSLLSSQLELHSREEKINQIILLKDIIYKVKTVFNNEFDAAYKQKEFEIARVKERNVRIREIILDLELEEAVWQPEFEDCEKPERTLVVQDEEITAHKHIKPWHKAKELIVNHEKEHWLLIQDASTRLRALMDMMGGVLEVKKEDILRMVIPQPAFMAKPDAVWTEEERKQFKDYEKKVKELNEERDKYRKSLEAELKKLQNSIQESTQAFDEHLKRLFERRVKAEMVTNQEELKISNLAFSLLLDEELSSREKFLNNYLTRKQHEKSQTSEAVRKSREDLDVCKEHYDNLLAEDKVMDRSFKKEFSEIPGHQVDILYKLFKRRPRISKQKTHSETTSVVPFGELPGSGKLNKDAFAQLMKAMDELDNISNMPEGLDPLVWNHFCMTRRAKVENEQKVKQKAADLLEMATFLQKRVEEEEKVQQEIERVFHELILLQEEKVRFQLNLTIQILLKQGQVELENFQLVLEYSDAILINKNIIEDLNSVIRTQGQKKVASMMESKDVHKRILQIEWEHKKMEMEREDLNQKAWDIQMLFFSRDRQKYLNEPNYEALISIQIGIMEQTIAVLDKMHKKNVENCKKLLKKLGKFSNQKDIANYALSCNLREELVAVSERKDICNAMGSKLTCEKIVKERYENMMQQQKLTNISKQQAEQISILQTEVERLRMKTFPALVQM

SEQ ID NO: 7325 - protein, 1668 aa, Homo sapiens
MSYDVLFQRTELGALEIWRQLICAHVCICVGWLYLRDRVCSKKDIILRTEQNSGRTILIKAVTEKNFETKDFRASLENGVLLCDLINKLKPGVIKKINRLSTPIAGLDNINVFLKACEQIGLKEAQLFHPGDLQDLSNRVTVKQEETDRRVKNVLITLYWLGRKAQSNPYYNGPHLNLKAFENLLGQALTKALEDSSFLKRSGRDSGYGDIWCPERGEFLAPPRHHKREDSFESLDSLGSRSLTSCSSDITLRGGREGFESDTDSEFTFKMQDYNKDDMSYRRISAVEPKTALPFNRFLPNKSRQPSYVPAPLRKKKPDKHEDNRRSWASPVYTEADGTFSSNQRRIWGTNVENWPTVQGTSKSSCYLEEEKAKTRSIPNIVKDDLYVRKLSPVMPNPGNAFDQFLPKCWTPEDVNWKRIKRETYKPWYKEFQGFSQFLLLQALQTYSDDILSSETHTKIDPTSGPRLITRRKNLSYAPGYRRDDLEMAALDPDLENDDFFVRKTGAFHANPYVLRAFEDFRKFSEQDDSVERDIILQCREGELVLPDLEKDDMIVRRIPAQKKEVPLSGAPDRYHPVPFPEPWTLPPEIQAKFLCVLERTCPSKEKSNSCRILVPSYRQKKDDMLTRKIQSWKLGTTVPPISFTPGPCSEADLKRWEAIREASRLRHKKRLMVERLFQKIYGENGSKSMSDVSAEDVQNLRQLRYEEMQKIKSQLKEQDQKWQDDLAKWKDRRKSYTSDLQKKKEEREEIEKQALEKSKRSSKTFKEMLQDRESQNQKSTVPSRRRMYSFDDVLEEGKRPPTMTVSEASYQSERVEEKGATYPSEIPKEDSTTFAKREDRVTTEIQLPSQSPVEEQSPASLSSLRSRSTQMESTRVSASLPRSYRKTDTVRLTSVVTPRPFGSQTRGISSLPRSYTMDDAWKYNGDVEDIKRTPNNVVSTPAPSPDASQLASSLSSQKEVAATEEDVTRLPSPTSPFSSLSQDQAATSKATLSSTSGLDLMSESGEGEISPQREVSRSQDQFSDMRISINQTPGKSLDFGFTIKWDIPGIFVASVEAGSPAEFSQLQVDDEIIAINNTKFSYNDSKEWEEAMAKAQETGHLVMDVRRYGKAGSPETKWIDATSGIYNSEKSSNLSVTTDFSESLQSSNIESKEINGIHDESNAFESKASESISLKNLKRRSQFFEQGSSDSVVPDLPVPTISAPSRWVWDQEEERKRQERWQKEQDRLLQEKYQREQEKLREEWQRAKQEAERENSKYLDEELMVLSSNSMSLTTREPSLATWEATWSEGSKSSDREGTRAGEEERRQPQEEVVHEDQGKKPQDQLVIERERKWEQQLQEEQEQKRLQAEAEEQKRPAEEQKRQAEIERETSVRIYQYRRPVDSYDIPKTEEASSGFLPGDRNKSRSTTELDDYSTNKNGNNKYLDQIGNMTSSQRRSKKEQVPSGAELERQQILQEMRKRTPLHNDNSWIRQRSASVNKEPVSLPGIMRRGESLDNLDSPRSNSWRQPPWLNQPTGFYASSSVQDFSRPPPQLVSTSNRAYMRNPSSSVPPPSAGSVKTSTTGVATTQSPTPRSHSPSASQSGSQLRNRSVSGKRICSYCNNILGKGAAMIIESLGLCYHLHCFKCVACECDLGGSSSGAEVRIRNHQLYCNDCYLRFKSGRPTAM

SEQ ID NO: 7326 - protein, 189 aa, Homo sapiens
MVGGGQPCGPNMSEVSCKKRDDYLEWPEYFMAVAFLSAQRSKDPNSQVGACIVNSENKIVGIGYNGMPNGCSDDVLPWRRTAENKLDTKYPYVCHAELNAIMNKNSTDVKGCSMYVALFPCNECAKLIIQAGIKEVIFMSDKYHDSDEATAARLLFNMAGVTFRKFIPKCSKIVIDFDSINSRPSQKLQ

SEQ ID NO: 7327 - protein, 600 aa, Homo sapiens
MALRRALPALRPCIPRFVPLSTAPASREQPAAGPAAVPGGGSATAVRPPVPAVDFGNAQEAYRSRRTWELARSLLVLRLCAWPALLARHEQLLYVSRKLLGQRLFNKLMKMTFYGHFVAGEDQESIQPLLRHYRAFGVSAILDYGVEEDLSPEEAEHKEMESCTSAAERDGSGTNKRDKQYQAHWAFGDRRNGVISARTYFYANEAKCDSHMETFLRCIEASGRVSDDGFIAIKLTALGRPQFLLQFSEVLAKWRCFFHQMAVEQGQAGLAAMDTKLEVAVLQESVAKLGIASRAEIEDWFTAETLGVSGTMDLLDWSSLIDSRTKLSKHLVVPNAQTGQLEPLLSRFTEEEELQMTRMLQRMDVLAKKATEMGVRLMVDAEQTYFQPAISRLTLEMQRKFNVEKPLIFNTYQCYLKDAYDNVTLDVELARREGWCFGAKLVRGAYLAQERARAAEIGYEDPINPTYEATNAMYHRCLDYVLEELKHNAKAKVMVASHNEDTVRFALRRMEELGLHPADHRVYFGQLLGMCDQISFPLGQAGYPVYKYVPYGPVMEVLPYLSRRALENSSLMKGTHRERQLLWLELLRRLRTGNLFHRPA

SEQ ID NO: 7328 - protein, 758 aa, Homo sapiens
MPLQGLGLQRNPFLQGKRGPGLTSSPPLLPPSLQVNFHSPRSGQRCWAARTQVEKRLVVLVVLLAAGLVACLAALGIQYQTRSPSVCLSEACVSVTSSILSSMDPTVDPCHDFFSYACGGWIKANPVPDGHSRWGTFSNLWEHNQAIIKHLLENSTASVSEAERKAQVYYRACMNETRIEELRAKPLMELIERLGGWNITGPWAKDNFQDTLQVVTAHYRTSPFFSVYVSADSKNSNSNVIQVDQSGLGLPSRDYYLNKTENEKVLTGYLNYMVQLGKLLGGGDEEAIRPQMQQILDFETALANITIPQEKRRDEELIYHKVTAAELQTLAPAINWLPFLNTIFYPVEINESEPIVVYDKEYLEQISTLINTTDRCLLNNYMIWNLVRKTSSFLDQRFQDADEKFMEVMYGTKKTCLPRWKFCVSDTENNLGFALGPMFVKATFAEDSKSIATEIILEIKKAFEESLSTLKWMDEETRKSAKEKADAIYNMIGYPNFIMDPKELDKVFNDYTAVPDLYFENAMRFFNFSWRVTADQLRKAPNRDQWSMTPPMVNAYYSPTKNEIVFPAGILQAPFYTRSSPKALNFGGIGVVVGHELTHAFDDQGREYDKDGNLRPWWKNSSVEAFKRQTECMVEQYSNYSVNGEPVNGRHTLGENIADNGGLKAAYRAYQNWVKKNGAEHSLPTLGLTNNQLFFLGFAQVWCSVRTPESSHEGLITDPHSPSRFRVIGSLSNSKEFSEHFRCPPGSPMNPPHKCEVW

SEQ ID NO: 7329 - protein, 3957 aa, Homo sapiens
MMNEDAAQKSDSGEKFNGSSQRRKRPKKSDSNASFLRAARAGNLDKVVEYLKGGIDINTCNQNGLNALHLAAKEGHVGLVQELLGRGSSVDSATKKGNTALHIASLAGQAEVVKVLVKEGANINAQSQNGFTPLYMAAQENHIDVVKYLLENGANQSTATEDGFTPLAVALQQGHNQAVAILLENDTKGKVRLPALHIAARKDDTKSAALLLQNDHNADVQSKMMVNRTTESGFTPLHIAAHYGNVNVATLLLNRGAAVDFTARNGITPLHVASKRGNTNMVKLLLDRGGQIDAKTRDGLTPLHCAARSGHDQVVELLLERGAPLLARTKNGLSPLHMAAQGDHVECVKHLLQHKAPVDDVTLDYLTALHVAAHCGHYRVTKLLLDKRANPNARALNGFTPLHIACKKNRIKVMELLVKYGASIQAITESGLTPIHVAAFMGHLNIVLLLLQNGASPDVTNIRGETALHMAARAGQVEVVRCLLRNGALVDARAREEQTPLHIASRLGKTEIVQLLLQHMAHPDAATTNGYTPLHISAREGQVDVASVLLEAGAAHSLATKKGFTPLHVAAKYGSLDVAKLLLQRRAAADSAGKNGLTPLHVAAHYDNQKVALLLLEKGASPHATAKNGYTPLHIAAKKNQMQIASTLLNYGAETNIVTKQGVTPLHLASQEGHTDMVTLLLDKGANIHMSTKSGLTSLHLAAQEDKVNVADILTKHGADQDAHTKLGYTPLIVACHYGNVKMVNFLLKQGANVNAKTKNGYTPLHQAAQQGHTHIINVLLQHGAKPNATTANGNTALAIAKRLGYISVVDTLKVVTEEVTTTTTTITEKHKLNVPETMTEVLDVSDEEGDDTMTGDGGEYLRPEDLKELGDDSLPSSQFLDGMNYLRYSLEGGRSDSLRSFSSDRSHTLSHASYLRDSAVMDDSVVIPSHQVSTLAKEAERNSYRLSWGTENLDNVALSSSPIHSGFLVSFMVDARGGAMRGCRHNGLRIIIPPRKCTAPTRVTCRLVKRHRLATMPPMVEGEGLASRLIEVGPSGAQFLGKLHLPTAPPPLNEGESLVSRILQLGPPGTKFLGPVIVEIPHFAALRGKERELVVLRSENGDSWKEHFCDYTEDELNEILNGMDEVLDSPEDLEKKRICRIITRDFPQYFAVVSRIKQDSNLIGPEGGVLSSTVVPQVQAVFPEGALTKRIRVGLQAQPMHSELVKKILGNKATFSPIVTLEPRRRKFHKPITMTIPVPKASSDVMLNGFGGDAPTLRLLCSITGGTTPAQWEDITGTTPLTFVNECVSFTTNVSARFWLIDCRQIQESVTFASQVYREIICVPYMAKFVVFAKSHDPIEARLRCFCMTDDKVDKTLEQQENFAEVARSRDVEVLEGKPIYVDCFGNLVPLTKSGQHHIFSFFAFKENRLPLFVKVRDTTQEPCGRLSFMKEPKSTRGLVHQAICNLNITLPIYTKESESDQEQEEEIDMTSEKNDETESTETSVLKSHLVNEVPVLASPDLLSEVSEMKQDLIKMTAILTTDVSDKAGSIKVKELVKAAEEEPGEPFEIVERVKEDLEKVNEILRSGTCTRDESSVQSSRSERGLVEEEWVIVSDEEIEEARQKAPLEITEYPCVEVRIDKEIKGKVEKDSTGLVNYLTDDLNTCVPLPKEQLQTVQDKAGKKCEALAVGRSSEKEGKDIPPDETQSTQKQHKPSLGIKKPVRRKLKEKQKQKEEGLQASAEKAELKKGSSEESLGEDPGLAPEPLPTVKATSPLIEETPIGSIKDKVKALQKRVEDEQKGRSKLPIRVKGKEDVPKKTTHRPHPAASPSLKSERHAPGSPSPKTERHSTLSSSAKTERHPPVSPSSKTEKHSPVSPSAKTERHSPASSSSKTEKHSPVSPSTKTERHSPVSSTKTERHPPVSPSGKTDKRPPVSPSGRTEKHPPVSPGRTEKRLPVSPSGRTDKHQPVSTAGKTEKHLPVSPSGKTEKQPPVSPTSKTERIEETMSVRELMKAFQSGQDPSKHKTGLFEHKSAKQKQPQEKGKVRVEKEKGPILTQREAQKTENQTIKRGQRLPVTGTAESKRGVRVSSIGVKKEDAAGGKEKVLSHKIPEPVQSVPEEESHRESEVPKEKMADEQGDMDLQISPDRKTSTDFSEVIKQELEDNDKYQQFRLSEETEKAQLHLDQVLTSPFNTTFPLDYMKDEFLPALSLQSGALDGSSESLKNEGVAGSPCGSLMEGTPQISSEESYKHEGLAETPETSPESLSFSPKKSEEQTGETKESTKTETTTEIRSEKEHPTTKDITGGSEERGATVTEDSETSTESFQKEATLGSPKDTSPKRQDDCTGSCSVALAKETPTGLTEEAACDEGQRTFGSSAHKTQTDSEVQESTATSDETKALPLPEASVKTDTGTESKPQGVIRSPQGLELALPSRDSEVLSAVADDSLAVSHKDSLEASPVLEDNSSHKTPDSLEPSPLKESPCRDSLESSPVEPKMKAGIFPSHFPLPAAVAKTELLTEVASVRSRLLRDPDGSAEDDSLEQTSLMESSGKSPLSPDTPSSEEVSYEVTPKTTDVSTPKPAVIHECAEEDDSENGEKKRFTPEEEMFKMVTKIKMFDELEQEAKQKRDYKKEPKQEESSSSSDPDADCSVDVDEPKHTGSGEDESGVPVLVTSESRKVSSSSESEPELAQLKKGADSGLLPEPVIRVQPPSPLPSSMDSNSSPEEVQFQPVVSKQYTFKMNEDTQEEPGKSEEEKDSESHLAEDRHAVSTEAEDRSYDKLNRDTDQPKICDGHGCEAMSPSSSAAPVSSGLQSPTGDDVDEQPVIYKESLALQGTHEKDTEGEELDVSRAESPQADCPSESFSSSSSLPHCLVSEGKELDEDISATSSIQKTEVTKTDETFENLPKDCPSQDSSITTQTDRFSMDVPVSDLAENDEIYDPQITSPYENVPSQSFFSSEESKTQTDANHTTSFHSSEVYSVTITSPVEDVVVASSSSGTVLSKESNFEGQDIKMESQQESTLWEMQSDSVSSSFEPTMSATTTVVGEQISKVIITKTDVDSDSWSEIREDDEAFEARVKEEEQKIFGLMVDRQSQGTTPDTTPARTPTEEGTPTSEQNPFLFQEGKLFEMTRSGAIDMTKRSYADESFHFFQIGQESREETLSEDVKEGATGADPLPLETSAESLALSESKETVDDEADLLPDDVSEEVEEIPASDAQLNSQMGISASTETPTKEAVSVGTKDLPTVQTGDIPPLSGVKQISCPDSSEPAVQVQLDFSTLTRSVYSDRGDDSPDSSPEEQKSVIEIPTAPMENVPFTESKSKIPVRTMPTSTPAPPSAEYESSVSEDFLSSVDEENKADEAKPKSKLPVKVPLQRVEQQLSDLDTSVQKTVAPQGQDMASIAPDNRSKSESDASSLDSKTKCPVKTRSYTETETESRERAEELELESEEGATRPKILTSRLPVKSRSTTSSCRGGTSPTKESKEHFFDLYRNSIEFFEEISDEASKLVDRLTQSEREQEIVSDDESSSALEVSVIENLPPVETEHSVPEDIFDTRPIWDESIETLIERIPDENGHDHAEDPQDEQERIEERLAYIADHLGFSWTELARELDFTEEQIHQIRIENPNSLQDQSHALLKYWLERDGKHATDTNLVECLTKINRMDIVHLMETNTEPLQERISHSYAEIEQTITLDHSEGFSVLQEELCTAQHKQKEEQAVSKESETCDHPPIVSEEDISVGYSTFQDGVPKTEGDSSATALFPQTHKEQVQQDFSGKMQDLPEESSLEYQQEYFVTTPGTETSETQKAMIVPSSPSKTPEEVSTPAEEEKLYLQTPTSSERGGSPIIQEPEEPSEHREESSPRKTSLVIVESADNQPETCERLDEDAAFEKGDDMPEIPPETVTEEEYIDEHGHTVVKKVTRKIIRRYVSSEGTEKEEIMVQGMPQEPVNIEEGDGYSKVIKRVVLKSDTEQSEDNNE

SEQ ID NO: 7330 - protein, 508 aa, Homo sapiens
MSSDEKGISPAHKTSTPTHRSASSSTSSQRDSRQSIHILERTASSSTEPSVSRQLLEPEPVPLSKEADSWEIIEGLKIGQTNVQKPDKHEGFMLKKRKWPLKGWHKRFFVLDNGMLKYSKAPLDIQKGKVHGSIDVGLSVMSIKKKARRIDLDTEEHIYHLKVKSQDWFDAWVSKLRHHRLYRQNEIVRSPRDASFHIFPSTSTAESSPAANVSVMDGKMQPNSFPWQSPLPCSNSLPATCTTGQSKVAAWLQDSEEMDRCAEDLAHCQSNLVELSKLLQNLEILQRTQSAPNFTDMQVPFSATMSPVRLHSSNPNLCADIEFQTPPSHLTDPLESSTDYTKLQEEFCLIAQKVHSLLKSAFNSIAIEKEKLKQMVSEQDHSKGHSTQMARLRQSLSQAGEQIHVSLPLSQQVANESRLSMSESVSEFFDAQEVLLSASSSENEASDDESYISDVSDNISEDNTSVADNISRQSMHHLSFQVVLSTCQIATRRLNEQAFPLPRHPHPC

SEQ ID NO: 7331 - protein, 1226 aa, Homo sapiens
MSKLKVIPEKSLTNNSRIVGLLAQLEKINAEPSESDTARYVTSKILHLAQSQEKTRREMTAKGSTGMEILLSTLENTKDLQTTLNILSILVELVSAGGGRRVSFLVTKGGSQILLQLLMNASKESPPHEDLMVQIHSILAKIGPKDKKFGVKARINGALNITLNLVKQNLQNHRLVLPCLQLLRVYSANSVNSVSLGKNGVVELMFKIIGPFSKKNSSLIKVALDTLAALLKSKTNARRAVDRGYVQVLLTIYVDWHRHDNRHRNMLIRKGILQSLKSVTNIKLGRKAFIDANGMKILYNTSQECLAVRTLDPLVNTSSLIMRKCFPKNRLPLPTIKSSFHFQLPVIPVTGPVAQLYSLPPEVDDVVDESDDNDDIDVEAENETENEDDLDQNFKNDDIETDINKLKPQQEPGRTIEDLKMYEHLFPELVDDFQDYDLISKEPKPFVFEGKVRGPIVVPTAGEETSGNSGNLRKVVMKENISSKGDEGEKKSTFMDLAKEDIKDNDRTLQQQPGDQNRTISSVHGLNNDIVKALDRITLQNIPSQTAPGFTAEMKKDCSLPLTVLTCAKACPHMATCGNVLFEGRTVQLGKLCCTGVETEDDEDTESNSSVEQASVEVPDGPTLHDPDLYIEIVKNTKSVPEYSEVAYPDYFGHIPPPFKEPILERPYGVQRTKIAQDIERLIHQSDIIDRVVYDLDNPNYTIPEEGDILKFNSKFESGNLRKVIQIRKNEYDLILNSDINSNHYHQWFYFEVSGMRPGVAYRFNIINCEKSNSQFNYGMQPLMYSVQEALNARPWWIRMGTDICYYKNHFSRSSVAAGGQKGKSYYTITFTVNFPHKDDVCYFAYHYPYTYSTLQMHLQKLESAHNPQQIYFRKDVLCETLSGNSCPLVTITAMPESNYYEHICHFRNRPYVFLSARVHPGETNASWVMKGTLEYLMSNNPTAQSLRESYIFKIVPMLNPDGVINGNHRCSLSGEDLNRQWQSPSPDLHPTIYHAKGLLQYLAAVKRLPLVYCDYHGHSRKKNVFMYGCSIKETVWHTNDNATSCDVVEDTGYRTLPKILSHIAPAFCMSSCSFVVEKSKESTARVVVWREIGVQRSYTMESTLCGCDQGKYKGLQIGTRELEEMGAKFCVGLLRLKRLTSPLEYNLPSSLLDFENDLIESSCKVTSPTTYVLDEDEPRFLEEVDYSAESNDELDIELAENVGDYEPSAQEEVLSDSELSRTYLP

SEQ ID NO: 7332 - protein, 402 aa, Homo sapiens
MLRYLQPLGCVHGGKGLTDMRLLLLREIVINESRNCSFMIISTMEPQVSNGPTSNTSNGPSSNNRNCPSPMQTGATTDDSKTNLIVNYLPQNMTQEEFRSLFGSIGEIESCKLVRDKITGQSLGYGFVNYIDPKDAEKAINTLNGLRLQTKTIKVSYARPSSASIRDANLYVSGLPKTMTQKELEQLFSQYGRIITSRILVDQVTGVSRGVGFIRFDKRIEAEEAIKGLNGQKPSGATEPITVKFANNPSQKSSQALLSQLYQSPNRRYPGPLHHQAQRFRLDNLLNMAYGVKRFSPITIDGMTSLVGMNIPGHTGTGWCIFVYNLSPDSDESVLWQLFGPFGAVNNVKVIRDFNTNKCKGFGFVTMTNYDEAAMAIASLNGYRLGDRVLQVSFKTNKAHKS

SEQ ID NO: 7333 - protein, 1001 aa, Homo sapiens
MEAAHAKTTEECLAYFGVSETTGLTPDQVKRNLEKYGLNELPAEEGKTLWELVIEQFEDLLVRILLLAACISFVLAWFEEGEETITAFVEPFVILLILIANAIVGVWQERNAENAIEALKEYEPEMGKVYRADRKSVQRIKARDIVPGDIVEVAVGDKVPADIRILAIKSTTLRVDQSILTGESVSVIKHTEPVPDPRAVNQDKKNMLFSGTNIAAGKALGIVATTGVGTEIGKIRDQMAATEQDKTPLQQKLDEFGEQLSKVISLICVAVWLINIGHFNDPVHGGSWFRGAIYYFKIAVALAVAAIPEGLPAVITTCLALGTRRMAKKNAIVRSLPSVETLGCTSVICSDKTGTLTTNQMSVCKMFIIDKVDGDICLLNEFSITGSTYAPEGEVLKNDKPVRPGQYDGLVELATICALCNDSSLDFNEAKGVYEKVGEATETALTTLVEKMNVFNTDVRSLSKVERANACNSVIRQLMKKEFTLEFSRDRKSMSVYCSPAKSSRAAVGNKMFVKGAPEGVIDRCNYVRVGTTRVPLTGPVKEKIMAVIKEWGTGRDTLRCLALATRDTPPKREEMVLDDSARFLEYETDLTFVGVVGMLDPPRKEVTGSIQLCRDAGIRVIMITGDNKGTAIAICRRIGIFGENEEVADRAYTGREFDDLPLAEQREACRRACCFARVEPSHKSKIVEYLQSYDEITAMTGDGVNDAPALKKAEIGIAMGSGTAVAKTASEMVLADDNFSTIVAAVEEGRAIYNNMKQFIRYLISSNVGEVVCIFLTAALGLPEALIPVQLLWVNLVTDGLPATALGFNPPDLDIMDRPPRSPKEPLISGWLFFRYMAIGGYVGAATVGAAAWWFLYAEDGPHVNYSQLTHFMQCTEDNTHFEGIDCEVFEAPEPMTMALSVLVTIEMCNALNSLSENQSLLRMPPWVNIWLLGSICLSMSLHFLILYVDPLPMIFKLRALDLTQWLMVLKISLPVIGLDEILKFVARNYLEDPEDERRK

SEQ ID NO: 7334 - protein, 465 aa, Homo sapiens
MASTTSTKKMMEEATCSICLSLMTNPVSINCGHSYCHLCITDFFKNPSQKQLRQETFCCPQCRAPFHMDSLRPNKQLGSLIEALKETDQEMSCEEHGEQFHLFCEDEGQLICWRCERAPQHKGHTTALVEDVCQGYKEKLQKAVTKLKQLEDRCTEQKLSTAMRITKWKEKVQIQRQKIRSDFKNLQCFLHEEEKSYLWRLEKEEQQTLSRLRDYEAGLGLKSNELKSHILELEEKCQGSAQKLLQNVNDTLSRSWAVKLETSEAVSLELHTMCNVSKLYFDVKKMLRSHQVSVTLDPDTAHHELILSEDRRQVTRGYTQENQDTSSRRFTAFPCVLGCEGFTSGRRYFEVDVGEGTGWDLGVCMENVQRGTGMKQEPQSGFWTLRLCKKKGYVALTSPPTSLHLHEQPLLVGIFLDYEAGVVSFYNGNTGCHIFTFPKASFSDTLRPYFQVYQYSPLFLPPPGD

SEQ ID NO: 7335 - protein, 2710 aa, Homo sapiens
MSDKMSSFLHIGDICSLYAEGSTNGFISTLGLVDDRCVVQPETGDLNNPPKKFRDCLFKLCPMNRYSAQKQFWKAAKPGANSTTDAVLLNKLHHAADLEKKQNETENRKLLGTVIQYGNVIQLLHLKSNKYLTVNKRLPALLEKNAMRVTLDEAGNEGSWFYIQPFYKLRSIGDSVVIGDKVVLNPVNAGQPLHASSHQLVDNPGCNEVNSVNCNTSWKIVLFMKWSDNKDDILKGGDVVRLFHAEQEKFLTCDEHRKKQHVFLRTTGRQSATSATSSKALWEVEVVQHDPCRGGAGYWNSLFRFKHLATGHYLAAEVDPDFEEECLEFQPSVDPDQDASRSRLRNAQEKMVYSLVSVPEGNDISSIFELDPTTLRGGDSLVPRNSYVRLRHLCTNTWVHSTNIPIDKEEEKPVMLKIGTSPVKEDKEAFAIVPVSPAEVRDLDFANDASKVLGSIAGKLEKGTITQNERRSVTKLLEDLVYFVTGGTNSGQDVLEVVFSKPNRERQKLMREQNILKQIFKLLQAPFTDCGDGPMLRLEELGDQRHAPFRHICRLCYRVLRHSQQDYRKNQEYIAKQFGFMQKQIGYDVLAEDTITALLHNNRKLLEKHITAAEIDTFVSLVRKNREPRFLDYLSDLCVSMNKSIPVTQELICKAVLNPTNADILIETKLVLSRFEFEGVSSTGENALEAGEDEEEVWLFWRDSNKEIRSKSVRELAQDAKEGQKEDRDVLSYYRYQLNLFARMCLDRQYLAINEISGQLDVDLILRCMSDENLPYDLRASFCRLMLHMHVDRDPQEQVTPVKYARLWSEIPSEIAIDDYDSSGASKDEIKERFAQTMEFVEEYLRDVVCQRFPFSDKEKNKLTFEVVNLARNLIYFGFYNFSDLLRLTKILLAILDCVHVTTIFPISKMAKGEENKGSNVMRSIHGVGELMTQVVLRGGGFLPMTPMAAAPEGNVKQAEPEKEDIMVMDTKLKIIEILQFILNVRLDYRISCLLCIFKREFDESNSQTSETSSGNSSQEGPSNVPGALDFEHIEEQAEGIFGGSEENTPLDLDDHGGRTFLRVLLHLTMHDYPPLVSGALQLLFRHFSQRQEVLQAFKQVQLLVTSQDVDNYKQIKQDLDQLRSIVEKSELWVYKGQGPDETMDGASGENEHKKTEEGNNKPQKHESTSSYNYRVVKEILIRLSKLCVQESASVRKSRKQQQRLLRNMGAHAVVLELLQIPYEKAEDTKMQEIMRLAHEFLQNFCAGNQQNQALLHKHINLFLNPGILEAVTMQHIFMNNFQLCSEINERVVQHFVHCIETHGRNVQYIKFLQTIVKAEGKFIKKCQDMVMAELVNSGEDVLVFYNDRASFQTLIQMMRSERDRMDENSPLMYHIHLVELLAVCTEGKNVYTEIKCNSLLPLDDIVRVVTHEDCIPEVKIAYINFLNHCYVDTEVEMKEIYTSNHMWKLFENFLVDICRACNNTSDRKHADSILEKYVTEIVMSIVTTFFSSPFSDQSTTLQTRQPVFVQLLQGVFRVYHCNWLMPSQKASVESCIRVLSDVAKSRAIAIPVDLDSQVNNLFLKSHSIVQKTAMNWRLSARNAARRDSVLAASRDYRNIIERLQDIVSALEDRLRPLVQAELSVLVDVLHRPELLFPENTDARRKCESGGFICKLIKHTKQLLEENEEKLCIKVLQTLREMMTKDRGYGEKGEALRQVLVNRYYGNVRPSGRRESLTSFGNGPLSAGGPGKPGGGGGGSGSSSMSRGEMSLAEVQCHLDKEGASNLVIDLIMNASSDRVFHESILLAIALLEGGNTTIQHSFFCRLTEDKKSEKFFKVFYDRMKVAQQEIKATVTVNTSDLGNKKKDDEVDRDAPSRKKAKEPTTQITEEVRDQLLEASAATRKAFTTFRREADPDDHYQPGEGTQATADKAKDDLEMSAVITIMQPILRFLQLLCENHNRDLQNFLRCQNNKTNYNLVCETLQFLDCICGSTTGGLGLLGLYINEKNVALINQTLESLTEYCQGPCHENQNCIATHESNGIDIITALILNDINPLGKKRMDLVLELKNNASKLLLAIMESRHDSENAERILYNMRPKELVEVIKKAYMQGEVEFEDGENGEDGAASPRNVGHNIYILAHQLARHNKELQSMLKPGGQVDGDEALEFYAKHTAQIEIVRLDRTMEQIVFPVPSICEFLTKESKLRIYYTTERDEQGSKINDFFLRSEDLFNEMNWQKKLRAQPVLYWCARNMSFWSSISFNLAVLMNLLVAFFYPFKGVRGGTLEPHWSGLLWTAMLISLAIVIALPKPHGIRALIASTILRLIFSVGLQPTLFLLGAFNVCNKIIFLMSFVGNCGTFTRGYRAMVLDVEFLYHLLYLVICAMGLFVHEFFYSLLLFDLVYREETLLNVIKSVTRNGRSIILTAVLALILVYLFSIVGYLFFKDDFILEVDRLPNETAVPETGESLASEFLFSDVCRVESGENCSSPAPREELVPAEETEQDKEHTCETLLMCIVTVLSHGLRSGGGVGDVLRKPSKEEPLFAARVIYDLLFFFMVIIIVLNLIFGVIIDTFADLRSEKQKKEEILKTTCFICGLERDKFDNKTVTFEEHIKEEHNMWHYLCFIVLVKVKDSTEYTGPESYVAEMIKERNLDWFPRMRAMSLVSSDSEGEQNELRNLQEKLESTMKLVTNLSGQLSELKDQMTEQRKQKQRIGLLGHPPHMNVNPQQPA

SEQ ID NO: 7336 - protein, 487 aa, Homo sapiens
MSSPLASLSKTRKVPLPSEPMNPGRRGIRIYGDVPASHDSELMAFMTRKLWDLEQQVKAQTDEILSKDQKIAALEDLVQTLRPHPAEATLQRQEELETMCVQLQRQVREMERFLSDYGLQWVGEPMDQEDSESKTVSEHGERDWMTAKKFWKPGDSLAPPEVDFDRLLASLQDLSELVVEGDTQVTPVPGGARLRTLEPIPLKLYRNGIMMFDGPFQPFYDPSTQRCLRDILDGFFPSELQRLYPNGVPFKVSDLRNQVYLEDGLDPFPGEGRVVGRQLMHKALDRVEEHPGSRMTAEKFLNRLPKFVIRQGEVIDIRGPIRDTLQNCCPLPARIQEIVVETPTLAAERERSQESPNTPAPPLSMLRIKSENGEQAFLLMMQPDNTIGDVRALLAQARVMDASAFEIFSTFPPTLYQDDTLTLQAAGLVPKAALLLRARRAPKSSLKFSPGPCPGPGPGPSPGPGPGPSPGPGPGPSPCPGPSPSPQ

SEQ ID NO: 7337 - protein, 622 aa, Homo sapiens
MQTQEILRILRLPELGDLGQFFRSLSATTLDSGGARRSVIGSGPQLLTHYYDDARTMYQVFRRGLSISGNGPCLGFRKPKQPYQWLSYQEVADRAEFLGSGLLQHNCKACTDQFIGVFAQNRPEWIIVELACYTYSMVVVPLYDTLGPGAIRYIINTADISTVIVDKPQKAVLLLEHVERKETPGLKLIILMDPFEEALKERGQKCGVVIKSMQAVEDCGQENHQAPVPPQPDDLSIVCFTSGTTGNPKGAMLTHGNVVADFSGFLKVTEGDIRLLSDDMKALCPTIFPVVPRLLNRMYDKIFSQANTPLKRWLLEFAAKRKQAEVRSGIIRNDSIWDELFFNKIQASLGGCVRMIVTGAAPASPTVLGFLRAALGCQVYEGYGQTECTAGCTFTTPGDWTSGHVGAPLPCNHIKLVDVEELNYWACKGEGEICVRGPNVFKGYLKDPDRTKEALDSDGWLHTGDIGKWLPAGTLKIIDRKKHIFKLAQGEYVAPEKIENIYIRSQPVAQIYVHGDSLKAFLVGIVVPDPEVMPSWAQKRGIEGTYADLCTNKDLKKAILEDMVRLGKESGLHSFEQVKAIHIHSDMFSVQNGLLTPTLKAKRPELREYFKKQIEELYSISM

SEQ ID NO: 7338 - protein, 664 aa, Homo sapiens
MKVMEEEVLIKNGEIKILRDSLHQTESVLEEQRRSHFLLEQEKTQALSDKEKEFSKKLQSLQSELQFKDAEMNELRTKLQTSERANKLAAPSVSHVSPRKNPSVVIKPEACSPQFGKTSFPTKESFSANMSLPHPCQTESGYKPLVGREDSKPHSLRGDSIKQEEAQKSFVDSWRQRSNTQGSILINLLLKQPLIPGSSLSLCHLLSSSSESPAGTPLQPPGFGSTLAGMSGLRTTGSYDGSFSLSALREAQNLAFTGLNLVARNECSRDGDPAEGGRRAFPLCQLPGAVHFLPLVQFFIGLHCQALQDLAAAKRSGAPGDSPTHSSCVSSGVETNPEDSVCILEGFSVTALSILQHLVCHSGAVVSLLLSGVGADSAAGEGNRSLVHRLSDGDMTSALRGVADDQGQHPLLKMLLHLLAFSSAATGHLQASVLTQCLKVLVKLAENTSCDFLPRFQCVFQVLPKCLSPETPLPSVLLAVELLSLLADHDQLAPQLCSHSEGCLLLLLYMYITSRPDRVALETQWLQLEQEVVWLLAKLGVQSPLPPVTGSNCQCNVEVVRALTVMLHRQWLTVRRAGGPPRTDQQRRTVRCLRDTVLLLHGLSQKDKLFMMHCVEVLHQFDQVMPGVSMLIRGLPDVTDCEEAALDDLCAAETDVEDPEVECG

SEQ ID NO: 7339 - protein, 2863 aa, Homo sapiens
MASEDNRVPSPPPTGDDGGGGGREETPTEGGALSLKPGLPIRGIRMKFAVLTGLVEVGEVSNRDIVETVFNLLVGGQFDLEMNFIIQEGESINCMVDLLEKCDITCQAEVWSMFTAILKKSIRNLQVCTEVGLVEKVLGKIEKVDNMIADLLVDMLGVLASYNLTVRELKLFFSKLQGDKGRWPPHAGKLLSVLKHMPQKYGPDAFFNFPGKSAAAIALPPIAKWPYQNGFTFHTWLRMDPVNNINVDKDKPYLYCFRTSKGLGYSAHFVGGCLIVTSIKSKGKGFQHCVKFDFKPQKWYMVTIVHIYNRWKNSELRCYVNGELASYGEITWFVNTSDTFDKCFLGSSETADANRVFCGQMTAVYLFSEALNAAQIFAIYQLGLGYKGTFKFKAESDLFLAEHHKLLLYDGKLSSAIAFTYNPRATDAQLCLESSPKDNPSIFVHSPHALMLQDVKAVLTHSIQSAMHSIGGVQVLFPLFAQLDYRQYLSDEIDLTICSTLLAFIMELLKNSIAMQEQMLACKGFLVIGYSLEKSSKSHVSRAVLELCLAFSKYLSNLQNGMPLLKQLCDHVLLNPAIWIHTPAKVQLMLYTYLSTEFIGTVNIYNTIRRVGTVLLIMHTLKYYYWAVNPQDRSGITPKGLDGPRPNQKEMLSLRAFLLMFIKQLVMKDSGVKEDELQAILNYLLTMHEDDNLMDVLQLLVALMSEHPNSMIPAFDQRNGLRVIYKLLASKSEGIRVQALKAMGYFLKHLAPKRKAEVMLGHGLFSLLAERLMLQTNLITMTTYNVLFEILIEQIGTQVIHKQHPDPDSSVKIQNPQILKVIATLLRNSPQCPESMEVRRAFLSDMIKLFNNSRENRRSLLQCSVWQEWMLSLCYFNPKNSDEQKITEMVYAIFRILLYHAVKYEWGGWRVWVDTLSITHSKVTFEIHKENLANIFREQQGKVDEEIGLCSSTSVQAASGIRRDINVSVGSQQPDTKDSPVCPHFTTNGNENSSIEKTSSLESASNIELQTTNTSYEEMKAEQENQELPDEGTLEETLTNETRNADDLEVSSDIIEAVAISSNSFITTGKDSMTVSEVTASISSPSEEDASEMPEFLDKSIVEEEEDDDYVELKVEGSPTEEANLPTELQDNSLSPAASEAGEKLDMFGNDDKLIFQEGKPVTEKQTDTETQDSKDSGIQTMTASGSSAMSPETTVSQIAVESDLGQMLEEGKKATNLTRETKLINDCHGSVSEASSEQKIAKLDVSNVATDTERLELKASPNVEAPQPHRHVLEISRQHEQPGQGIAPDAVNGQRRDSRSTVFRIPEFNWSQMHQRLLTDLLFSIETDIQMWRSHSTKTVMDFVNSSDNVIFVHNTIHLISQVMDNMVMACGGILPLLSAATSATHELENIEPTQGLSIEASVTFLQRLISLVDVLIFASSLGFTEIEAEKSMSSGGILRQCLRLVCAVAVRNCLECQQHSQLKTRGDKALKPMHSLIPLGKSAAKSPVDIVTGGISPVRDLDRLLQDMDINRLRAVVFRDIEDSKQAQFLALAVVYFISVLMVSKYRDILEPQNERHSQSCTETGSENENVSLSEITPAAFSTLTTASVEESESTSSARRRDSGIGEETATGLGSHVEVTPHTAPPGVSAGPDAISEVLSTLSLEVNKSPETKNDRGNDLDTKATPSVSVSKNVNVKDILRSLVNIPADGVTVDPALLPPACLGALGDLSVEQPVQFRSFDRSVIVAAKKSAVSPSTFNTSIPTNAVSVVSSVDSAQASDMGGESPGSRSSNAKLPSVPTVDSVSQDPVSNMSITERLEHALEKAAPLLREIFVDFAPFLSRTLLGSHGQELLIEGTSLVCMKSSSSVVELVMLLCSQEWQNSIQKNAGLAFIELVNEGRLLSQTMKDHLVRVANEAEFILSRQRAEDIHRHAEFESLCAQYSADKREDEKMCDHLIRAAKYRDHVTATQLIQKIINILTDKHGAWGNSAVSRPLEFWRLDYWEDDLRRRRRFVRNPLGSTHPEATLKTAVEHVCIFKLRENSKATDEDILAKGKQSIRSQALGNQNSENEILLEGDDDTLSSVDEKDLENLAGPVSLSTPAQLVAPSVVVKGTLSVTSSELYFEVDEEDPNFKKIDPKILAYTEGLHGKWLFTEIRSIFSRRYLLQNTALEIFMANRVAVMFNFPDPATVKKVVNYLPRVGVGTSFGLPQTRRISLASPRQLFKASNMTQRWQHREISNFEYLMFLNTIAGRSYNDLNQYPVFPWVITNYESEELDLTLPTNFRDLSKPIGALNPKRAAFFAERYESWEDDQVPKFHYGTHYSTASFVLAWLLRIEPFTTYFLNLQGGKFDHADRTFSSISRAWRNSQRDTSDIKELIPEFYYLPEMFVNFNNYNLGVMDDGTVVSDVELPPWAKTSEEFVHINRLALESEFVSCQLHQWIDLIFGYKQQGPEAVRALNVFYYLTYEGAVNLNSITDPVLREAVEAQIRSFGQTPSQLLIEPHPPRGSAMQVSPLMFTDKAQQDVIMVLKFPSNSPVTHVAANTQPGLATPAVITVTANRLFAVNKWHNLPAHQGAVQDQPYQLPVEIDPLIASNTGMHRRQITDLLDQSIQVHSQCFVITSDNRYILVCGFWDKSFRVYSTDTGRLIQVVFGHWDVVTCLARSESYIGGNCYILSGSRDATLLLWYWNGKCSGIGDNPGSETAAPRAILTGHDYEVTCAAVCAELGLVLSGSQEGPCLIHSMNGDLLRTLEGPENCLKPKLIQASREGHCVIFYENGLFCTFSVNGKLQATMETDDNIRAIQLSRDGQYLLTGGDRGVVVVRQVSDLKQLFAYPGCDAGIRAMALSYDQRCIISGMASGSIVLFYNDFNRWHHEYQTRY

SEQ ID NO: 7340 - protein, 901 aa, Homo sapiens
MDMFPLTWVFLALYFSRHQVRGQPDPPCGGRLNSKDAGYITSPGYPQDYPSHQNCEWIVYAPEPNQKIVLNFNPHFEIEKHDCKYDFIEIRDGDSESADLLGKHCGNIAPPTIISSGSMLYIKFTSDYARQGAGFSLRYEIFKTGSEDCSKNFTSPNGTIESPGFPEKYPHNLDCTFTILAKPKMEIILQFLIFDLEHDPLQVGEGDCKYDWLDIWDGIPHVGPLIGKYCGTKTPSELRSSTGILSLTFHTDMAVAKDGFSARYYLVHQEPLENFQCNVPLGMESGRIANEQISASSTYSDGRWTPQQSRLHGDDNGWTPNLDSNKEYLQVDLRFLTMLTAIATQGAISRETQNGYYVKSYKLEVSTNGEDWMVYRHGKNHKVFQANNDATEVVLNKLHAPLLTRFVRIRPQTWHSGIALRLELFGCRVTDAPCSNMLGMLSGLIADSQISASSTQEYLWSPSAARLVSSRSGWFPRIPQAQPGEEWLQVDLGTPKTVKGVIIQGARGGDSITAVEARAFVRKFKVSYSLNGKDWEYIQDPRTQQPKLFEGNMHYDTPDIRRFDPIPAQYVRVYPERWSPAGIGMRLEVLGCDWTDSKPTVETLGPTVKSEETTTPYPTEEEATECGENCSFEDDKDLQLPSGFNCNFDFLEEPCGWMYDHAKWLRTTWASSSSPNDRTFPDDRNFLRLQSDSQREGQYARLISPPVHLPRSPVCMEFQYQATGGRGVALQVVREASQESKLLWVIREDQGGEWKHGRIILPSYDMEYQIVFEGVIGKGRSGEIAIDDIRISTDVPLENCMEPISAFAGGTLLPGTEPTVDTVPMQPIPAYWYYVMAAGGAVLVLVSVALALVLHYHRFRYAAKKTDHSITYKTSHYTNGAPLAVEPTLTIKLEQDRGSHC

SEQ ID NO: 7341 - protein, 502 aa, Homo sapiens
MDEESLESALQTYRAQLQQVELALGAGLDSSEQADLRQLQGDLKELIELTEASLVSVRKSSLLAALDEERPGRQEDAEYQAFREAITEAVEAPAAARGSGSETVPKAEAGPESAAGGQEEEEGEDEEELSGTKVSAPYYSSWGTLEYHNAMVVGTEEAEDGSAGVRVLYLYPTHKSLKPCPFFLEGKCRFKENCRFSHGQVVSLDELRPFQDPDLSSLQAGSACLAKHQDGLWHAARITDVDNGYYTVKFDSLLLREAVVEGDGILPPLRTEATESDSDSDVVGSDAVDSGTCSSAFAGWEVHTRGIGSRLLTKMGYEFGKGLGRHAEGRVEPIHAVVLPRGKSLDQCVETLQKQTRVGKAGTNKPPRCRGRGARPGGRPAPRNVFDFLNEKLQGQAPGALEAGAAPAGRRSKDMYHASKSAKRALSLRLFQTEEKIERTQRDIRSIQEALARNAGRHSVASAQLQEKLAGAQRQLGQLRAQEAGLQQEQRKADTHKKMTEF

SEQ ID NO: 7342 - protein, 1307 aa, Homo sapiens
MELEDGVVYQEEPGGSGAVMSERVSGLAGSIYREFERLIGRYDEEVVKELMPLVVAVLENLDSVFAQDQEHQVELELLRDDNEQLITQYEREKALRKHAEEKFIEFEDSQEQEKKDLQTRVESLESQTRQLELKAKNYADQISRLEEREAELKKEYNALHQRHTEMIHNYMEHLERTKLHQLSGSDQLESTAHSRIRKERPISLGIFPLPAGDGLLTPDAQKGGETPGSEQWKFQELSQPRSHTSLKDELSDVSQGGSKATTPASTANSDVATIPTDTPLKEENEGFVKVTDAPNKSEISKHIEVQVAQETRNVSTGSAENEEKSEVQAIIESTPELDMDKDLSGYKGSSTPTKGIENKAFDRNTESLFEELSSAGSGLIGDVDEGADLLGMGREVENLILENTQLLETKNALNIVKNDLIAKVDELTCEKDVLQGELEAVKQAKLKLEEKNRELEEELRKARAEAEDARQKAKDDDDSDIPTAQRKRFTRVEMARVLMERNQYKERLMELQEAVRWTEMIRASRENPAMQEKKRSSIWQFFSRLFSSSSNTTKKPEPPVNLKYNAPTSHVTPSVKKRSSTLSQLPGDKSKAFDFLSEETEASLASRREQKREQYRQVKAHVQKEDGRVQAFGWSLPQKYKQVTNGQGENKMKNLPVPVYLRPLDEKDTSMKLWCAVGVNLSGGKTRDGGSVVGASVFYKDVAGLDTEGSKQRSASQSSLDKLDQELKEQQKELKNQEELSSLVWICTSTHSATKVLIIDAVQPGNILDSFTVCNSHVLCIASVPGARETDYPAGEDLSESGQVDKASLCGSMTSNSSAETDSLLGGITVVGCSAEGVTGAATSPSTNGASPVMDKPPEMEAENSEVDENVPTAEEATEATEGNAGSAEDTVDISQTGVYTEHVFTDPLGVQIPEDLSPVYQSSNDSDAYKDQISVLPNEQDLVREEAQKMSSLLPTMWLGAQNGCLYVHSSVAQWRKCLHSIKLKDSILSIVHVKGIVLVALADGTLAIFHRGVDGQWDLSNYHLLDLGRPHHSIRCMTVVHDKVWCGYRNKIYVVQPKAMKIEKSFDAHPRKESQVRQLAWVGDGVWVSIRLDSTLRLYHAHTYQHLQDVDIEPYVSKMLGTGKLGFSFVRITALMVSCNRLWVGTGNGVIISIPLTETNKTSGVPGNRPGSVIRVYGDENSDKVTPGTFIPYCSMAHAQLCFHGHRDAVKFFVAVPGQVISPQSSSSGTDLTGDKAGPSAQEPGSQTPLKSMLVISGGEGYIDFRMGDEGGESELLGEDLPLEPSVTKAERSHLIVWQVMYGNE

SEQ ID NO: 7343 - protein, 810 aa, Homo sapiens
MPMDLILVVWFCVCTARTVVGFGMDPDLQMDIVTELDLVNTTLGVAQVSGMHNASKAFLFQDIEREIHAAPHVSEKLIQLFRNKSEFTILATVQQKPSTSGVILSIRELEHSYFELESSGLRDEIRYHYIHNGKPRTEALPYRMADGQWHKVALSVSASHLLLHVDCNRIYERVIDPPDTNLPPGINLWLGQRNQKHGLFKGIIQDGKIIFMPNGYITQCPNLNHTCPTCSDFLSLVQGIMDLQELLAKMTAKLNYAETRLSQLENCHCEKTCQVSGLLYRDQDSWVDGDHCRNCTCKSGAVECRRMSCPPLNCSPDSLPVHIAGQCCKVCRPKCIYGGKVLAEGQRILTKSCRECRGGVLVKITEMCPPLNCSEKDHILPENQCCRVCRGHNFCAEGPKCGENSECKNWNTKATCECKSGYISVQGDSAYCEDIDECAAKMHYCHANTVCVNLPGLYRCDCVPGYIRVDDFSCTEHDECGSGQHNCDENAICTNTVQGHSCTCKPGYVGNGTICRAFCEEGCRYGGTCVAPNKCVCPSGFTGSHCEKDIDECSEGIIECHNHSRCVNLPGWYHCECRSGFHDDGTYSLSGESCIDIDECALRTHTCWNDSACINLAGGFDCLCPSGPSCSGDCPHEGGLKHNGQVWTLKEDRCSVCSCKDGKIFCRRTACDCQNPSADLFCCPECDTRVTSQCLDQNGHKLYRSGDNWTHSCQQCRCLEGEVDCWPLTCPNLSCEYTAILEGECCPRCVSDPCLADNITYDIRKTCLDSYGVSRLSGSVWTMAGSPCTTCKCKNGRVCCSVDFECLQNN

SEQ ID NO: 7344 - protein, 507 aa, Homo sapiens
MPWLLSAPKLVPAVANVRGLSGCMLCSQRRYSLQPVPERRIPNRYLGQPSPFTHPHLLRPGEVTPGLSQVEYALRRHKLMSLIQKEAQGQSGTDQTVVVLSNPTYYMSNDIPYTFHQDNNFLYLCGFQEPDSILVLQSLPGKQLPSHKAILFVPRRDPSRELWDGPRSGTDGAIALTGVDEAYTLEEFQHLLPKMKAETNMVWYDWMRPSHAQLHSDYMQPLTEAKAKSKNKVRGVQQLIQRLRLIKSPAEIERMQIAGKLTSQAFIETMFTSKAPVEEAFLYAKFEFECRARGADILAYPPVVAGGNRSNTLHYVKNNQLIKDGEMVLLDGGCESSCYVSDITRTWPVNGRFTAPQAELYEAVLEIQRDCLALCFPGTSLENIYSMMLTLIGQKLKDLGIMKNIKENNAFKAARKYCPHHVGHYLGMDVHDTPDMPRSLPLQPGMVITIEPGIYIPEDDKDAPEKFRGLGVRIEDDVVVTQDSPLILSADCPKEMNDIEQICSQAS

SEQ ID NO: 7345 - protein, 436 aa, Homo sapiens
MLKVSAVLCVCAAAWCSQSLAAAAAVAAAGGRSDGGNFLDDKQWLTTISQYDKEVGQWNKFRDEVEDDYFRTWSPGKPFDQALDPAKDPCLKMKCSRHKVCIAQDSQTAVCISHRRLTHRMKEAGVDHRQWRGPILSTCKQCPVVYPSPVCGSDGHTYSFQCKLEYQACVLGKQISVKCEGHCPCPSDKPTSTSRNVKRACSDLEFREVANRLRDWFKALHESGSQNKKTKTLLRPERSRFDTSILPICKDSLGWMFNRLDTNYDLLLDQSELRSIYLDKNEQCTKAFFNSCDTYKDSLISNNEWCYCFQRQQDPPCQTELSNIQKRQGVKKLLGQYIPLCDEDGYYKPTQCHGSVGQCWCVDRYGNEVMGSRINGVADCAIDFEISGDFASGDFHEWTDDEDDEDDIMNDEDEIEDDDEDEGDDDDGGDDHDVYI

SEQ ID NO: 7346 - protein, 354 aa, Homo sapiens
MEAATAPEVAAGSKLKVKEASPADAEPPQASPGQGAGSPTPQLLPPIEEHPKIWLPRALRQTYIRKVGDTVNLLIPFQGKPKPQAIWTHDGCALDTRRVSVRNGEQDSILFIREAQRADSGRYQLRVQLGGLEATATIDILVIERPGPPQSIKLVDVWGFSATLEWTPPQDTGNTALLGYTVQKADTKSGLWFTVLEHYHRTSCIVSDLIIGNSYAFRVFAENQCGLSETAPITTDLAHIQKAATVYKTKGFAQRDFSEAPKFTQPLADCTTVTGYNTQLFCCVRASPRPKIIWLKNKMDIQGNPKYRALTHLGICSLEIRKPGPFDGGIYTCKAVNPLGEASVDCRVDVKVPN

SEQ ID NO: 7347 - protein, 330 aa, Homo sapiens
MAAAAGRSLLLLLSSRGGGGGGAGGCGALTAGCFPGLGVSRHRQQQHHRTVHQRIASWQNLGAVYCSTVVPSDDVTVVYQNGLPVISVRLPSRRERCQFTLKPISDSVGVFLRQLQEEDRGIDRVAIYSPDGVRVAASTGIDLLLLDDFKLVINDLTYHVRPPKRVEMGFCHVGQNGFELLTSSYLPASASQSAEIIAVRIEISRKAEKRTTLVLWGGLAYMATQFGILARLTWWEYSWDIMEPVTYFITYGSAMAMYAYFVMTRQEYVYPEARDRQYLLFFHKGAKKSRFDLEKYNQLKDAIAQAEMDLKRLRDPLQVHLPLRQIGEKD

SEQ ID NO: 7348 - protein, 3997 aa, Homo sapiens
MLESYVTPILMSYVNRYIKNLKPSDLQLSLWGGDVVLSKLELKLDVLEQELKLPFTFLSGHIHELRIHVPWTKLGSEPVVITINTMECILKLKDGIQDDHESCGSNSTNRSTAESTKSSIKPRRMQQAAPTDPDLPPGYVQSLIRRVVNNVNIVINNLILKYVEDDIVLSVNITSAECYTVGELWDRAFMDISATDLVLRKVINFSDCTVCLDKRNASGKIEFYQDPLLYKCSFRTRLHFTYENLNSKMPSVIKIHTLVESLKLSITDQQLPMFIRIMQLGIALYYGEIGNFKEGEIEDLTCHNKDMLGNITGSEDETRIDMQYPAQHKGQELYSQQDEEQPQGWVSWAWSFVPAIVSYDDGEEDFVGNDPASTMHQQKAQTLKDPIVSIGFYCTKATVTFKLTEMQVESSYYSPQKVKSKEVLCWEQEGTTVEALMMGEPFFDCQIGFVGCRAMCLKGIMGVKDFEENMNRSETEACFFICGDNLSTKGFTYLTNSLFDYRSPENNGTRAEFILDSTHHKETYTEIAGMQRFGAFYMDYLYTMENTSGKGSTNQQDFSSGKSEDLGTVQEKSTKSLVIGPLDFRLDSSAVHRILKMIVCALEHEYEPYSRLKSDIKDENETILNPEEVALLEEYIPTRHTSVTLLKCTCTISMAEFNLLDHLLPVIMGEKNSSNFMNTTNFQSLRPLPSIRILVDKINLEHSVPMYAEQLVHVVSSLTQPSDNLLHYCYVHCYLKIFGFQAGLTSLDCSGSYCLPVPVIPSFSTALYGKLLKLPTCWTKRSQIAITEGIFELPNLTIQATRAQTLLLQAIYQSWSHLGNVSSSAVIEALINEIFLSIGVKSKNPLPTLEGSIQNVELKYCSTSLVKCASGTMGSIKICAKAPVDSGKEKLIPLLQGPSDTKDLHSTKWLNESRKPESLLAPDLMAFTIQVPQYIDYCHNSGAVLLCSIQGLAVNIDPILYTWLIYQPQKRTSRHMQQQPVVAVPLVMPVCRRKEDEVSIGSAPLAKQQSYQASEYASSPVKTKTVTESRPLSVPVKAMLNISESCRSPEERMKEFIGIVWNAVKHLTLQLEVQSCCVFIPNDSLPSPSTIVSGDIPGTVRSWYHGQTSMPGTLVLCLPQIKIISAGHKYMEPLQEIPFVIPRPILEEGDAFPWTISLHNFSIYTLLGKQVTLCLVEPMGCTSTLAVTSQKLLATGPDTRHSFVVCLHVDLESLEIKCSNPQVQLFYELTDIMNKVWNKIQKRGNLNLSPTSPETMAGPVPTSPVRSSIGTAPPDTSTCSPSADIGTTTEGDSIQAGEESPFSDSVTLEQTTSNIGGTSGRVSLWMQWVLPKITIKLFAPDPENKGTEVCMVSELEDLSASIDVQDVYTKVKCKIESFNIDHYRSRPGEGWQSGHFEGVFLQCKEKSVTTTKLLDGTHQQHGFLSLTYTKAVTKNVRHKLTSRNERRSFHKLSEGLMDGSPHFLHEILLSAQAFDIVLYFPLLNAIASIFQAKLPKTQKEKRKSPGQPMRTHTLTSRNLPLIYVNTSVIRIFIPKTEEMQPTVEANQAAKEDTVVLKIGSVAMAPQADNPLGRSVLRKDIYQRALNLGILRDPGSEIEDRQYQIDLQSINIGTAQWHQLKPEKESVSGGVVTETERNSQNPALEWNMASSIRRHQERRAILTPVLTDFSVRITGAPAVIFTKVVSPENLHTEEILVCGHSLEVNITTNLDFFLSVAQVQLLHQLIVANMTGLEPSNKAAEISKQEQKKVDIFDGGMAETSSRYSGAQDSGIGSDSVKIRIVQIEQHSGASQHRIARPSRQSSIVKNLNFIPFDIFITASRISLMTYSCMALSKSKSQEQKNNEKTDKSSLNLPEVDSDVAKPNQACISTVTAEDLLRSSISFPSGKKIGVLSLESLHASTRSSARQALGITIVRQPGRRGTGDLQLEPFLYFIVSQPSLLLSCHHRKQRVEVSIFDAVLKGVASDYKCIDPGKTLPEALDYCTVWLQTVPGEIDSKSGIPPSFITLQIKDFLNGPADVNLDISKPLKANLSFTKLDQINLFLKKIKNAHSLAHSEETSAMSNTMVNKDDLPVSKYYRGKLSKPKIHGDGVQKISAQENMWRAVSCFQKISVQTTQIVISMETVPHTSKPCLLASLSNLNGSLSVKATQKVPGIILGSSFLLSINDFLLKTSLKERSRILIGPCCATANLEAKWCKHSGNPGPEQSIPKISIDLRGGLLQVFWGQEHLNCLVLLHELLNGYLNEEGNFEVQVSEPVPQMSSPVEKNQTFKSEQSSDDLRTGLFQYVQDAESLKLPGVYEVLFYNETEDCPGMMLWRYPEPRVLTLVRITPVPFNTTEDPDISTADLGDVLQVPCSLEYWDELQKVFVAFREFNLSESKVCELQLPDINLVNDQKKLVSSDLWRIVLNSSQNGADDQSSASESGSQSTCDPLVTPTALAACTRVDSCFTPWFVPSLCVSFQFAHLEFHLCHHLDQLGTAAPQYLQPFVSDRNMPSELEYMIVSFREPHMYLRQWNNGSVCQEIQFLAQADCKLLECRNVTMQSVVKPFSIFGQMAVSSDVVEKLLDCTVIVDSVFVNLGQHVVHSLNTAIQAWQQNKCPEVEELVFSHFVICNDTQETLRFGQVDTDENILLASLHSHQYSWRSHKSPQLLHICIEGWGNWRWSEPFSVDHAGTFIRTIQYRGRTASLIIKVQQLNGVQKQIIICGRQIICSYLSQSIELKVVQHYIGQDGQAVVREHFDCLTAKQKLPSYILENNELTELCVKAKGDEDWSRDVCLESKAPEYSIVIQVPSSNSSIIYVWCTVLTLEPNSQVQQRMIVFSPLFIMRSHLPDPIIIHLEKRSLGLSETQIIPGKGQEKPLQNIEPDLVHHLTFQAREEYDPSDCAVPISTSLIKQIATKVHPGGTVNQILDEFYGPEKSLQPIWPYNKKDSDRNEQLSQWDSPMRVKLSIWKPYVRTLLIELLPWALLINESKWDLWLFEGEKIVLQVPAGKIIIPPNFQEAFQIGIYWANTNTVHKSVAIKLVHNLTSPKWKDGGNGEVVTLDEEAFVDTEIRLGAFPGHQKLCQFCISSMVQQGIQIIQIEDKTTIINNTPYQIFYKPQLSVCNPHSGKEYFRVPDSATFSICPGGEQPAMKSSSLPCWDLMPDISQSVLDASLLQKQIMLGFSPAPGADSSQCWSLPAIVRPEFPRQSVAVPLGNFRENGFCTRAIVLTYQEHLGVTYLTLSEDPSPRVIIHNRCPVKMLIKENIKDIPKFEVYCKKIPSECSIHHELYHQISSYPDCKTKDLLPSLLLRVEPLDEVTTEWSDAIDINSQGTQVVFLTGFGYVYVDVVHQCGTVFITVAPEGKAGPILTNTNRAPEKIVTFKMFITQLSLAVFDDLTHHKASAELLRLTLDNIFLCVAPGAGPLPGEEPVAALFELYCVEICCGDLQLDNQLYNKSNFHFAVLVCQGEKAEPIQCSKMQSLLISNKELEEYKEKCFIKLCITLNEGKSILCDINEFSFELKPARLYVEDTFVYYIKTLFDTYLPNSRLAGHSTHLSGGKQVLPMQVTQHARALVNPVKLRKLVIQPVNLLVSIHASLKLYIASDHTPLSFSVFERGPIFTTARQLVHALAMHYAAGALFRAGWVVGSLDILGSPASLVRSIGNGVADFFRLPYEGLTRGPGAFVSGVSRGTTSFVKHISKGTLTSITNLATSLARNMDRLSLDEEHYNRQEEWRRQLPESLGEGLRQGLSRLGISLLGAIAGIVDQPMQNFQKTSEAQASAGHKAKGVISGVGKGIMGVFTKPIGGAAELVSQTGYGILHGAGLSQLPKQRHQPSDLHADQAPNSHVKYVWKMLQSLGRPEVHMALDVVLVRGSGQEHEGCLLLTSEVLFVVSVSEDTQQQAFPVTEIDCAQDSKQNNLLTVQLKQPRVACDVEVDGVRERLSEQQYNRLVDYITKTSCHLAPSCSSMQIPCPVVAAEPPPSTVKTYHYLVDPHFAQVFLSKFTMVKNKALRKGFP

SEQ ID NO: 7349 - protein, 641 aa, Homo sapiens
MRKLRPKDSREPAPGSPVRSGCLQRLSHYSGIQRPFLVLPPLMEWIRVAVAHAGHRRSFSMDSDDVRQAARLLLPGVDCEPRQLRADDCFCASRKLDAVAIEAKFKQDLGFRMLNCGRTDLVKQAVSLLGPDGINTMSEQGMTPLMYACVRGDEAMVQMLLDAGADLNVEVVSTPHKYPSVHPETRHWTALTFAVLHGHIPVVQLLLDAGAKVEGSVEHGEENYSETPLQLAAAVGNFELVSLLLERGADPLIGTMYRNGISTTPQGDMNSFSQAAAHGHRNVFRKLLAQPEKEKSDILSLEEILAEGTDLAETAPPPLCASRNSKAKLRALREAMYHSAEHGYVDVTIDIRSIGVPWTLHTWLESLRIAFQQHRRPLIQCLLKEFKTIQEEEYTEELVTQGLPLMFEILKASKNEVISQQLCVIFTHCYGPYPIPKLTEIKRKQTSRLDPHFLNNKEMSDVTFLVEGRPFYAHKVLLFTASPRFKALLSSKPTNDGTCIEIGYVKYSIFQLVMQYLYYGGPESLLIKNNEIMELLSAAKFFQLEALQRHCEIICAKSINTDNCVDIYNHAKFLGVTELSAYCEGYFLKNMMVLIENEAFKQLLYDKNGEGTGQDVLQDLQRTLAIRIQSIHLSSSKGSVV

SEQ ID NO: 7350 - protein, 244 aa, Homo sapiens [sequence omitted]

SEQ ID NO: 7351 - protein, 862 aa, Homo sapiens
MKTVLMVAEKPSLAQSIAKILSRGSLSSHKGLNGACSVHEYTGTFAGQPVRFKMTSVCGHVMTLDFLGKYNKWDKVDPAELFSQAPTEKKEANPKLNMVKFLQVEGRGCDYIVLWLDCDKEGENICFEVLDAVLPVMNKAHGGEKTVFRARFSSITDTDICNAMACLGEPDHNEALSVDARQELDLRIGCAFTRFQTKYFQGKYGDLDSSLISFGPCQTPTLGFCVERHDKIQSFKPETYWVLQAKVNTDKDRSLLLDWDRVRVFDREIAQMFLNMTKLEKEAQVEATSRKEKAKQRPLALNTVEMLRVASSSLGMGPQHAMQTAERLYTQGYISYPRTETTHYPENFDLKGSLRQQANHPYWADTVKRLLAEGINRPRKGHDAGDHPPITPMKSATEAELGGDAWRLYEYITRHFIATVSHDCKYLQSTISFRIGPELFTCSGKTVLSPGFTEVMPWQSVPLEESLPTCQRGDAFPVGEVKMLEKQTNPPDYLTEAELITLMEKHGIGTDASIPVHINNICQRNYVTVESGRRLKPTNLGIVLVHGYYKIDAELVLPTIRSAVEKQLNLIAQGKADYRQVLGHTLDVFKRKFHYFVDSIAGMDELMEVSFSPLAATGKPLSRCGKCHRFMKYIQAKPSRLHCSHCDETYTLPQNGTIKLYKELRCPLDDFELVLWSSGSRGKSYPLCPYCYNHPPFRDMKKGMGCNECTHPSCQHSLSMLGIGQCVECESGVLVLDPTSGPKWKVACNKCNVVAHCFENAHRVRVSADTCSVCEAALLDVDFNKAKSPLPGDETQHMGCVFCDPVFQELVELKHAASCHPMHRGGPGRRQGRGRGRARRPPGKPNPRRPKDKMSALAAYFV

SEQ ID NO: 7352 - protein, 1325 aa, Homo sapiens
MKEPLDGECGKAVVPQQELLDKIKEEPDNAQEYGCVQQPKTQESKLKIGGVSSVNERPIAQQLNPGFQLSFASSGPSVLLPSVPAVAIKVFCSGCKKMLYKGQTAYHKTGSTQLFCSTRCITRHSSPACLPPPPKKTCTNCSKDILNPKDVITTRFENSYPSKDFCSQSCLSSYELKKKPVVTIYTKSISTKCSMCQKNADTRFEVKYQNVVHGLCSDACFSKFHSTNNLTMNCCENCGSYCYSSSGPCQSQKVFSSTSVTAYKQNSAQIPPYALGKSLRPSAEMIETTNDSGKTELFCSINCLSAYRVKTVTSSGVQVSCHSCKTSAIPQYHLAMSNGTIYSFCSSSCVVAFQNVFSKPKGTNSSAVPLSQGQVVVSPPSSRSAVSIGGGNTSAVSPSSIRGSAAASLQPLAEQSQQVALTHTVVKLKCQHCNHLFATKPELLFYKGKMFLFCGKNCSDEYKKKNKVVAMCDYCKLQKIIKETVRFSGVDKPFCSEVCKFLSARDFGERWGNYCKMCSYCSQTSPNLVENRLEGKLEEFCCEDCMSKFTVLFYQMAKCDGCKRQGKLSESIKWRGNIKHFCNLFCVLEFCHQQIMNDCLPQNKVNISKAKTAVTELPSARTDTTPVITSVMSLAKIPATLSTGNTNSVLKGAVTKEAAKIIQDESTQEDAMKFPSSQSSQPSRLLKNKGISCKPVTQTKATSCKPHTQHKECQTDLPMPNEKNDAELDSPPSKKKRLGFFQTYDTEYLKVGFIICPGSKESSPRPQCVICGEILSSENMKPANLSHHLKTKHSELENKPVDFFEQKSLEMECQNSSLKKCLLVEKSLVKASYLIAFQTAASKKPFSIAEELIKPYLVEMCSEVLGSSAGDKMKTIPLSNVTIQHRIDELSADIEDQLIQKVRESKWFALQIDESSEISNITLLLCYIRFIDYDCRDVKEELLFCIEMPTQITGFEIFELINKYIDSKSLNWKHCVGLCTDGAASMTGRYSGLKAKIQEVAMNTAAFTHCFIHRERLVAEKLSPCLHKILLQSAQILSFIKSNALNSRMLTILCEEMGSEHVSLPLHAEVRWISRGRMLKRLFELRHEIEIFLSQKHSDLAKYFHDEEWVGKLAYLSDIFSLINELNLSLQGTLTTFFNLCNKIDVFKRKLKMWLKRTQENDYDMFPSFSEFSNSSGLNMTDITRIIFEHLEGLSQVFSDCFPPEQDLRSGNLWIIHPFMNHQNNNLTDFEEEKLTELSSDLGLQALFKSVSVTQFWINAKTSYPELHERAMKFLLPFSTVYLCDAAFSALTESKQKNLLGSGPALRLAVTSLIPRIEKLVKEKE

SEQ ID NO: 7353 - protein, 894 aa, Homo sapiens
MSRRKQGNPQHLSQRELITPEADHVEAAILEEDEGLEIEEPSGLGLMVGGPDPDLLTCGQCQMNFPLGDILVFIEHKRKQCGGSLGACYDKALDKDSPPPSSRSELRKVSEPVEIGIQVTPDEDDHLLSPTKGICPKQENIAGPCRPAQLPAVAPIAASSHPHSSVITSPLRALGALPPCLPLPCCSARPVSGDGTQGEGQTEAPFGCQCQLSGKDEPSSYICTTCKQPFNSAWFLLQHAQNTHGFRIYLEPGPASSSLTPRLTIPPPLGPEAVAQSPLMNFLGDSNPFNLLRMTGPILRDHPGFGEGRLPGTPPLFSPPPRHHLDPHRLSAEEMGLVAQHPSAFDRVMRLNPMAIDSPAMDFSRRLRELAGNSSTPPPVSPGRGNPMHRLLNPFQPSPKSPFLSTPPLPPMPPGGTPPPQPPAKSKSCEFCGKTFKFQSNLIVHRRSHTGEKPYKCQLCDHACSQASKLKRHMKTHMHKAGSLAGRSDDGLSAASSPEPGTSELAGEGLKAADGDFRHHESDPSLGHEPEEEDEEEEEEEEELLLENESRPESSFSMDSELSRNRENGGGGVPGVPGAGGGAAKALADEKALVLGKVMENVGLGALPQYGELLADKQKRGAFLKRAAGGGDAGDDDDAGGCGDAGAGGAVNGRGGGFAPGTEPFPGLFPRKPAPLPSPGLNSAAKRIKVEKDLELPPAALIPSENVYSQWLVGYAASRHFMKDPFLGFTDARQSPFATSSEHSSENGSLRFSTPPGDLLDGGLSGRSGTASGGSTPHLGGPGPGRPSSKEGRRSDTCEYCGKVFKNCSNLTVHRRSHTGERPYKCELCNYACAQSSKLTRHMKTHGQIGKEVYRCDICQMPFSVYSTLEKHMKKWHGEHLLTNDVKIEQAERS

SEQ ID NO: 7354 - protein, 1366 aa, Homo sapiens
MENYFQAEAYNLDKVLDEFEQNEDETVSSTLLDTKWNKILDPPSHRLSFNPTLASVNESAVSNESQPQLKVFSLAHSAPLTTEEEDHCANGQDCNLNPEIATMWIDENAVAEDQLIKRNYSWDDQCSAVEVGEKKCGNLACLPDEKNVLVVAVMHNCDKRTLQNDLQDCNNYNSQSLMDAFSCSLDNENRQTDQFSFSINESTEKDMNSEKQMDPLNRPKTEGRSVNHLCPTSSDSLASVCSPSQLKDDGSIGRDPSMSAITSLTVDSVISSQGTDGCPAVKKQENYIPDEDLTGKISSPRTDLGSPNSFSHMSEGILMKKEPAEESTTEESLRSGLPLLLKPDMPNGSGRNNDCERCSDCLVPNEVRADENEGYEHEETLGTTEFLNMTEHFSESQDMTNWKLTKLNEMNDSQVNEEKEKFLQISQPEDTNGDSGGQCVGLADAGLDLKGTCISESEECDFSTVIDTPAANYLSNGCDSYGMQDPGVSFVPKTLPSKEDSVTEEKEIEESKSECYSNIYEQRGNEATEGSGLLLNSTGDLMKKNYLHNFCSQVPSVLGQSSPKVVASLPSISVPFGGARPKQPSNLKLQIPKPLSDHLQNDFPANSGNNTKNKNDILGKAKLGENSATNVCSPSLGNISNVDTNGEHLESYEAEISTRPCLALAPDSPDNDLRAGQFGISARKPFTTLGEVAPVWVPDSQAPNCMKCEARFTFTKRRHHCRACGKVFCASCCSLKCKLLYMDRKEARVCVICHSVLMNVAQPREQRRVWFADGILPNGEVADAAKLTMNGTSSAGTLAVSHDPVKPVTTSPLPAETDICLFSGSITQVGSPVGSAMNLIPEDGLPPILISTGVKGDYAVEEKPSQISVMQQLEDGGPDPLVFVLNANLLSMVKIVNYVNRKCWCFTTKGMHAVGQSEIVILLQCLPDEKCLPKDIFNHFVQLYRDALAGNVVSNLGHSFFSQSFLGSKEHGGFLYVTSTYQSLQDLVLPTPPYLFGILIQKWETPWAKVFPIRLMLRLGAEYRLYPCPLFSVRFRKPLFGETGHTIMNLLADFRNYQYTLPVVQGLVVDMEVRKTSIKIPSNRYNEMMKAMNKSNEHVLAGGACFNEKADSHLVCVQNDDGNYQTQAISIHNQPRKVTGASFFVFSGALKSSSGYLAKSSIVEDGVMVQITAENMDSLRQALREMKDFTITCGKADAEEPQEHIHIQWVDDDKNVSKGVVSPIDGKSMETITNVKIFHGSEYKANGKVIRWTEVFFLENDDQHNCLSDPADHSRLTEHVAKAFCLALCPHLKLLKEDGMTKLGLRVTLDSDQVGYQAGSNGQPLPSQYMNDLDSALVPVIHGGACQLSEGPVVMELIFYILENIV

SEQ ID NO: 7355 - protein, 1086 aa, Homo sapiens
MSPTQWDFPVELCCRPMAFVTLTGLDVVYNAVHRAVWDAFCANRRADRVPISFKVLPGDHEYPKCRPKRTSYEWYIPKGILKTGWMNKHLNLVPALVVVFYELDWDEPQWKEKQSECATRVEIVRQSLQGRNTKVAVVLIQKKTPLPPGEDVIASERAAALCNACELSGKSLFVLPHTDHLVGYIIRLENAFYEHAQTYYYTEIRRVKSHKEFLNKTTHQLLFVRHQFKIAFFSELKQDTQNALKNYRTAYNLVHELRAHETNILEIKTMAGFINYKICRLCFQHNTPLDAIAQFRKHIDLCKKKIGSAELSFEHDAWMSKQFQAFGDLFDEAIKLGLTAIQTQNPGFYYQQAAYYAQERKQLAKTLCNHEASVMYPNPDPLETQTGVLDFYGQRSWRQGILSFDLSDPEKEKVGILAIQLKERNVVHSEIIITLLSNAVAQFKKYKCPRMKSHLMVQMGEEYYYAKDYTKALKLLDYVMCDYRSEGWWTLLTSVLTTALKCSYLMAQLKDYITYSLELLGRASTLKDDQKSRIEKNLINVLMNESPDPEPDCDILAVKTAQKLWADRISLAGSNIFTIGVQDFVPFVQCKAKFHAPSFHVDVPVQFDIYLKADCPHPIRFSKLCVSFNNQEYNQFCVIEEASKANEVLENLTQGKMCLVPGKTRKLLFKFVAKTEDVGKKIEITSVDLALGNETGRCVVLNWQGGGGDAASSQEALQAARSFKRRPKLPDNEVHWDSIIIQASTMIISRVPNISVHLLHEPPALTNEMYCLVVTVQSHEKTQIRDVKLTAGLKPGQDANLTQKTHVTLHGTELCDESYPALLTDIPVGDLHPGEQLEKMLYVRCGTVGSRMFLVYVSYLINTTVEEKEIVCKCHKDETVTIETVFPFDVAVKFVSTKFEHLERVYADIPFLLMTDLLSASPWALTIVSSELQLAPSMTTVDQLESQVDNVILQTGESASECFCLQCPSLGNIEGGVATGHYIISWKRTSAMENIPIITTVITLPHVIVENIPLHVNADLPSFGRVRESLPVKYHLQNKTDLVQDVEISVEPSDAFMFSGLKQIRLPAQAFYTYQYFCQATGSTHG

SEQ ID NO: 7356 - protein, 707 aa, Homo sapiens
MSRDRFRSRGGGGGGFHRRGGGGGRGGLHDFRSPPPGMGLNQNRGPMGPGPGQSGPKPPIPPPPPHQQQQQPPPQQPPPQQPPPHQPPPHPQPHQQQQPPPPPQDSSKPVVAQGPGPAPGVGSAPPASSSAPPATPPTSGAPPGSGPGPTPTPPPAVTSAPPGAPPPTPPSSGVPTTPPQAGGPPPPPAAVPGPGPGPKQGPGPGGPKGGKMPGGPKPGGGPGLSTPGGHPKPPHRGGGEPRGGRQHHPPYHQQHHQGPPPGGPGGRSEEKISDSEGFKANLSLLRRPGEKTYTQRCRLFVGNLPADITEDEFKRLFAKYGEPGEVFINKGKGFGFIKLESRALAEIAKAELDDTPMRGRQLRVRFATHAAALSVRNLSPYVSNELLEEAFSQFGPIERAVVIVDDRGRSTGKGIVEFASKPAARKAFERCSEGVFLLTTTPRPVIVEPLEQLDDEDGLPEKLAQKNPMYQKERETPPRFAQHGTFEYEYSQRWKSLDEMEKQQREQVEKNMKDAKDKLESEMEDAYHEHQANLLRQDLMRRQEELRRMEELHNQEMQKRKEMQLRQEEERRRREEEMMIRQREMEEQMRRQREESYSRMGYMDPRERDMRMGGGGAMNMGDPYGSGGQKFPPLGGGGGIGYEANPGVPPATMSGSMMGSDMRTERFGQGGAGPVGGQGPRGMGPGTPAGYGRGREEYEGPNKKPRF

SEQ ID NO: 7357 - protein, 608 aa, Homo sapiens
MARARAGALLALWVLGAAAHPQCLDFRPPFRPTQPLRLCAQYSDFGCCDEGRDAELTRRFWALASRVDAAEWAACAGYARDLLCQECSPYAAHLYDAEDPFTPLRTVPGLCQDYCLDMWHKCRGLFRHLSTDQELWALEGNLARFCRYLSLDDTDYCFPYLLVNKNLNSNLGHVVADAKGCLQLCLEEVANGLRNPVAMVHARDGTHRFFVAEQVGLVWAYLPDRSRLGKPFLNISRVVLTSPWEGDERGFLGIAFHPSFQHNRRLYVYYSVGIRSSEWIRISEFRVSEDDENAVDHSSERIILEVKEPASNHNGGQLLFGDDGYLYIFTGDGGMAGDPFGTFGNAQNKSALLGKVLRIDVDRKERGLPYGIPPDNPFVGDPAAQPEVYALGVRNMWRCSFDRGDPSSGTGRGRLFCGDVGQNKFEEVDVVERGGNYGWRAREGFECYDRSLCANTSLNDLLPIFAYPHTVGKSVTGGYVYRGCEYPNLNGLYIFGDFMSGRLMSLQENPGTGQWQYSEICMGHGQTCEFPGLINNYYPYIISFGEDEAGELYFMSTGEPSATAPRGVVYKIIDASSCKARSAMPGYVPAPSVCSSLTSQPFILQWWK

SEQ ID NO: 7358 - protein, 496 aa, Homo sapiens [sequence omitted]

SEQ ID NO: 7359 - protein, 616 aa, Homo sapiens
SSFESRLMKLENSIIPVHKQTENLQRLQENVEKTLSCLDHVISYYHVASDTEKIIREGPTGRLEEYLGSMAKIQKAVEYFQDNSPDSPELNKVKLLFERGKEALESEFRSLMTRHSKVVSPVLILDLISGDDDLEAQEDVTLEHLPESVLQDVIRISRWLVEYGRNQDFMNVYYQIRSSQLDRSIKGLKEHFHKSSSSSGVPYSPAIPNKRKDTPTKKPVKRPGTIRKAQNLLKQYSQHGLDGKKGGSNLIPLEGRDDMLDVETDAYIHCVSAFVKLAQSEYQLLADIIPEHHQKKTFDSLIQDALDGLMLEGENIVSAARKAIVRHDFSTVLTVFPILRHLKQTKPEFDQVLQGTAASTKNKLPGLITSMETIGAKALEDFADNIKNDPDKEYNMPKDGTVHELTSNAILFLQQLLDFQETAGAMLASQGKVLGNLQLNLLSKSKVYEDPALSAIFLHNNYNYILKSLEKSELIQLVAVTQKTAERSYREHIEQQIQTYQRSWLKVTDYIAEKNLPVFQPGVKLRDKERQIIKERFKGFNDGLEELCKIQKAWAIPDTEQRDRIRQAQKTIVKETYGAFLQKFGSVPFTKNPEKYIKYGVEQVGDMIDRLFDTSA

SEQ ID NO: 7360 - protein, 3371 aa, Homo sapiens
MSPCGRKMGEGRQQRRAPVGKLLLLPGRRDTPHGRSGSSGARTQRSLLWLLVHVWLWAASGSSAQLFNLTLSVDEGLPPDTLVGDIRAGLPAAQQQEGSGFFLSEDSDDSPLLDDFHVHPDTGIIRTARRLDRERRDHYSFVAATLLGAVVQVEIRVNDVNDHSPRFPLDSLQLDVSELSPPGTAFRLPVAHDPDAGLFSTQGYTLVQPSDLPKDPAGPFFQLRYRTPGPLPSPLLPGSSSPLEPLDLVLLRRLDREEAAAHRLQIEAWDGGRPRRTGLLSVELRVLDENDNPPVFEQDEYRAAVREDAQPGAEVCRVRATDRDLGPNGFVRYSVRARQVPGAGSGGGALGDAAYFAVEELSGVVRVWRPLDREAQAWHQLVVEARDGGAEPEVATVRVSIAVLDVNDNRPAIHVLFLTEGGVARVSEGARPGDYVARVSVSDADGDWEKEDEATGELGVGLGDGSISLSLEGGEGDFALLPGGPPGVFFLCVEGPLDRESRDLYELLLVATDAGSPPLSTEETLLLRVADLNDQPPLFSQQHYKASVSEAAAPGTVVMWVSASDADEAGSDHAWLRYTVVQLSAPCNLGSLQSKMVHTAECGPSFAIDSESGAISTIRTLDREVQEAVELKVVAQDLGEPPLSATCLVSITVDDVNDNEPIFWRQVYNATIAEHAPVGHCFLQVTASDADSGLYGFIEYSLYDGFLSYEAPQAFRIDPHDGQICVSQDIDRERDPATYDLLVEAKDGGGLSAQAFVRVDLEDVNDNHPVFNPSTYVTSISDETQPGTEIINVLATDQDSGIYGTVAYELIPGNVSSLFTIDSTTGIIYLTLPLSHLESTTLSLMVSAQDGGGLTAVINADVTIHIFQTTLAPAEFERPKYTFLVYEDVPEDSPIGTVKAREPLNSSEPIFYRISSGDLGGKFSIHPRLGTIRTRKPLDHETQPVVVLTVQAQLGSAPACSSTEVNITVMDVNDNHPAFLRTSDEIRISQTTPPGTALYLARAEDRDSGRNGLIRYSIASPQPGVFAIDRALGVLFLNGSLGAGEQRELTLTLRAEDQGVHPQAALLVLTVVIEKREHSPSWTFEHLVYQVEVSESLSPMTQMLQTQAHPLGPQRAASPLRYSLEPSVDSAMFGIRPYTGWIYLRRQFDYESTQTYNFRVFAWIPEDGFLQNVSTTVIVRVWDENDNSPTFLHDVLFLKVEESPVPQGVIGKITAIDMDSGKNGQLLYFLLSDGKFFKMNPNTGELINWVALDREHRGHHEMTVLVTDRGSPPRNATMAVYVSVTDINDNRPFFPQCLPGKELHVKVLEGQPVNMLVTTVFAKDPDEGNNAEVTYSVSSEDSSDHFKIDANNGEIRTTTILSYDYRPSYRMSVIATDQGVPPLQGQAVVNIQVIPLSKGRAIMSQNIRHLIIPENLKPTKIMSLIKSSDHLQQHYNGKLHFSIVADDKDGHFEIDSSTGDLFLSKELDYETTSHYLFRVITTDHSKNLSLSSTVFLSIDVEDQNDHSPSFQDELIVISVEENVPIGTLVYVFNAKDDDGSFLNSRIQYYIESHNPGTNPFLIHPSFGTLVTVSRLDRESIPTVILTVTASDQAVNVTDRRLRSLTAQIVILDVNDHNPTFISFPNAHVKEDVTVGSLVHHITAHDPDEGRNGKVTYSILSGNENMTFMLDESSGLLTTTCPLDYEMKTQHILTVLALDDGTPALSSSQTLTVTVLDVNDEAPVFKQHLYEASVKENQNPGEFVTRVEALDRDSGVNSKLQFEIMPGASFELFEINSDTGEVVTTTILDREIQEVFTLRVLVRDGGFPSLSSTTTILCTVEDENDHAPEFIVSSYDIEVLENQEPEVVYTVLASDMDAGNNRAVEYHIIDGNTDECFTINEMSGELSTTRALDREQISNFTLVILCSDLGDPPRSSVIHLQVRVLDANDHSPSFPTLYYQSSVREDAEVGTVVLVLSAVDKDEGLNGQTEYFLTDEASGAFTIDPMSGTLKTSNTLDREARSQHTFSAVARDCSIQGSRSTTVIIKVYVTDVNDNDPVLEQNPFDVFLSPESPTNQTTVIVRADDLDLGPNGTVVFSFAETQSMFSIDKYTGEIQFQQNPSSEYFPIWLQLKVTDQGIPARTTTGLLVIHMEGEDVKISFSHHLYKGLVTENCEAGTSIVTVKAFAPDSIQDSMKYSIFSGNEDGVLSLCSKSGQLTVKEPKFLDFEVRNEVQLIVLAESSGHRAYCKVAVLIQDENDNSPCFEQSIYQASVSESQLYNAHVIQVFATDLDSGLNGLIEYSILSGNQEEAFQIDALSGVITTKAILDYELTSSYSLIVQATDKGMPRLSNTTVIKVQVTDINDNAPAFLPSEAVEITEDSLPGVIVTHVSVHDVDLNSAFIFSFAKESNPGTKFAIDQNTGVVVLVKTLDFEEMTEYELLIQISDSVHYTEGALVVRVLDVNDNPPVFSQDFYQVTVPESIPVGYSVLTLSATDLESNENISYRILSSSKEFSIDPKNGTIFTISPVLLLDTISTTQFLVEASDGGNPDLRALTLVEIGIEDMNNYAPEFTVKSYNLSLSEDALVGSTLVTFSNIDHDWTRENTYVEYSIISGNSQNNFHVETKFFHSEYPYKQVGYLVLLHSLDREASASHELVILASDSGCPPLSSTAVISIQVLDVNDNPPNFSSLSYHTHVKESTPLGSHITVVSANDRDTGSHAEIIYNIISGNEKGHFYLEENTGVLYLIKPLDYEKMTKFTLTVQASDAEKKHFSFAVVFVSVLDDNDHAPQFMFSSFSCIVPENLPISSTICSINALDFDAGPYGELTYSIVSPCFLTHGMSYDHDLFLIDPLTGDIHAKQILDYENGNKYCLTVQAKDKGDATASLVVWVDIEGIDEFEPIFTQDQYFFTLPEKNKDRQLIGRVEASDADAGIDGVILYSLGTSSPFFSVNKTNGNIYLIRALPLIKSQLNKEDTLEMKIIAHSPKSDSKFASCTVFVNVSFSSEGTPLAVFASSFSISLVVSFLVFLILICILIVMILRHKQKDTINNYEEKKTSSLDADLRVTRDASVLKAFQKTDDCSNEVVPVDATPEWLSLISIMEKDIVNLYRHSNSSGHCSVEGETAEDKEIQRINEHPYRKCSDSALSDHESRVPDSGIPRDSDQLSCLSGETDVMVTAETAEASQTFGEGDQGEGCSTTCAQNNVLPQTVQKREAKESILADVRKESVFISGDQEVRCAALSTQTTSDHDGKDNYHWNYLLSWEPKFQPLASVFNDIAKLKDEHLHMPGIPKEKKSFVFPPPLITAVAQPGIKAVPPRMPAVNLGQVPPKHPRSPIPYHLGSLPEGMTPNFSPSLSLLTMQPPALSPLLREGELLGTHISGTCHELKAEDEVQI

SEQ ID NO: 7361 - protein, 1191 aa, Homo sapiens
MPVQAAQWTEFLSCPICYNEFDENVHKPISLGCSHTVCKTCLNKLHRKACPFDQTAINTDIDVLPVNFALLQLVGAQVPDHQSIKLSNLGENKHYEVAKKCVEDLALYLKPLSGGKGVASLNQSALSRPMQRKLVTLVNCQLVEEEGRVRAMRAARSLGERTVTELILQHQNPQQLSANLWAAVRARGCQFLGPAMQEEALKLVLLALEDGSALSRKVLVLFVVQRLEPRFPQASKTSIGHVVQLLYRASCFKVTKRDEDSSLMQLKEEFRSYEALRREHDAQIVHIAMEAGLRISPEQWSSLLYGDLAHKSHMQSIIDKLQSPESFAKSVQELTIVLQRTGDPANLNRLRPHLELLANIDPNPDAVSPTWEQLENAMVAVKTVVHGLVDFIQNYSRKGHETPQPQPNSKYKTSMCRDLRQQGGCPRGTNCTFAHSQEELEKYRLRNKKINATVRTFPLLNKVGVNNTVTTTAGNVISVIGSTETTGKIVPSTNGISNAENSVSQLISRSTDSTLRALETVKKVGKVGANGQNAAGPSADSVTENKIGSPPKTPVSNVAATSAGPSNVGTELNSVPQKSSPFLTRVPVYPPHSENIQYFQDPRTQIPFEVPQYPQTGYYPPPPTVPAGVAPCVPRFVRSNNVPESSLPPASMPYADHYSTFSPRDRMNSSPYQPPPPQPYGPVPPVPSGMYAPVYDSRRIWRPPMYQRDDIIRSNSLPPMDVMHSSVYQTSLRERYNSLDGYYSVACQPPSEPRTTVPLPREPCGHLKTSCEEQIRRKPDQWAQYHTQKAPLVSSTLPVATQSPTPPSPLFSVDFRADFSESVSGTKFEEDHLSHYSPWSCGTIGSCINAIDSEPKDVIANSNAVLMDLDSGDVKRRVHLFETQRRTKEEDPIIPFSDGPIISKWGAISRSSRTGYHTTDPVQATASQGSATKPISVSDYVPYVNAVDSRWSSYGNEATSSAHYVERDRFIVTDLSGHRKHSSTGDLLSLELQQAKSNSLLLQREANALAMQQKWNSLDEGRHLTLNLLSKEIELRNGELQSDYTEDATDTKPDRDIELELSALDTDEPDGQSEPIEEILDIQLGISSQNDQLLNGMAVENGHPVQQHQKEPPKQKKQSLGEDHVILEEQKTILPVTSCFSQPLPVSISNASCLPITTSVSAGNLILKTHVMSEDKNDFLKPVANGKMVNS

SEQ ID NO: 7362 - protein, 1572 aa, Homo sapiens
MSTPTDPGAMPHPGPSPGPGPSPGPILGPSPGPGPSPGSVHSMMGPSPGPPSVSHPMPTMGSTDFPQEGMHQMHKPIDGIHDKGIVEDIHCGSMKGTGMRPPHPGMGPPQSPMDQHSQGYMSPHPSPLGAPEHVSSPMSGGGPTPPQMPPSQPGALIPGDPQAMSQPNRGPSPFSPVQLHQLRAQILAYKMLARGQPLPETLQLAVQGKRTLPGLQQQQQQQQQQQQQQQQQQQQQQQPQQQPPQPQTQQQQQPALVNYNRPSGPGPELSGPSTPQKLPVPAPGGRPSPAPPAAAQPPAAAVPGPSVPQPAPGQPSPVLQLQQKQSRISPIQKPQGLDPVEILQEREYRLQARIAHRIQELENLPGSLPPDLRTKATVELKALRLLNFQRQLRQEVVACMRRDTTLETALNSKAYKRSKRQTLREARMTEKLEKQQKIEQERKRRQKHQEYLNSILQHAKDFKEYHRSVAGKIQKLSKAVATWHANTEREQKKETERIEKERMRRLMAEDEEGYRKLIDQKKDRRLAYLLQQTDEYVANLTNLVWEHKQAQAAKEKKKRRRRKKKAEENAEGGESALGPDGEPIDESSQMSDLPVKVTHTETGKVLFGPEAPKASQLDAWLEMNPGYEVAPRSDSEESDSDYEEEDEEEESSRQETEEKILLDPNSEEVSEKDAKQIIETAKQDVDDEYSMQYSARGSQSYYTVAHAISERVEKQSALLINGTLKHYQLQGLEWMVSLYNNNLNGILADEMGLGKTIQTIALITYLMEHKRLNGPYLIIVPLSTLSNWTYEFDKWAPSVVKISYKGTPAMRRSLVPQLRSGKFNVLLTTYEYIIKDKHILAKIRWKYMIVDEGHRMKNHHCKLTQVLNTHYVAPRRILLTGTPLQNKLPELWALLNFLLPTIFKSCSTFEQWFNAPFAMTGERVDLNEEETILIIRRLHKVLRPFLLRRLKKEVESQLPEKVEYVIKCDMSALQKILYRHMQAKGILLTDGSEKDKKGKGGAKTLMNTIMQLRKICNHPYMFQHIEESFAEHLGYSNGVINGAELYRASGKFELLDRILPKLRATNHRVLLFCQMTSLMTIMEDYFAFRNFLYLRLDGTTKSEDRAALLKKFNEPGSQYFIFLLSTRAGGLGLNLQAADTVVIFDSDWNPHQDLQAQDRAHRIGQQNEVRVLRLCTVNSVEEKILAAAKYKLNVDQKVIQAGMFDQKSSSHERRAFLQAILEHEEENEEEDEVPDDETLNQMIARREEEFDLFMRMDMDRRREDARNPKRKPRLMEEDELPSWIIKDDAEVERLTCEEEEEKIFGRGSRQRRDVDYSDALTEKQWLRAIEDGNLEEMEEEVRLKKRKRRRNVDKDPAKEDVEKAKKRRGRPPAEKLSPNPPKLTKQMNAIIDTVINYKDSSGRQLSEVFIQLPSRKELPEYYELIRKPVDFKKIKERIRNHKYRSLGDLEKDVMLLCHNAQTFNLEGSQIYEDSIVLQSVFKSARQKIAKEEESEDESNEEEEEEDEEESESEAKSVKVKIKLNKKDDKGRDKGKGKKRPNRGKAKPVVSDFDSDEEQDEREQSEGSGTDDE

SEQ ID NO: 7363 - protein, 728 aa, Homo sapiens
IKEYEKSSEGALYILEIVTIVVFGVEYFVRIWAAGCCCRYRGWRGRLKFARKPFCVIDIMVLIASIAVLAAGSQGNVFATSALRSLRFLQILRMIRMDRRGGTWKLLGSVVYAHSKELVTAWYIGFLCLILASFLVYLAEKGENDHFDTYADALWWGLITLTTIGYGDKYPQTWNGRLLAATFTLIGVSFFALPAGILGSGFALKVQEQHRQKHFEKRRNPAAGLIQSAWRFYATNLSRTDLHSTWQYYERTVTVPMYSSQTQTYGASRLIPPLNQLELLRNLKSKSGLAFRKDPPPEPSPSPRGVAAKGKGSPQAQTVRRSPSADQSLEDSPSKVPKSWSFGDRSRARQAFRIKGAASRQNSEEASLPGEDIVDDKSCPCEFVTEDLTPGLKVSIRAVCVMRFLVSKRKFKESLRPYDVMDVIEQYSAGHLDMLSRIKSLQSRVDQIVGRGPAITDKDRTKGPAEAELPEDPSMMGRLGKVEKQVLSMEKKLDFLVNIYMQRMGIPPTETEAYFGAKEPEPAPPYHSPEDSREHVDRHGCIVKIVRSSSSTGQKNFSAPPAAPPVQCPPSTSWQPQSHPRQGHGTSPVGDHGSLVRIPPPPAHERSLSAYGGGNRASMEFLRQEDTPGCRPPEGNLRDSDTSISIPSVDHEELERSFSGFSISQSKENLDALNSCYAAVAPCAKVRPYIAEGESDTDSDLCTPCGPPPRSATGEGPFGDVGWAGPRK

SEQ ID NO: 7364 - protein, 921 aa, Homo sapiens
MKTCWKIPVFFFVCSFLEPWASAAVKRRPRFPVNSNSNGGNELCPKIRIGQDDLPGFDLISQFQVDKAASRRAIQRVVGSATLQVAYKLGNNVDFRIPTRNLYPSGLPEEYSFLTTFRMTGSTLKKNWNIWQIQDSSGKEQVGIKINGQTQSVVFSYKGLDGSLQTAAFSNLSSLFDSQWHKIMIGVERSSATLFVDCNRIESLPIKPRGPIDIDGFAVLGKLADNPQVSVPFELQWMLIHCDPLRPRRETCHELPARITPSQTTDERGPPGEQGPPGPPGPPGVPGIDGIDGDRGPKGPPGPPGPAGEPGKPGAPGKPGTPGADGLTGPDGSPGSIGSKGQKGEPGVPGSRGFPGRGIPGPPGPPGTAGLPGELGRVGPVGDPGRRGPPGPPGPPGPRGTIGFHDGDPLCPNACPPGRSGYPGLPGMRGHKGAKGEIGEPGRQGHKGEEGDQGELGEVGAQGPPGAQGLRGITGIVGDKGEKGARGLDGEPGPQGLPGAPGDQGQRGPPGEAGPKGDRGAEGARGIPGLPGPKGDTGLPGVDGRDGIPGMPGTKGEPGKPGPPGDAGLQGLPGVPGIPGAKGVAGEKGSTGAPGKPGQMGNSGKPGQQGPPGEVGPRGPQGLPGSRGELGPVGSPGLPGKLGSLGSPGLPGLPGPPGLPGMKGDRGVVGEPGPKGEQGASGEEGEAGERGELGDIGLPGPKGSAGNPGEPGLRGPEGSRGLPGVEGPRGPPGPRGVQGEQGATGLPGVQGPPGRAPTDQHIKQVCMRVIQEHFAEMAASLKRPDSGATGLPGRPGPPGPPGPPGENGFPGQMGIRGLPGIKGPPGALGLRGPKGDLGEKGERGPPGRGPNGLPGAIGLPGDPGPASYGRNGRDGERGPPGVAGIPGVPGPPGPPGLPGFCEPASCTMQAGQRAFNKGPDP

SEQ ID NO: 7365 - protein, 643 aa, Homo sapiens
MLENYGNVASLGFPLLKPAVISQLEGGSELGGSSPLAAGTGLQGLQTDIQTDNDLTKEMYEGKENVSFELQRDFSQETDFSEASLLEKQQEVHSAGNIKKEKSNTIDGTVKDETSPVEECFFSQSSNSYQCHTITGEQPSGCTGLGKSISFDTKLVKHEIINSEERPFKCEELVEPFRCDSQLIQHQENNTEEKPYQCSECGKAFSINEKLIWHQRLHSGEKPFKCVECGKSFSYSSHYITHQTIHSGEKPYQCKMCGKAFSVNGSLSRHQRIHTGEKPYQCKECGNGFSCSSAYITHQRVHTGEKPYECNDCGKAFNVNAKLIQHQRIHTGEKPYECNECGKGFRCSSQLRQHQSIHTGEKPYQCKECGKGFNNNTKLIQHQRIHTGEKPYECTECGKAFSVKGKLIQHQRIHTGEKPYECNECGKAFRCNSQFRQHLRIHTGEKPYECNECGKAFSVNGKLMRHQRIHTGEKPFECNECGRCFTSKRNLLDHHRIHTGEKPYQCKECGKAFSINAKLTRHQRIHTGEKPFKCMECEKAFSCSSNYIVHQRIHTGEKPFQCKECGKAFHVNAHLIRHQRSHTGEKPFRCVECGKGFSFSSDYIIHQTVHTWKKPYMCSVCGKAFRFSFQLSQHQSVHSEGKS

SEQ ID NO: 7366 - protein, 668 aa, Homo sapiens
MTERIHSINLHNFSNSVLETLNEQRNRGHFCDVTVRIHGSMLRAHRCVLAAGSPFFQDKLLLGYSDIEIPSVVSVQSVQKLIDFMYSGVLRVSQSEALQILTAASILQIKTVIDECTRIVSQNVGDVFPGIQDSGQDTPRGTPESGTSGQSSDTESGYLQSHPQHSVDRIYSALYACSMQNGSGERSFYSGAVVSHHETALGLPRDHHMEDPSWITRIHERSQQMERYLSTTPETTHCRKQPRPVRIQTLVGNIHIKQEMEDDYDYYGQQRVQILERNESEECTEDTDQAEGTESEPKGESFDSGVSSSIGTEPDSVEQQFGPGAARDSQAEPTQPEQAAEAPAEGGPQTNQLETGASSPERSNEVEMDSTVITVSNSSDKSVLQQPSVNTSIGQPLPSTQLYLRQTETLTSNLRMPLTLTSNTQVIGTAGNTYLPALFTTQPAGSGPKPFLFSLPQPLAGQQTQFVTVSQPGLSTFTAQLPAPQPLASSAGHSTASGQGEKKPYECTLCNKTFTAKQNYVKHMFVHTGEKPHQCSICWRSFSLKDYLIKHMVTHTGVRAYQCSICNKRFTQKSSLNVHMRLHRGEKSYECYICKKKFSHKTLLERHVALHSASNGTPPAGTPPGARAGPPGVVACTEGTTYVCSVCPAKFDQIEQFNDHMRMHVSDG

SEQ ID NO: 7367 - protein, 457 aa, Homo sapiens
MTTDEGAKNNEESPTATVAEQGEDITSKKDRGVLKIVKRVGNGEETPMIGDKVYVHYKGKLSNGKKFDSSHDRNEPFVFSLGKGQVIKAWDIGVATMKKGEICHLLCKPEYAYGSAGSLPKIPSNATLFFEIELLDFKGEDLFEDGGIIRRTKRKGEGYSNPNEGATVEIHLEGRCGGRMFDCRDVAFTVGEGEDHDIPIGIDKALEKMQREEQCILYLGPRYGFGEAGKPKFGIEPNAELIYEVTLKSFEKAKESWEMDTKEKLEQAAIVKEKGTVYFKGGKYMQAVIQYGKIVSWLEMEYGLSEKESKASESFLLAAFLNLAMCYLKLREYTKAVECCDKALGLDSANEKGLYRRGEAQLLMNEFESAKGDFEKVLEVNPQNKAARLQISMCQKKAKEHNERDRRIYANMFKKFAEQDAKEEANKAMGKKTSEGVTNEKGTDSQAMEEEKPEGHV

SEQ ID NO: 7368 - protein, 954 aa, Homo sapiens
MSLPLTEEQRKKIEENRQKALARRAEKLLAEQHQRTSSGTSIAGNPFQAKQGPSQNFPRESCKPVSHGVIFKQQNLSSSSNADQRPHDSHSFQAKGIWKKPEEMPTACPGHSPRSQMALTGISPPLAQSPPEVPKQQLLSYELGQGHAQASPEIRFTPFANPTHKPLAKPKSSQETPAHSSGQPPRDAKLEAKTAKASPSGQNISYIHSSSESVTPRTEGRLQQKSGSSVQKGVNSQKGKCVRNGDRFQVLIGYNAELIAVFKTLPSKNYDPDTKTWNFSMNDYSALMKAAQSLPTVNLQPLEWAYGSSESPSTSSEGQAGLPSAPSLSFVKGRCMLISRAYFEADISYSQDLIALFKQMDSRRYDVKTRKWSFLLEEHSKLIAKVRCLPQVQLDPLPTTLTLAFASQLKKTSLSLTPDVPEADLSEVDPKLVSNLMPFQRAGVNFAIAKGGRLLLADDMGLGKTIQAICIAAFYRKEWPLLVVVPSSVRFTWEQAFLRWLPSLSPDCINVVVTGKDRLTAGLINIVSFDLLSKLEKQLKTPFKVVIIDESHFLKNSRTARCRAAMPVLKVAKRVILLSGTPAMSRPAELYTQIIAVKPTFFPQFHAFGLRYCDAKRMPWGWDYSGSSNLGELKLLLEEAVMLRRLKSDVLSQLPAKQRKIVVIAPGRINARTRAALDAAAKEMTTKDKTKQQQKDALILFFNRTAEAKIPSVIEYILDLLESGREKFLVFAHHKVVLDAITQELERKHVQHIRIDGSTSSAEREDLCQQFQLSERHAVAVLSITAANMGLTFSSADLVVFAELFWNPGVLIQAEDRVHRIGQTSSVGIHYLVAKGTADDYLWPLIQEKIKVLAEAGLSETNFSEMTESTDYLYKDPKQQKIYDLFQKSFEKEGSDMELLEAAESFDPGSASGTSGSSSQNMGDTLDESSLTASPQKKRRFEFFDNWDSFTSPL

SEQ ID NO: 7369 - protein, 486 aa, Homo sapiens
MESTGSVGEAPGGPRVLVVGGGIAGLGAAQRLCGHSAFPHLRVLEATARAGGRIRSERCFGGVVEVGAHWIHGPSRGNPVFQLAAEYGLLGEKELSQENQLVETGGHVGLPSVSYASSGASVSLQLVAEMATLFYGLIDQTREFLHAAETPVPSVGEYLKKEIGQHVAGWTEDEETRKLKLAVLNSFFNLECCVSGTHSMDLVALAPFGEYTVLPGLDCTFSKGYQGLTNCMMAALPEDTVVFEKPVKTIHWNGSFQEAAFPGETFPVSVECEDGDRFPAHHVIVTVPLGFLREHLDTFFDPPLPAEKAEAIRKIGFGTNNKIFLEFEEPFWEPDCQLIQLVWEDTSPLEDAAPELQDAWFRKLIGFVVLPAFASVHVLCGFIAGLESEFMETLSDEEVLLCLTQVLRRVTAPDPVCGGSHTSHVLLHDARGSAVGMEGGRPPPQSVGPAGAAAQAQALAGPSLLCSTRVGGRLGPSFLLTDFSLA

SEQ ID NO: 7370 - protein, 2229 aa, Homo sapiens
MSDRLGQITKGKDGKSKYSTLSLFDKYKGKSVDAIRSSVIPRHGLQSLGKVAAARRMPPPANLPSLKSENKGNDPNIVIVPKDGTGWANKQDQQDPKSSSATASQPPESLPQPGLQKSVSNLQKPTQSISQENTNSVPGGPKSWAQLNGKPVGHEGGLRGSSRLLSFSPEEFPTLKAAGGQDKAGKEKGVLDLSYGPGPSLRPQNVTSWREGGGRHIISATSLSTSPTELGSRNSSTGDGAPSSACTSDSKDPSLRPAQPVRKGASQFMGNVYHPPTYHDMLPAFMCSPKSSENQGTVERGSFPLPQLRLEPRVPFRQFQMNDQDGKENRLGLSRPLRPLRQLVERAPRPTIINAENLKGLDDLDADADDGWAGLHEEVDYSEKLKFSDDEEEEEVVKDGRPKWNSWDPRRQRQLSMSSADSADAKRTREEGKDWAEAVGASRVVRKAPDPQPPPRKLHGWAPGPDYQKSSMGSMFRQQSIEDKEDKPPPRQKFIQSEMSEAVERARKRREEEERRAREERLAACAAKLKQLDQKCKQARKAGEARKQAEKEVPWSPSAEKASPQENGPAVHKGSPEFPAQETPTTFPEEAPTVSPAVAQSNSSEEEAREAGSPAQEFKYQKSLPPRFQRQQQQQQQEQLYKMQHWQPVYPPPSHPQRTFYPHHPQMLGFDPRWMMMPSYMDPRITPTRTPVDFYPSALHPSGLMKPMMPQESLNGTGCRSEDQNCVPPLQERKVTPIDSPPVWSPEGYMALQSKGYPLPHPKSSDTLAMDMRVRNESSFSASLGRAGGVSAQRDLFEERGEEYLSAFDKKAQADFDSCISSQRIGQELLFPPQENVQDAGAPGGHTQNLRCSPLEPDFVPDEKKPECGSWDVSHQPETADTAHGVERETPREGTAFNISSWDKNGSPNKQPSSEPEWTPEPRSSSSQHPEQTGRTRRSGPIKKPVLKALKVEDKEKELEKIKQELGEESTRLAKEKEQSPTAEKDEDEENDASLANSSTTTLEDKGPGHATFGREATKFEEEEKPDKAWEARPPRESSDVPPMKRNNWIFIDEEQAFGVRGQARGRGRGFREFTFRGRPAGGNGSGLCGGGVLGARSIYCSSQRSGRGRGLREFARPEDCPRAKPRRRVASETHSEGSEYEELPKRRRQRGSENGNEGSLLEREESTLKKGDCRDSWRSNKGCSEDHSGLDAKSRGPRAFGRALPPRLSNCGYGRRTFVSKESPHWQSKSPGSSWQEYGPSDTCGSRRPTDRDYVPDSYRHPDAFGGRGFEDSRAEDKRSFFQDEHVADSENAENRPFRRRRPPRQDKPPRFRRLRQERESLGLWGPEEEPHLLAGQWPGRPKLCSGDKSGTVGRRSPELSYQNSSDHANEEWETASESSDFSERRERREGPGSEPDSQVDGGLSGASLGEKKELAKRSFSSQRPVVDRQSRKLEPGGFGEKPVRPGGGDTSPRYESQQNGTPLKVKRSPDEALPGGLSGCSSGSGHSPYALERAAHASADLPEASSKKAEKEAKLAAPRAGEQGEAMKQFDLNYGSAIIENCGSSPGEESEVGSMVGEGFIEVLTKKQRRLLEEERRKKEQAVQVPVKGRGLSSRIPPRFAKKQNNLCLEQGDVTVPGSSLGTEIWESSSQALPVQAPANDSWRKAVTAFSSTETGSAEQGFKSSQGDSGVDLSAESRESSATSSQRSSPYGTLKPEEMSGPGLAEPKADSHKEQAPKPSEQKDSEQGSGQSKEHRPGPIGNERSLKNRKGSEGAERLQGAVVPPVNGVEIHVDSVLPVPPIEFGVSPKDSDFSLPPGSASGPTGSPVVKLQDALASNAGLTQSIPILRRDHHIQRAIGLSPMSFPTADLTLKMESARKAWENSPSLPEQSSPGGAGSGIQPPSSVGASSGVNYSSFGGVSMPPMPVASVAPSASMPGSHLPPLYLDGHVFASQPRLVPQTIPQQQSYQQAAAAQQIPISLHTSLQAQAQLGLRGGLPVSQSQEIFSSLQPFRSQVYMHPSLSPPSTMILSGGTALKPPYSAFPGMQPLEMVKPQSGSPYQPMSGNQALVYEGQLSQAAGLGASQMLDSQLPQLTMPLPRYGSGQQPLILPQSIQLPPGQSLSVGAPRRIPPPGSQPPVLNTSREPSQMEMKGFHFADSKQNVPSGGPVPSPQTYRPSSASPSGKPSGSAVNMGSVQGHYVQQAKQRVDEKPSLGAVKLQEAPSAASQMKRTGAIKPRAVKVEESKA

SEQ ID NO: 7371 - protein, 577 aa, Homo sapiens
MILREETQFTDLDLQCEIISYIEVPTYETDISSTQLQSIYKREKLYECKKCQKKFSSGYQLILHHRFHVIERPYECKECGKNFRSGYQLTLHQRFHTGEKPYECTECGKNFRSGYQLTVHQRFHTGEKTYECRQCGKAFIYASHIVQHERIHTGGKPYECQECGRAFSQGGHLRIHQRVHTGEKPYKCKECGKTFSRRSNLVEHGQFHTDEKPYICEKCGKAFRRGHQLTVHQRVHTGKKPYECKECGKGYTTASYFLLHQRIHKGGKPYECKECKKTFTLYRNLTRHQNIHTGEKLFECKQCGKTYTTGSKLFQHQKTHTGEKPYECKECGKAFSLYGYLKQHQKIHTGMKHFECKECKKTFTLYRNLTRHQNIHTGKKLFECQECGKAYSTGSNLIQHRKTHTGEKPYKCKECGKTFSLHGYLNQHQKIHTGMKPYECKVCRKTFTFYRNLTLHQSIHTDEKPFECKECGKTFRRSSHLTAHQSIHADKKPYECKECGKAFKMYGYLTQHQKIHTGGKPYECKECGKAFSRASNLVQHERIHTGEKPYVCKQCGKTFRYGSALKAHQRIHRSIKV

SEQ ID NO: 7372 - protein, 1205 aa, Homo sapiens
MDAKARNCLLQHREALEKDIKTSYIMDHMISDGFLTISEEEKVRNEPTQQQRAAMLIKMILKKDNDSYVSFYNALLHEGYKDLAALLHDGIPVVSSSSGKDSVSGITSYVRTVLCEGGVPQRPVVFVTRKKLVNAIQQKLSKLKGEPGWVTIHGMAGCGKSVLAAEAVRDHSLLEGCFPGGVHWVSVGKQDKSGLLMKLQNLCTRLDQDESFSQRLPLNIEEAKDRLRILMLRKHPRSLLILDDVWDSWVLKAFDSQCQILLTTRDKSVTDSVMGPKYVVPVESSLGKEKGLEILSLFVNMKKADLPEQAHSIIKECKGSPLVVSLIGALLRDFPNRWEYYLKQLQNKQFKRIRKSSSYDYEALDEAMSISVEMLREDIKDYYTDLSILQKDVKVPTKVLCILWDMETEEVEDILQEFVNKSLLFCDRNGKSFRYYLHDLQVDFLTEKNCSQLQDLHKKIITQFQRYHQPHTLSPDQEDCMYWYNFLAYHMASAKMHKELCALMFSLDWIKAKTELVGPAHLIHEFVEYRHILDEKDCAVSENFQEFLSLNGHLLGRQPFPNIVQLGLCEPETSEVYQQAKLQAKQEVDNGMLYLEWINKKNITNLSRLVVRPHTDAVYHACFSEDGQRIASCGADKTLQVFKAETGEKLLEIKAHEDEVLCCAFSTDDRFIATCSVDKKVKIWNSMTGELVHTYDEHSEQVNCCHFTNSSHHLLLATGSSDCFLKLWDLNQKECRNTMFGHTNSVNHCRFSPDDKLLASCSADGTLKLWDATSANERKSINVKQFFLNLEDPQEDMEVIVKCCSWSADGARIMVAAKNKIFLWNTDSRSKVADCRGHLSWVHGVMFSPDGSSFLTSSDDQTIRLWETKKVCKNSAVMLKQEVDVVFQENEVMVLAVDHIRRLQLINGRTGQIDYLTEAQVSCCCLSPHLQYIAFGDENGAIEILELVNNRIFQSRFQHKKTVWHIQFTADEKTLISSSDDAEIQVWNWQLDKCIFLRGHQETVKDFRLLKNSRLLSWSFDGTVKVWNIITGNKEKDFVCHQGTVLSCDISHDATKFSSTSADKTAKIWSFDLLLPLHELRGHNGCVRCSAFSVDSTLLATGDDNGEIRIWNVSNGELLHLCAPLSEEGAATHGGWVTDLCFSPDGKMLISAGGYIKWWNVVTGESSQTFYTNGTNLKKIHVSPDFKTYVTVDNLGILYILQTLE

SEQ ID NO: 7373 - protein, 352 aa, Homo sapiens
MSLYCGIACRRKFFWCYRLLSTYVTKTRYLFELKEDDDACKKAQQTGAFYLFHSLAPLLQTSAHQYLAPRHSLLELERLLGKFGQDAQRIEDSVLIGCSEQQEAWFALDLGLDSSFSISASLHKPEMETELKGSFIELRKALFQLNARDASLLSTAQALLRWHDAHQFCSRSGQPTKKNVAGSKRVCPSNNIIYYPQMAPVAITLVSDGTRCLLARQSSFPKGMYSALAGFCDIGESVEETIRREVAEEVGLEVESLQYYASQHWPFPSGSLMIACHATVKPGQTEIQVNLRELETAAWFSHDEVATALKRKGPYTQQQNGTFPFWLPPKLAISHQLIKEWVEKQTCSSLPA

SEQ ID NO: 7374 - protein, 1204 aa, Homo sapiens
MAAAAAVGNAVPCGARPCGVRPDGQPKPGPQPRALLAAGPALIANGDELVAAVWPYRRLALLRRLTVLPFAGLLYPAWLGAAAAGCWGWGSSWVQIPEAALLVLATICLAHALTVLSGHWSVHAHCALTCTPEYDPSKATFVKVVPTPNNGSTELVALHRNEGEDGLEVLSFEFQKIKYSYDALEKKQFLPVAFPVGNAFSYYQSNRGFQEDSEIRAAEKKFGSNKAEMVVPDFSELFKERATAPFFVFQVFCVGLWCLDEYWYYSVFTLSMLVAFEASLVQQQMRNMSEIRKMGNKPHMIQVYRSRKWRPIASDEIVPGDIVSIGRSPQENLVPCDVLLLRGRCIVDEAMLTGESVPQMKEPIEDLSPDRVLDLQADSRLHVIFGGTKVVQHIPPQKATTGLKPVDSGCVAYVLRTGFNTSQGKLLRTILFGVKRVTANNLETFIFILFLLVFAIAAAAYVWIEGTKDPSRNRYKLFLECTLILTSVVPPELPIELSLAVNTSLIALAKLYMYCTEPFRIPFAGKVEVCCFDKTGTLTSDSLVVRGVAGLRDGKEVTPVSSIPVETHRALASCHSLMQLDDGTLVGDPLEKAMLTAVDWTLTKDEKVFPRSIKTQGLKIHQRFHFASALKRMSVLASYEKLGSTDLCYIAAVKGAPETLHSMFSQCPPDYHHIHTEISREGARVLALGYKELGHLTHQQAREVKREALECSLKFVGFIVVSCPLKADSKAVIREIQNASHRVVMITGDNPLTACHVAQELHFIEKAHTLILQPPSEKGRQCEWRSIDGSIVLPLARGSPKALALEYALCLTGDGLAHLQATDPQQLLRLIPHVQVFARVAPKQKEFVITSLKELGYVTLMCGDGTNDVGALKHADVGVALLANAPERVVERRRRPRDSPTLSNSGIRATSRTAKQRSGLPPSEEQPTSQRDRLSQVLRDLEDESTPIVKLGDASIAAPFTSKLSSIQCICHVIKQGRCTLVTTLQMFKILALNALILAYSQSVLYLEGVKFSDFQATLQGLLLAGCFLFISRSKPLKTLSRERPLPNIFNLYTILTVMLQFFVHFLSLVYLYREAQARSPEKQEQFVDLYKEFEPSLVNSTVYIMAMAMQMATFAINYKGPPFMESLPENKPLVWSLAVSLLAIIGLLLGSSPDFNSQFGLVDIPVEFKLVIAQVLLLDFCLALLADRVLQFFLGTPKLKVPS

SEQ ID NO: 7375 - protein, 240 aa, Homo sapiens
MSRSNRQKEYKCGDLVFAKMKGYPHWPARIDEMPEAAVKSTANKYQVFFFGTHETAFLGPKDLFPYEESKEKFGKPNKRKGFSEGLWEIENNPTVKASGYQSSQKKSCVEEPEPEPEAAEGDGDKKGNAEGSSDEEGKLVIDEPAKEKNEKGALKRRAGDLLEDSPKRPKEAENPEGEEKEAATLEVERPLPMEVEKNSTPSEPGSGRGPPQEEEEEEDEEEEATKEDAEAPGIRDHESL

SEQ ID NO: 7376 - protein, 1331 aa, Homo sapiens
MASDSPARSLDEIDLSALRDPAGIFELVELVGNGTYGQVYKGRHVKTGQLAAIKVMDVTGDEEEEIKQEINMLKKYSHHRNIATYYGAFIKKNPPGMDDQLWLVMEFCGAGSVTDLIKNTKGNTLKEEWIAYICREILRGLSHLHQHKVIHRDIKGQNVLLTENAEVKLVDFGVSAQLDRTVGRRNTFIGTPYWMAPEVIACDENPDATYDFKSDLWSLGITAIEMAEGAPPLCDMHPMRALFLIPRNPAPRLKSKKWSKKFQSFIESCLVKNHSQRPATEQLMKHPFIRDQPNERQVRIQLKDHIDRTKKKRGEKDETEYEYSGSEEEEEENDSGEPSSILNLPGESTLRRDFLRLQLANKERSEALRRQQLEQQQRENEEHKRQLLAERQKRIEEQKEQRRRLEEQQRREKELRKQQEREQRRHYEEQMRREEERRRAEHEQEYKRKQLEEQRQAERLQRQLKQERDYLVSLQHQRQEQRPVEKKPLYHYKEGMSPSEKPAWAKEVEERSRLNRQSSPAMPHKVANRISDPNLPPRSESFSISGVQPARTPPMLRPVDPQIPHLVAVKSQGPALTASQSVHEQPTKGLSGFQEALNVTSHRVEMPRQNSDPTSENPPLPTRIEKFDRSSWLRQEEDIPPKVPQRTTSISPALARKNSPGNGSALGPRLGSQPIRASNPDLRRTEPILESPLQRTSSGSSSSSSTPSSQPSSQGGSQPGSQAGSSERTRVRANSKSEGSPVLPHEPAKVKPEESRDITRPSRPASYKKAIDEDLTALAKELRELRIEETNRPMKKVTDYSSSSEESESSEEEEEDGESETHDGTVAVSDIPRLIPTGAPGSNEQYNVGMVGTHGLETSHADSFSGSISREGTLMIRETSGEKKRSGHSDSNGFAGHINLPDLVQQSHSPAGTPTEGLGRVSTHSQEMDSGTEYGMGSSTKASFTPFVDPRVYQTSPTDEDEEDEESSAAALFTSELLRQEQAKLNEARKISVVNVNPTNIRPHSDTPEIRKYKKRFNSEILCAALWGVNLLVGTENGLMLLDRSGQGKVYNLINRRRFQQMDVLEGLNVLVTISGKKNKLRVYYLSWLRNRILHNDPEVEKKQGWITVGDLEGCIHYKVVKYERIKFLVIALKNAVEIYAWAPKPYHKFMAFKSFADLQHKPLLVDLTVEEGQRLKVIFGSHTGFHVIDVDSGNSYDIYIPSHIQGNITPHAIVILPKTDGMEMLVCYEDEGVYVNTYGRITKDVVLQWGEMPTSVAYIHSNQIMGWGEKAIEIRSVETGHLDGVFMHKRAQRLKFLCERNDKVFFASVRSGGSSQVFFMTLNRNSMMNW

SEQ ID NO: 7377 - protein, 579 aa, Homo sapiens
MNKSQEQVSFKDVCVDFTQEEWYLLDPAQKILYRDVILENYSNLVSVGYCITKPEVIFKIEQGEEPWILEKGFPSQCHPERKWKVDDVLESSQENEDDHFWELLFHNNKTVSVENGDRGSKTFNLGTDPVSLRNYPYKICDSCEMNLKNISGLIISKKNCSRKKPDEFNVCEKLLLDIRHEKIPIGEKSYKYDQKRNAINYHQDLSQPSFGQSFEYSKNGQGFHDEAAFFTNKRSQIGETVCKYNECGRTFIESLKLNISQRPHLEMEPYGCSICGKSFCMNLRFGHQRALTKDNPYEYNEYGEIFCDNSAFIIHQGAYTRKILREYKVSDKTWEKSALLKHQIVHMGGKSYDYNENGSNFSKKSHLTQLRRAHTGEKTFECGECGKTFWEKSNLTQHQRTHTGEKPYECTECGKAFCQKPHLTNHQRTHTGEKPYECKQCGKTFCVKSNLTEHQRTHTGEKPYECNACGKSFCHRSALTVHQRTHTGEKPFICNECGKSFCVKSNLIVHQRTHTGEKPYKCNECGKTFCEKSALTKHQRTHTGEKPYECNACGKTFSQRSVLTKHQRIHTRVKALSTS

SEQ ID NO: 7378 - protein, 823 aa, Homo sapiens
MKLFGFGSRRGQTAQGSIDHVYTGSGYRIRDSELQKIHRAAVKGDAAEVERCLARRSGELDALDKQHRTALHLACASGHVQVVTLLVNRKCQIDVCDKENRTPLIQAVHCQEEACAVILLEHGANPNLKDIYGNTALHYAVYSESTSLAEKLLSHGAHIEALDKDNNTPLLFAIICKKEKMVEFLLKKKASSHAVDRLRRSALMLAVYYDSPGIVNILLKQNIDVFAQDMCGRDAEDYAISHHLTKIQQQILEHKKKILKKEKSDVGSSDESAVSIFHELRVDSLPASDDKDLNVATKQCVPEKVSEPLPGSSHEKGNRIVNGQGEGPPAKHPSLKPSTEVEDPAVKGAVQRKNVQTLRAEQALPVASEEEQQRHERSEKKQPQVKEGNNTNKSEKIQLSENICDSTSSAAAGRLTQQRKIGKTYPQQFPKKLKEEHDRCTLKQENEEKTNVNMLYKKNREELERKEKQYKKEVEAKQLEPTVQSLEMKSKTARNTPNWDFHNHEEMKGLMDENCILKADIAILRQEICTMKNDNLEKENKYLKDIKIVKETNAALEKYIKLNEEMITETAFRYQQELNDLKAENTRLNAELLKEKESKKRLEADIESYQSRLAAAISKHSESVKTERNLKLALERTQDVSVQVEMSSAISKVKDENEFLTEQLSETQIKFNALKDKFRKTRDSLRKKSLALETVQNNLSQTQQQTQEMKEMYQNAEAKVNNSTGKWNCVEERICHLQRENAWLVQQLDDVHQKEDHKEIVTNIQRGFIESGKKDFVLEEKSKKLMNECDHLKESLFQYEREKTEVVVSIKEDKYFQTSRKKI

SEQ ID NO: 7379 - protein, 4640 aa, Homo sapiens
MPVPDGSVAAAGLGLGLPAADSRGHYQLLLSGRALADRYRRIYTAALNDRDQGGGSAGHPASRNKKILNKKKLKRKQKSKSKVKTRSKSENLENTVIIPDIKLHSNPSAFNIYCNVRHCVLEWQKKEISLAAASKNSVQSGESDSDEEEESKEPPIKLPKIIEVGLCEVFELIKETRFSHPSLCLRSLQALLNVLQGQQPEGLQSEPPEVLESLFQLLLEITVRSTGMNDSTGQSLTALSCACLFSLVASWGETGRTLQAISAILTNNGSHACQTIQVPTILNSLQRSVQAVLVGKIQIQDWFSNGIKKAALMHKWPLKEISVDEDDQCLLQNDGFFLYLLCKDGLYKIGSGYSGTVRGHIYNSTSRIRNRKEKKSWLGYAQGYLLYRDVNNHSMTAIRISPETLEQDGTVMLPDCHTEGQNILFTDGEYINQIAASRDDGFVVRIFATSTEPVLQQELQLKLARKCLHACGISLFDLEKDLHIISTGFDEESAILGAGREFALMKTANGKIYYTGKYQSLGIKQGGPSAGKWVELPITKSPKIVHFSVGHDGSHALLVAEDGSIFFTGSASKGEDGESTKSRRQSKPYKPKKIIKMEGKIVVYTACNNGSSSVISKDGELYMFGKDAIYSDSSSLVTDLKGHFVTQVAMGKAHTCVLMKNGEVWTFGVNNKGQCGRDTGAMNQGGKGFGVENMATAMDEDLEEELDEKDEKSMMCPPGMHKWKLEQCMVCTVCGDCTGYGASCVSSGRPDRVPGGICGCGSGESGCAVCGCCKACARELDGQEARQRGILDAVKEMIPLDLLLAVPVPGVNIEEHLQLRQEEKRQRVIRRHRLEEGRGPLVFAGPIFMNHREQALARLRSHPAQLKHKRDKHKDGSGERGEKDASKITTYPPGSVRFDCELRAVQVSCGFHHSVVLMENGDVYTFGYGQHGQLGHGDVNSRGCPTLVQALPGPSTQVTAGSNHTAVLLMDGQVFTFGSFSKGQLGRPILDVPYWNAKPAPMPNIGSKYGRKATWIGASGDQTFLRIDEALINSHVLATSEIFASKHIIGLVPASISEPPPFKCLLINKVDGSCKTFNDSEQEDLQGFGVCLDPVYDVIWRFRPNTRELWCYNAVVADARLPSAADMQSRCSILSPELALPTGSRALTTRSHAALHILGCLDTLAAMQDLKMGVASTEEETQAVMKVYSKEDYSVVNRFESHGGGWGYSAHSVEAIRFSADTDILLGGLGLFGGRGEYTAKIKLFELGPDGGDHETDGDLLAETDVLAYDCAAREKYAMMFDEPVLLQAGWWYVAWARVSGPSSDCGSHGQASITTDDGVVFQFKSSKKSNNGTDVNAGQIPQLLYRLPTSDGSASKGKQQTSEPVHILKRSFARTVSVECFESLLSILHWSWTTLVLGVEELRGLKGFQFTATLLDLERLRFVGTCCLRLLRVYTCEIYPVSATGKAVVEETSKLAECIGKTRTLLRKILSEGVDHCMVKLDNDPQGYLSQPLSLLEAVLQECHNTFTACFHSFYPTPALQWACLCDLLNCLDQDIQEANFKTSSSRLLAAVMSALCHTSVKLTSIFPIAYDGEVLLRSIVKQVSTENDSTLVHRFPLLVAHMEKLSQSEENISGMTSFREVLEKMLVIVVLPVRNSLRRENELFSSHLVSNTCGLLASIVSELTASALGSEVDGLNSLHSVKASANRFTKTSQGRSWNTGNGSPDAICFSVDKPGIVVVGFSVYGGGGIHEYELEVLVDDSEHAGDSTHSHRWTSLELVKGTYTTDDSPSDIAEIRLDKVVPLKENVKYAVRLRNYGSRTANGDGGMTTVQCPDGVTFTFSTCSLSSNGTNQTRGQIPQILYYRSEFDGDLQSQLLSKANEEDKNCSRALSVVSTVVRASKDLLHRALAVDADDIPELLSSSSLFSMLLPLIIAYIGPVAAAIPKVAVEVFGLVQQLLPSVAILNQKYAPPAFNPNQSTDSTTGNQPEQGLSACTTSSHYAVIESEHPYKPACVMHYKVTFPECVRWMTIEFDPQCGTAQSEDVLRLLIPVRTVQNSGYGPKLTSVHENLNSWIELKKFSGSSGWPTMVLVLPGNEALFSLETASDYVKDDKASFYGFKCFAIGYEFSPGPDEGVIQLEKELANLGGVCAAALMKKDLALPIGNELEEDLEILEEAALQVCKTHSGILGKGLALSHSPTILEALEGNLPLQIQSNEQSFLDDFIACVPGSSGGRLARWLQPDSYADPQKTSLILNKDDIRCGWPTTITVQTKDQYGDVVHVPNMKVEVKAVPVSQKKMSLQQDQAKKPQRIPGSPAVTAASSNTDMTYGGLASPKLDVSYEPMIVKEARYIAITMMKVYENYSFEELRFASPTPKRPSENMLIRVNNDGTYCANWTPGAIGLYTLHVTIDGIEIDAGLEVKVKDPPKGMIPPGTQLVKPKSEPQPNKVRKFVAKDSAGLRIRSHPSLQSEQIGIVKVNGTITFIDEIHNDDGVWLRLNDETIKKYVPNMNGYTEAWCLSFNQHLGKSLLVPVDESKTNTDDFFKDINSCCPQEATMQEQDMPFLRGGPGMYKVVKTGPSGHNIRSCPNLRGIPIGMLVLGNKVKAVGEVTNSEGTWVQLDQNSMVEFCESDEGEAWSLARDRGGNQYLRHEDEQALLDQNSQTPPPSPFSVQAFNKGASCSAQGFDYGLGNSKGDRGNISTSSKPASTSGKSELSSKHSRSLKPDGRMSRTTADQKKPRGTESLSASESLILKSDAAKLRSDSHSRSLSPNHNTLQTLKSDGRMPSSSRAESPGPGSRLSSPKPKTLPANRSSPSGASSPRSSSPHDKNLPQKSTAPVKTKLDPPRERSKSDSYTLDPDTLRKKKMPLTEPLRGRSTSPKPKSVPKDSTDSPGSENRAPSPHVVQENLHSEVVEVCTSSTLKTNSLTDSTCDDSSEFKSVDEGSNKVHFSIGKAPLKDEQEMRASPKISRKCANRHTRPKKEKSSFLFKGDGSKPLEPAKQAMSPSVAECARAVFASFLWHEGIVHDAMACSSFLKFHPELSKEHAPIRSSLNSQQPTEEKETKLKNRHSLEISSALNMFNIAPHGPDISKMGSINKNKVLSMLKEPPLHEKCEDGKTETTFEMSMHNTMKSKSPLPLTLQHLVAFWEDISLATIKAASQNMIFPSPGSCAVLKKKECEKENKKSKKEKKKKEKAEVRPRGNLFGEMAQLAVGGPEKDTICELCGESHPYPVTYHMRQAHPGCGRYAGGQGYNSIGHFCGGWAGNCGDGGIGGSTWYLVCDRCREKYLREKQAAAREKVKQSRRKPMQVKTPRALPTMEAHQVIKANALFLLSLSSAAEPSILCYHPAKPFQSQLPSVKEGISEDLPVKMPCLYLQTLARHHHENFVGYQDDNLFQDEMRYLRSTSVPAPYISVTPDASPNVFEEPESNMKSMPPSLETSPITDTDLAKRTVFQRSYSVVASEYDKQHSILPARVKAIPRRRVNSGDTEVGSSLLRHPSPELSRLISAHSSLSKGERNFQWPVLAFVIQHHDLEGLEIAMKQALRKSACRVFAMEAFNWLLCNVIQTTSLHDILWHFVASLTPAPVEPEEEEDEENKTSKENSEQEKDTRVCEHPLSDIVIAGEAAHPLPHTFHRLLQTISDLMMSLPSGSSLQQMALRCWSLKFKQSDHQFLHQSNVFHHINNILSKSDDGDSEESFSISIQSGFEAMSQELCIVMCLKDLTSIVDIKTSSRPAMIGSLTDGSTETFWESGDEDKNKTKNITINCVKGINARYVSVHVDNSRDLGNKVTSMTFLTGKAVEDLCRIKQVDLDSRHIGWVTSELPGGDNHIIKIELKGPENTLRVRQVKVLGWKDGESTKIAGQISASVAQQRNCEAETLRVFRLITSQVFGKLISGDAEPTPEQEEKALLSSPEGEEKVYNATSDADLKEHMVGIIFSRSKLTNLQKQVCAHIVQAIRMEATRVREEWEHAISSKENANSQPNDEDASSDAYCFELLSMVLALSGSNVGRQYLAQQLTLLQDLFSLLHTASPRVQRQVTSLLRRVLPEVTPSRLASIIGVKSLPPADISDIIHSTEKGDWNKLGILDMFLGCIAKALTVQLKAKGTTITGTAGTTVGKGVTTVTLPMIFNSSYLRRGESHWWMKGSTPTQISEIIIKLIKDMAAGHLSEAWSRVTKNAIAETIIALTKMEEEFRSPVRCIATTRLWLALASLCVLDQDHVDRLSSGRWMGKDGQQKQMPMCDNHDDGETAAIILCNVCGNLCTDCDRFLHLHRRTKTHQRQVFKEEEEAIKVDLHEGCGRTKLFWLMALADSKTMKAMVEFREHTGKPTTSSSEACRFCGSRSGTELSAVGSVCSDADCQEYAKIACSKTHPCGHPCGGVKNEEHCLPCLHGCDKSATSLKQDADDMCMICFTEALSAAPAIQLDCSHIFHLQCCRRVLENRWLGPRITFGFISCPICKNKINHIVLKDLLDPIKELYEDVRRKALMRLEYEGLHKSEAITTPGVRFYNDPAGYAMNRYAYYVCYKCRKAYFGGEARCDAEAGRGDDYDPRELICGACSDVSRAQMCPKHGTDFLEYKCRYCCSVAVFFCFGTTHFCNACHDDFQRMTSIPKEELPHCPAGPKGKQLEGTECPLHVVHPPTGEEFALGCGVCRNAHTF

SEQ ID NO: 7380 - protein, 383 aa, Homo sapiens
MPSGCRCLHLVCLLCILGAPGQPVRADDCSSHCDLAHGCCAPDGSCRCDPGWEGLHCERCVRMPGCQHGTCHQPWQCICHSGWAGKFCDKDEHICTTQSPCQNGGQCMYDGGGEYHCVCLPGFHGRDCERKAGPCEQAGSPCRNGGQCQDDQGFALNFTCRCLVGFVGARCEVNVDDCLMRPCANGATCLDGINRFSCLCPEGFAGRFCTINLDDCASRPCQRGARCRDRVHDFDCLCPSGYGGKTCELVLPVPDPPTTVDTPLGPTSAVVVPATGPAPHSAGAGLLRISVKEVVRRQEAGLGEPSLVALVVFGALTAALVLATVLLTLRAWRRGVCPPGPCCYPAPHYAPACQDQECQVSMLPAGLPLPRDLPPEPGKTTAL

SEQ ID NO: 7381 - protein, 1295 aa, Homo sapiens
MAFSKGFRIYHKLDPPPFSLIVETRHKEECLMFESGAVAVLSSAEKEAIKGTYSKVLDAYGLLGVLRLNLGDTMLHYLVLVTGCMSVGKIQESEVFRVTSTEFISLRIDSSDEDRISEVRKVLNSGNFYFAWSASGISLDLSLNAHRSMQEQTTDNRFFWNQSLHLHLKHYGVNCDDWLLRLMCGGVEIRTIYAAHKQAKACLISRLSCERAGTRFNVRGTNDDGHVANFVETEQVVYLDDSVSSFIQIRGSVPLFWEQPGLQVGSHRVRMSRGFEANAPAFDRHFRTLKNLYGKQIIVNLLGSKEGEHMLSKAFQSHLKASEHAADIQMVNFDYHQMVKGGKAEKLHSVLKPQVQKFLDYGFFYFNGSEVQRCQSGTVRTNCLDCLDRTNSVQAFLGLEMLAKQLEALGLAEKPQLVTRFQEVFRSMWSVNGDSISKIYAGTGALEGKAKLKDGARSVTRTIQNNFFDSSKQEAIDVLLLGNTLNSDLADKARALLTTGSLRVSEQTLQSASSKVLKSMCENFYKYSKPKKIRVCVGTWNVNGGKQFRSIAFKNQTLTDWLLDAPKLAGIQEFQDKRSKPTDIFAIGFEEMVELNAGNIVSASTTNQKLWAVELQKTISRDNKYVLLASEQLVGVCLFVFIRPQHAPFIRDVAVDTVKTGMGGATGNKGAVAIRMLFHTTSLCFVCSHFAAGQSQVKERNEDFIEIARKLSFPMGRMLFSHDYVFWCGDFNYRIDLPNEEVKELIRQQNWDSLIAGDQLINQKNAGQVFRGFLEGKVTFAPTYKYDLFSDDYDTSEKCRTPAWTDRVLWRRRKWPFDRSAEDLDLLNASFQDESKILYTWTPGTLLHYGRAELKTSDHRPVVALIDIDIFEVEAEERQNIYKEVIAVQGPPDGTVLVSIKSSLPENNFFDDALIDELLQQFASFGEVILIRFVEDKMWVTFLEGSSALNVLSLNGKELLNRTITIALKSPDWIKNLEEEMSLEKISIALPSSTSSTLLGEDAEVAADFDMEGDVDDYSAEVEELLPQHLQPSSSSGLGTSPSSSPRTSPCQSPTISEGPVPSLPIRPSRAPSRTPGPPSAQSSPIDAQPATPLPQKDPAQPLEPKRPPPPRPVAPPTRPAPPQRPPPPSGARSPAPTRKEFGAPKSPGTTRKDNIGRSQPSPQAGLAGPGPAGYSTARPTIPPRAGVISAPQSHARASAGRLTPESQSKTSETSKGSTFLPEPLKPQAAFPPQSSLPPPAQRLQEPLVPVAAPMPQSGPQPNLETPPQPPPRSRSSHSLPSEASSQPQQEQPSG

SEQ ID NO: 7382 - protein, 786 aa, Homo sapiens
MGGRVFLAFCVWLTLPGAETQDSRGCARWCPQNSSCVNATACRCNPGFSSFSEIITTPTETCDDINECATPSKVSCGKFSDCWNTEGSYDCVCSPGYEPVSGAKTFKNESENTCQDVDECQQNPRLCKSYGTCVNTLGSYTCQCLPGFKFIPEDPKVCTDVDECSSGQHQCDSSTVCFNTVGSYSCRCRPGWKPRHGIPNNQKDTVCEDMTFSTWTPPPGVHSQTLSRFFDKVQDLGRDSKTSSAEVTIQNVIKLVDELMEAPGDVEALAPPVRHLIATQLLSNLEDIMRILAKSLPKGPFTYISPSNTELTLMIQERGDKNVTMGQSSARMKLNWAVAAGAEDPGPAVAGILSIQNMTTLLANASLNLHSKKQAELEEIYESSIRGVQLRRLSAVNSIFLSHNNTKELNSPILFAFSHLESSDGEAGRDPPAKDVMPGPRQELLCAFWKSDSDRGGHWATEGCQVLGSKNGSTTCQCSHLSSFAILMAHYDVEDWKLTLITRVGLALSLFCLLLCILTFLLVRPIQGSRTTIHLHLCICLFVGSTIFLAGIENEGGQVGLRCRLVAGLLHYCFLAAFCWMSLEGLELYFLVVRVFQGQGLSTRWLCLIGYGVPLLIVGVSAAIYSKGYGRPRYCWLDFEQGFLWSFLGPVTFIILCNAVIFVTTVWKLTQKFSEINPDMKKLKKARALTITAIAQLFLLGCTWVFGLFIFDDRSLVLTYVFTILNCLQGAFLYLLHCLLNKKVREEYRKWACLVAGGSKYSEFTSTTSGTGHNQTRALRASESGI

SEQ ID NO: 7383 - protein, 727 aa, Homo sapiens
MVSFRLSNKTASPSIKLLVDDPIVVNPGEAITLVCVTTGGEPAPSLTWVRSFGTLPEKTVLNGGTLTIPAITSDDAGTYSCIANNNVGNPAKKSTNIIVRALKKGRFWITPDPYHKDDNIQIGREVKISCQVEAVPSEELTFSWFKNGRPLRSSERMVITQTDPDVSPGTTNLDIIDLKFTDFGTYTCVASLKGGGISDISIDVNISSSTVPPNLTVPQEKSPLVTREGDTIELQCQVTGKPKPIILWSRADKEVAMPDGSMQMESYDGTLRIVNVSREMSGMYRCQTSQYNGFNVKPREALVQLIVQYPPAVEPAFLEIRQGQDRSVTMSCRVLRAYPIRVLTYEWRLGNKLLRTGQFDSQEYTEYAVKSLSNENYGVYNCSIINEAGAGRCSFLVTGKAYAPEFYYDTYNPVWQNRHRVYSYSLQWTQMNPDAVDRIVAYRLGIRQAGQQRWWEQEIKINGNIQKGELITYNLTELIKPEAYEVRLTPLTKFGEGDSTIRVIKYSAPVNPHLREFHCGFEDGNICLFTQDDTDNFDWTKQSTATRNTKYTPNTGPNADRSGSKEGFYMYIETSRPRLEGEKARLLSPVFSIAPKNPYGPTNTAYCFSFFYHMYGQHIGVLNVYLRLKGQTTIENPLWSSSGNKGQRWNEAHVNIYPITSFQLIFEGIRGPGIEGDIAIDDVSIAEGECAKQDLATKNSVDGAVGILVHIWLFPIIVLISILSPRR

SEQ ID NO: 7384 - protein, 432 aa, Homo sapiens
MDADEGQDMSQVSGKESPPVSDTPDEGDEPMPIPEDLSTTSGGQQSSKSDRVVASNVKVETQSDEENGRACEMNGEECAEDLRMLDASGEKMNGSHRDQGSSALSGVGGIRLPNGKLKCDICGIICIGPNVLMVHKRSHTGERPFQCNQCGASFTQKGNLLRHIKLHSGEKPFKCHLCNYACRRRDALTGHLRTHSGDKGLSDTPYDSSASYEKENEMMKSHVMDQAINNAINYLGAESLRPLVQTPPGGSEVVPVISPMYQLHKPLAEGTPRSNHSAQDSAVENLLLLSKAKLVPSEREASPSNSCQDSTDTESNNEEQRSGLIYLTNHIAPHARNGLSLKEEHRAYDLLRAASENSQDALRVVSTSGEQMKVYKCEHCRVLFLDHVMYTIHMGCHGFRDPFECNMCGYHSQDRYEFSSHITRGEHRFHMS

SEQ ID NO: 7385 - protein, 986 aa, Homo sapiens
MDLKEQPGNTISAGQEDFPSVLLETAASLPSLSPLSAASFKEHEYLGNLSTVLPTEGTLQENVSEASKEVSEKAKTLLIDRDLTEFSELEYSEMGSSFSVSPKAESAVIVANPREEIIVKNKDEEEKLVSNNILHNQQELPTALTKLVKEDEVVSSEKAKDSFNEKRVAVEAPMREEYADFKPFERVWEVKDSKEDSDMLAAGGKIESNLESKVDKKCFADSLEQTNHEKDSESSNDDTSFPSTPEGIKDRSGAYITCAPFNPAATESIATNIFPLLGDPTSENKTDEKKIEEKKAQIVTEKNTSTKTSNPFLVAAQDSETDYVTTDNLTKVTEEVVANMPEGLTPDLVQEACESELNEVTGTKIAYETKMDLVQTSEVMQESLYPAAQLCPSFEESEATPSPVLPDIVMEAPLNSAVPSAGASVIQPSSSPLEASSVNYESIKHEPENPPPYEEAMSVSLKKVSGIKEEIKEPENINAALQETEAPYISIACDLIKETKLSAEPAPDFSDYSEMAKVEQPVPDHSELVEDSSPDSEPVDLFSDDSIPDVPQKQDETVMLVKESLTETSFESMIEYENKEKLSALPPEGGKPYLESFKLSLDNTKDTLLPDEVSTLSKKEKIPLQMEELSTAVYSNDDLFISKEAQIRETETFSDSSPIEIIDEFPTLISSKTDSFSKLAREYTDLEVSHKSEIANAPDGAGSLPCTELPHDLSLKNIQPKVEEKISFSDDFSKNGSATSKVLLLPPDVSALATQAEIESIVKPKVLVKEAEKKLPSDTEKEDRSPSAIFSAELSKTSVVDLLYWRDIKKTGVVFGASLFLLLSLTVFSIVSVTAYIALALLSVTISFRIYKGVIQAIQKSDEGHPFRAYLESEVAISEELVQKYSNSALGHVNCTIKELRRLFLVDDLVDSLKFAVLMWVFTYVGALFNGLTLLILALISLFSVPVIYERHQAQIDHYLGLANKNVKDAMAKIQAKIPGLKRKAE

SEQ ID NO: 7386 - protein, 1708 aa, Homo sapiens
MAAIGRGRSLKNLRVRGRNDSGEENVPLDLTREPSDNLREILQNVARLQGVSNMRKLGHLNNFTKLLCDIGHSEEKLGFHYEDIIICLRLALLNEAKEVRAAGLRALRYLIQDSSILQKVLKLKVDYLIARCIDIQQSNEVERTQALRLVRKMITVNASLFPSSVTNSLIAVGNDGLQERDRMVRACIAIICELALQNPEVVALRGGLNTILKNVIDCQLSRINEALITTILHLLNHPKTRQYVRADVELERILAPYTDFHYRHSPDTAEGQLKEDREARFLASKMGIIATFRSWAGIINLCKPGNSGIQSLIGVLCIPNMEIRRGLLEVLYDIFRLPLPVVTEEFIEALLSVDPGRFQDSWRLSDGFVAAEAKTILPHRARSRPDLMDNYLALILSAFIRNGLLEGLVEVITNSDDHISVRATILLGELLHMANTILPHSHSHHLHCLPTLMNMAASFDIPKEKRLRASAALNCLKRFHEMKKRGPKPYSLHLDHIIQKAIATHQKRDQYLRVQKDIFILKDTEEALLINLRDSQVLQHKENLEWNWNLIGTILKWPNVNLRNYKDEQLHRFVRRLLYFYKPSSKLYANLDLDFAKAKQLTVVGCQFTEFLLESEEDGQGYLEDLVKDIVQWLNASSGMKPERSLQNNGLLTTLSQHYFLFIGTLSCHPHGVKMLEKCSVFQCLLNLCSLKNQDHLLKLTVSSLDYSRDGLARVILSKILTAATDACRLYATKHLRVLLRANVEFFNNWGIELLVTQLHDKNKTISSEALDILDEACEDKANLHALIQMKPALSHLGDKGLLLLLRFLSIPKGFSYLNERGYVAKQLEKWHREYNSKYVDLIEEQLNEALTTYRKPVDGDNYVRRSNQRLQRPHVYLPIHLYGQLVHHKTGCHLLEVQNIITELCRNVRTPDLDKWEEIKKLKASLWALGNIGSSNWGLNLLQEENVIPDILKLAKQCEVLSIRGTCVYVLGLIAKTKQGCDILKCHNWDAVRHSRKHLWPVVPDDVEQLCNELSSIPSTLSLNSESTSSRHNSESESVPSSMFILEDDRFGSSSTSTFFLDINEDTEPTFYDRSGPIKDKNSFPFFASSKLVKNRILNSLTLPNKKHRSSSDPKGGKLSSESKTSNRRIRTLTEPSVDFNHSDDFTPISTVQKTLQLETSFMGNKHIEDTGSTPSIGENDLKFTKNFGTENHRENTSRERLVVESSTSSHMKIRSQSFNTDTTTSGISSMSSSPSRETVGVDATTMDTDCGSMSTVVSTKTIKTSHYLTPQSNHLSLSKSNSVSLVPPGSSHTLPRRAQSLKAPSIATIKSLADCNFSYTSSRDAFGYATLKRLQQQRMHPSLSHSEALASPAKDVLFTDTITMKANSFESRLTPSRFMKALSYASLDKEDLLSPINQNTLQRSSSVRSMVSSATYGGSDDYIGLALPVDINDIFQVKDIPYFQTKNIPPHDDRGARAFAHDAGGLPSGTGGLVKNSFHLLRQQMSLTEIMNSIHSDASLFLESTEDTGLQEHTDDNCLYCVCIEILGFQPSNQLSAICSHSDFQDIPYSDWCEQTIHNPLEVVPSKFSGISGCSDGVSQEGSASSTKSTELLLGVKTIPDDTPMCRILLRKEVLRLVINLSSSVSTKCHETGLLTIKEKYPQTFDDICLYSEVSHLLSHCTFRLPCRRFIQELFQDVQFLQMHEEAEAVLATPPKQPIVDTSAES

SEQ ID NO: 7387 - protein, 370 aa, Homo sapiens
MAEPVSPLKHFVLAKKAITAIFDQLLEFVTEGSHFVEATYKNPELDRIATEDDLVEMQGYKDKLSIIGEVLSRRHMKVAFFGRTSSGKSSVINAMLWDKVLPSGIGHITNCFLSVEGTDGDKAYLMTEGSDEKKSVKTVNQLAHALHMDKDLKAGCLVRVFWPKAKCALLRDDLVLVDSPGTDVTTELDSWIDKFCLDADVFVLVANSESTLMNTEKHFFHKVNERLSKPNIFILNNRWDASASEPEYMEDVRRQHMERCLHFLVEELKVVNALEAQNRIFFVSAKEVLSARKQKAQGMPESGVALAEGFHARLQEFQNFEQIFEECISQSAVKTKFEQHTIRAKQILATVKNIMDSVNLAAEDKRFHVQ

SEQ ID NO: 7388 - protein, 356 aa, Homo sapiens
MIYTRFLKGSLKMANYTLAPEDEYDVLIEGELESDEAEQCDKYDAQALSAQLVPSLCSAVFVIGVLDNLLVVLILVKYKGLKRVENIYLLNLAVSNLCFLLTLPFWAHAGGDPMCKILIGLYFVGLYSETFFNCLLTVQRYLVFLHKGNFFSARRRVPCGIITSVLAWVTAILATLPEFVVYKPQMEDQKYKCAFSRTPFLPADETFWKHFLTLKMNISVLVLPLFIFTFLYVQMRKTLRFREQRYSLFKLVFAIMVVFLLMWAPYNIAFFLSTFKEHFSLSDCKSSYNLDKSVHITKLIATTHCCINPLLYAFLDGTFSKYLCRCFHLRSNTPLQPRGQSAQGTSREEPDHSTEV

SEQ ID NO: 7389 - protein, 6824 aa, Homo sapiens
MASSPELPTEDEQGSWGIDDLHISLQAEQEDTQKKAFTCWINSQLARHTSPSVISDLFTDIKKGHVLLDLLEVLSGQQLPRDKGSNTFQCRINIEHALTFLRNRSIKLINIHVTDIIDGNPSIILGLIWTIILHFHIEKLAQTLSCNYNQPSLDDVSVVDSSPASSPPAKKCSKVQARWQMSARKALLLWAQEQCATYESVNVTDFKSSWRNGMAFLAIIHALRPDLIDMKSVKHRSNKDNLREAFRIAEQELKIPRLLEPEDVDVVDPDEKSIMTYVAQFLQYSKDAPGTGEEAQGKVKDAMGWLTLQKEKLQKLLKDSENDTYFKKYNSLLSFMESFNEEKKSFLDVLSIKRDLDELDKDHLQLREAWDGLDHQINAWKIKLNYALPPPLHQTEAWLQEVEELMDEDLSASQDHSQAVTLIQEKMTLFKSLMDRFEHHSNILLTFENKDENHLPLVPPNKLEEMKRRINNILEKKFILLLEFHYYKCLVLGLVDEVKSKLDIWNIKYGSRESVELLLEDWHKFIEEKEFLARLDTSFQKCGEIYKNLAGECQNINKQYMMVKSDVCMYRKNIYNVKSTLQKVLACWATYVENLRLLRACFEETKKEEIKEVPFETLAQWNLEHATLNEAGNFLVEVSNDVVGSSISKELRRLNKRWRKLVSKTQLEMNLPLMIKKQDQPTFDNSGNILSKEEKATVEFSTDMSVELPENYNQNIKAGEKHEKENEEFTGQLKVAKDVEKLIGQVEIWEAEAKSVLDQDDVDTSMEESLKHLIAKGSMFDELMARSEDMLQMDIQNISSQESFQHVLTTGLQAKIQEAKEKVQINVVKLIAALKNLTDVSPDLDIRLKMEESQKELESYMMRAQQLLGQRESPGELISKHKEALIISNTKSLAKYLKAVEELKNNVTEDIKMSLEEKSRDVCAKWESLHHELSLYVQQLKIDIEKGKLSDNILKLEKQINKEKKLIRRGRTKGLIKEHEACFSEEGCLYQLNHHMEVLRELCEELPSQKSQQEVKRLLKDYEQKIERLLKCASEIHMTLQPTAGGTSKNEGTITTSENRGGDPHSEAPFAKSDNQPSTEKAMEPTMKFSLASVLRPLQEESIMEKDYSASINSLLERYDTYRDILEHHLQNNKFRITSDFSSEEDRSSSCLQAKLTDLQVIKNETDARWKEFEIISLKLENHVNDIKKPFVIKERDTLKERERELQMTLNTRMESLETALRLVLPVEKASLLLCGSDLPLHKMAIQGFHLIDADRIYQHLRNIQDSIAKQIEICNRLEEPGNFVLKELHPFDLHAMQNIILKYKTQFEGMNHRVQRSEDTLKALEDFLASLRTAKLSAEPVTDLSASDTQVAQENTLTVKNKEGEIHLMKDKAKHLDKCLKMLDMSFKDAERGDDTSCENLLDAFSIKLSETHGYGVQEEFTEENKLLEACIFKNNELLKNIQDVQSQISKIGLKDPTVPAVKHRKKSLIRLDKVLDEYEEEKRHLQEMANSLPHFKDGREKTVNQQCQNTVVLWENTKALVTECLEQCGRVLELLKQYQNFKSILTTLIQKEESVISLQASYMGKENLKKRIAEIEIVKEEFNEHLEVVDKINQVCKNLQFYLNKMKTFEEPPFEKEANIIVDRWLDINEKTEDYYENLGRALALWDKLFNLKNVIDEWTEKALQKMELHQLTEEDRERLKEELQVHEQKTSEFSRRVAEIQFLLQSSEIPLELQVMESSILNKMEHVQKCLTGESNCHALSGSTAELREDLDQAKTQIGMTESLLKALSPSDSLEIFTKLEEIQQQILQQKHSMILLENQIGCLTPELSELKKQYESVSDLFNTKKSVLQDHFSKLLNDQCKNFNDWFSNIKVNLKECFESSETKKSVEQKLQKLSDFLTLEGRNSKIKQVDSVLKHVKKHLPKAHVKELISWLVGQEFELEKMESICQARAKELEDSLQQLLRLQDDHRNLRKWLTNQEEKWKGMEEPGEKTELFCQALARKREQFESVAQLNNSLKEYGFTEEEEIIMEATCLMDRYQTLLRQLSEIEEEDKLLPTEDQSFNDLAHDVIHWIKEIKESLMVLNSSEGKMPLEERIQKIKEIILLKPEGDARIETIMKQAESSEAPLVQKTLTDISNQWDNTLHLASTYLSHQEKLLLEGEKYLQSKEDLRLMLIELKKKQEAGFALQHGLQEKKAQLKIYKKFLKKAQDLTSLLKELKSQGNYLLECTKNPSFSEEPWLEIKHLHESLLQQLQDSVQNLDGHVREHDSYQVCVTDLNTTLDNFSKEFVSFSDKPVDQIAVEEKLQKLQELENRLSLQDGTLKKILALAKSVKQNTSSVGQKIIKDDIKSLQCKQKDLENRLASAKQEMECCLNSILKSKRSTEKKGKFTLPGREKQATSDVQESTQESAAVEKLEEDWEINKNFVENVMAVSKNCHHSMYIFESIVKNFISDEMQDSAVEMAMSKQLSLNAQESMKNTEDERKVNELQNQPLELDTMLRNEQLEEIEKLYTQLEAKKAAIKPLEQTECLNKTETGALVLHNIGYSAQHLDNLLQALITLKKNKESQYCVLRDFQEYLAAVESSMKALLTDKESLKVGPLDSVTYLDKIKKFIASIEKEKDSLGNLKIKWENLSNHVTDMDKKLLESQIKQLEHGWEQVEQQIQKKYSQQVVEYDEFTTLMNKVQDTEISLQQQQQHLQLRLKSPEERAGNQSMIALTTDLQATKHGFSVLKGQAELQMKRIWGEKEKKNLEDGINNLKKQWETLEPLHLEAENQIKKCDIRNKMKETILWAKNLLGELNPSIPLLPDDILSQIRKCKVTHDGILARQQSVESLAEEVKDKVPSLTTYEGSDLNNTLEDLRNQYQMLVLKSTQRSQQLEFKLEERSNFFAIIRKFQLMVQESETLIIPRVETAATEAELKHHHVTLEASQKELQEIDSGISTHLQELTNIYEELNVFERLFLEDQLKNLKIRTNRIQRFIQNTCNEVEHKIKFCRQFHEKTSALQEEADSIQRNELLLNQEVNKGVKEEIYNLKDRLTAIKCCILQVLKLKKVFDYIGLNWDFSQLDQLQTQVFEKEKELEEKIKQLDTFEEEHGKYQALLSKMRAIDLQIKKMTEVVLKAPDSSPESRRLNAQILSQRIEKAKCLCDEIIKKLNENKTFDDSFKEKEILQIKLNAEENDKLYKVLQNMVLELSPKELDEKNCQDKLETSLHVLNQIKSQLQQPLLINLEIKHIQNEKDNCEAFQEQVWAEMCSIKAVTAIEKQREENSSEASDVETKLREFEDLQMQLNTSIDLRTNVLNDAYENLTRYKEAVTRAVESITSLEAIIIPYRVDVGNPEESLEMPLRKQEELESTVAHIQDLTEKLGMISSPEAKLQLQYTLQELVSKNSAMKEAFKAQETEAERYLENYKCYRKMEEDIYTNLSKMETVLGQSMSSLPLSYREALERLEQSKALVSNLISTKEELMKLRQILRLLRLRCTENDGICLLKIVSALWEKWLSLLEAAKEWEMWCEELKQEWKFVSEEIEREAIILDNLQEELPEISKTKEAATTEELSELLDCLCQYGENVEKQQLLLTLLLQRIRSIQNVPESSGAVETVPAFQEITSMKERCNKLLQKVQKNKELVQTEIQERHSFTKEIIALKNFFQQTTTSFQNMAFQDHPEKSEQFEELQSILKKGKLTFENIMEKLRIKYSEMYTIVPAEIESQVEECRKALEDIDEKISNEVLKSSPSYAMRRKIEEINNGLHNVEKMLQQKSKNIEKAQEIQKKMWDELDLWHSKLNELDSEVQDIVEQDPGQAQEWMDNLMIPFQQYQQVSQRAECRTSQLNKATVKMEEYSDLLKSTEAWIENTSHLLANPADYDSLRTLSHHASTVQMALEDSEQKHNLLHSIFMDLEDLSIIFETDELTQSIQELSNQVTALQQKIMESLPQIQRMADDVVAIESEVKSMEKRVSKIKTILLSKEIFDFSPEEHLKHGEVILENIRPMKKTIAEIVSYQVELRLPQTGMKPLPVFQRTNQLLQDIKLLENVTQEQNELLKVVIKQTNEWDEEIENLKQILNNYSAQFSLEHMSPDQADKLPQLQGEIERMEKQILSLNQRKEDLLVDLKATVLNLHQHLKQEQEGVERDRLPAVTSEEGGVAERDASERKLNRRGSMSYLAAVEEEVEESSVKSDHDKDMEEDRASSSSGTIVQEAYGKISTSDNSMAQILTPDSLNTEQGPECSLRPNQTEEGTTPPIEADTLDSSDAQGGLEPRVEKTRPEPTEVLHACKTQVAELELWLQQANVAVEPETLNADMQQVLEQQLVGCQAMLTEIEHKVAFLLETCKDQGLGDNGATQHEAEALSLKLKTVKCNLEKVQMMLQEKHSEDQHPTILKKSSEPEHQEALQPVNLSELESIVTERPQFSRQKDFQQQQVLELKPMEQKDFIKFIEFNAKKMWPQYCQHDNDTTQESSARYPTTEELKTYTTQLEDLRQEASNLQTQENMTEEAYINLDKKLFELFLTLSQCLSSVEEMLEMPRLYREDGSGQQVHYETLALELKKLYLALSDKKGDLLKAMTWPGENTNLLLECFDNLQVCLEHTQAAAVCRSKSLKAGLDYNRSYQKADAYTVELENAESRVAKLRDEGERLHLPYALLQEVYKLEDVLDSMWGMLRARYTELSSPFVTESQQDALLQGMVELVKIGKEKLAHGHLKQTKSKVALQAQIENHKVFFQKLVADMLLIQAYSAKILPSLLQNRETFWAEQVTEVKILEEKSRQCGMKLQSLLQKWEEFDENYASLEKDLEILISTLPSVSLVEETEERLVERISFYQQIKRNIGGKHARLYQTLNEGKQLVASVSCPELEGQIAKLEEQWLSLNKKIDHELHRLQALLKHLLRSAFLGVYNRDSDQLTKWLESSQHTLNYWKEQSLNVSQDLDTIRSNINNFFEFSKEVDEKSSLKTAVISIGNQLLHLKETDTATLRASLAQFEQKWTMLITQLPDIQEKLHQLQMEKLPSRKAITEMISWMNNVEHQTSDEDSVHSPSSASQVKHLLQKHKEFRMEMDYKQWIVDFVNQSLLQLSTCDVESKRYERTEFAEHLGEMNRQWHRVHGMLNRKIQHLEQLLESITESENKIQILNNWLEAQEERLKTLQKPESVISVQKLLLDCQDIENQLAIKSKALDELKQSYLTLESGAVPLLEDTASRIDELFQKRSSVLTQVNQLKTSMQSVLQEWKIYDQLYDEVNMMTIRFWYCMEHSKPVVLSLETLRCQVENLQSLQDEAESSEGSWEKLQEVIGKLKGLCPSVAEIIEEKCQNTHKRWTQVNQAIADQLQKAQSLLQLWKAYSNAHGEAAARLKQQEAKFQQLANISMSGNNLAEILPPALQDIKELQHDVQKTKEAFLQNSSVLDRLPQPAESSTHMLLPGPLHSLQRAAYLEKMLLVKANEFENHVLALTAQSPDIEHLNEVSLKLPLSDVAVKTLQNMNRQWIRATATALERCSELQGIGLNEKFLYCCEKWIQLLEKIEEALKVDVANSLPELLEQQKTYKMLEAEVSINQTIADSYVTQSLQLLDTTEIENRPEFITEFSKLTDRWQNAVQGVRQRKGDVDGLNAHVARCGGASLKKQDLRYSLHTACGAALLCRSSHGANKEIHFQRRRTTCALTLEAGEKLLLTTDLKTKESVGRRISQLQDSWKDMEPQLAEMIKQFQSTVETWDQCEKKIKELKSRLQVLKAQSEDPLPELHEDLHNEKELIKVAIRKQEIEDRLNTWVVFNEKNKELCAWLVQMENKVLQTADISIEEMIEKLQKRTVGREEVPERWECETIVSGHGTEESCFLSIRKFHQGRGLHILTCQLIPQDCMEEINLFSENKLQLKQMGDQLIKASNKSRAAEIDDKLNKINDRWQHLFDVIGSSMADQTNSRWMFFQWPRGIQRTVTWPWDHLCSCASTGHTGPFHSSVLRCFEQHIEFGIYRRTYKVNKELGGDKNGQRCPIIYPHGLVQCIRLGEPLILKRVKKLKETFAFIQQLDKNMSNLRTWLARIESELSKPVVYDVCDDQEIQKRLAEQQDLQRDIEQHSAGVESVFNICDVLLHDSDACANETECDSIQQTTRSLDRRWRNICAMSMERRMKIEETWRLWQKFLDDYSRFEDWLKSAERTAACPNSSEVLYTSAKEELKRFERQIHERLTQLELINKQYRRLARENRTDTASRLKQMVHEGNQRWDNLQRRVTAVLRRLRHFTNQREEFEGTRESILVWLTEMDLQLTNVEHFSESDADDKMRQLNGFQQEITLNTNKIDQLIVFGEQLIQKSEPLDAVLIEDELEELHRYCQEGLEDEKEASENETDMEDPREIQTDSWRKRGESEEPSSPQSLCHLVAPGHERSGCETPVSVDSIPLEWDHTGDVGGSSSHEEDEEGPYYSALSGKSISDGHSWHVPDSPSCPEHHYKQMEGDRNVPPVPPASSTPYKPPYVSLNFTGSTAYVCAFDRWEMIQAQELHNKLKIKQNLQQLNSDISAITTWLKKTEAELEMLKMAKPPSDIQEIELRVKRLQEILKAFDTYKALVVSVNVSSKEFLQTESPESTELQSRLRQLSLLWEAAQGAVDSWRGGLRQSLMQCQDFHQLSQNLLLWLASAKNRRQKAHVTDPKADPRALLECRRELMQLEKELVERQPQVDMLQEISNSLLIKGHGEDCIEAEEKVHVIEKKLKQLREQVSQDLMALQGTQNPASPLPSFDEVDSGDQPPATSVPAPRAKFLYPAVQSSENYRRRGGDREQGPRQHTATALLPLKGGPGSPTPAAAPPAAAAPGLPAALLRRRLQLHSGQQLCPVLLPHAEVHQWATPHIEGIAGHSATPPA

SEQ ID NO: 7390 - protein, 893 aa, Homo sapiens
MATEEFIIRIPPYHYIHVLDQNSNVSRVEVGPKTYIRQDNERVLFAPMRMVTVPPRHYCTVANPVSRDAQGLVLFDVTGQVRLRHADLEIRLAQDPFPLYPGEVLEKDITPLQVVLPNTALHLKALLDFEDKDGDKVVAGDEWLFEGPGTYIPRKEVEVVEIIQATIIRQNQALRLRARKECWDRDGKERVTGEEWLVTTVGAYLPAVFEEVLDLVDAVILTEKTALHLRARRNFRDFRGVSRRTGEEWLVTVQDTEAHVPDVHEEVLGVVPITTLGPHNYCVILDPVGPDGKNQLGQKRVVKGEKSFFLQPGEQLEQGIQDVYVLSEQQGLLLRALQPLEEGEDEEKVSHQAGDHWLIRGPLEYVPSAKVEVVEERQAIPLDENEGIYVQDVKTGKVRAVIGSTYMLTQDEVLWEKELPPGVEELLNKGQDPLADRGEKDTAKSLQPLAPRNKTRVVSYRVPHNAAVQVYDYREKRARVVFGPELVSLGPEEQFTVLSLSAGRPKRPHARRALCLLLGPDFFTDVITIETADHARLQLQLAYNWHFEVNDRKDPQETAKLFSVPDFVGDACKAIASRVRGAVASVTFDDFHKNSARIIRTAVFGFETSEAKGPDGMALPRPRDQAVFPQNGLVVSSVDVQSVEPVDQRTRDALQRSVQLAIEITTNSQEAAAKHEAQRLEQEARGRLERQKILDQSEAEKARKELLELEALSMAVESTGTAKAEAESRAEAARIEGEGSVLQAKLKAQALAIETEAELQRVQKVRELELVYARAQLELEVSKAQQLAEVEVKKFKQMTEAIGPSTIRDLAVAGPEMQVKLLQSLGLKSTLITDGSTPINLFNTAFGLLGMGPEGQPLGRRVASGPSPGEGISPQSAQAPQAPGDNHVVPVLR

SEQ ID NO: 7391 - protein, 459 aa, Homo sapiens
MVELVISPSLTVNSDCLDKLKFNRADAAVWTLSDRQGITKSAPLRVSQLFSRSCPRVLPRQPSTAMAAYGQTQYSAGIQQATPYTAYPPPAQAYGIPSYSIKTEDSLNHSPGQSGFLSYGSSFSTSPTGQSPYTYQMHGTTGFYQGGNGLGNAAGFGSVHQDYPSYPGFPQSQYPQYYGSSYNPPYVPASSICPSPLSTSTYVLQEASHNVPNQSSESLAGEYNTHNGPSTPAKEGDTDRPHRASDGKLRGRSKRSSDPSPAGDNEIERVFVWDLDETIIIFHSLLTGTFASRYGKDTTTSVRIGLMMEEMIFNLADTHLFFNDLEDCDQIHVDDVSSDDNGQDLSTYNFSADGFHSSAPGANLCLGSGVHGGVDWMRKLAFRYRRVKEMYNTYKNNVGGKESCFERIMQRFGRKAVYVVIGDGVEEEQGAKKHNMPFWRISCHADLEALRHALELEYL

SEQ ID NO: 7392 - protein, 942 aa, Homo sapiens
MTGSNSHITILTLKVLPHFESLGKQEKIPNKMSAFRNHCPHLDSVGEITKEDLIQKSLGTCQDCKVQGPNLWACLENRCSYVGCGESQVDHSTIHSQETKHYLTVNLTTLRVWCYACSKEVFLDRKLGTQPSLPHVRQPHQIQENSVQDFKIPSNTTLKTPLVAVFDDLDIEADEEDELRARGLTGLKNIGNTCYMNAALQALSNCPPLTQFFLDCGGLARTDKKPAICKSYLKLMTELWHKSRPGSVVPTTLFQGIKTVNPTFRGYSQQDAQEFLRCLMDLLHEELKEQVMEVEEDPQTITTEETMEEDKSQSDVDFQSCESCSNSDRAENENGSRCFSEDNNETTMLIQDDENNSEMSKDWQKEKMCNKINKVNSEGEFDKDRDSISETVDLNNQETVKVQIHSRASEYITDVHSNDLSTPQILPSNEGVNPRLSASPPKSGNLWPGLAPPHKKAQSASPKRKKQHKKYRSVISDIFDGTIISSVQCLTCDRVSVTLETFQDLSLPIPGKEDLAKLHSSSHPTSIVKAGSCGEAYAPQGWIAFFMEYVKRFVVSCVPSWFWGPVVTLQDCLAAFFARDELKGDNMYSCEKCKKLRNGVKFCKVQNFPEILCIHLKRFRHELMFSTKISTHVSFPLEGLDLQPFLAKDSPAQIVTYDLLSVICHHGTASSGHYIAYCRNNLNNLWYEFDDQSVTEVSESTVQNAEAYVLFYRKSSEEAQKERRRISNLLNIMEPSLLQFYISRQWLNKFKTFAEPGPISNNDFLCIHGGVPPRKAGYIEDLVLMLPQNIWDNLYSRYGGGPAVNHLYICHTCQIEAEKIEKRRKTELEIFIRLNRAFQKEDSPATFYCISMQWFREWESFVKGKDGDPPGPIDNTKIAVTKCGNVMLRQGADSGQISEETWNFLQSIYGGGPEVILRPPVVHVDPDILQAEEKIEVETRSL

SEQ ID NO: 7393 - protein, 720 aa, Homo sapiens
MNNHVSSKPSTMKLKHTINPILLYFIHFLISLYTILTYIPFYFFSESRQEKSNRIKAKPVNSKPDSAYRSVNSLDGLASVLYPGCDTLDKVFTYAKNKFKNKRLLGTREVLNEEDEVQPNGKIFKKVILGQYNWLSYEDVFVRAFNFGNGLQMLGQKPKTNIAIFCETRAEWMIAAQACFMYNFQLVTLYATLGGPAIVHALNETEVTNIITSKELLQTKLKDIVSLVPRLRHIITVDGKPPTWSEFPKGIIVHTMAAVEALGAKASMENQPHSKPLPSDIAVIMYTSGSTGLPKGVMISHSNIIAGITGMAERIPELGEEDVYIGYLPLAHVLELSAELVCLSHGCRIGYSSPQTLADQSSKIKKGSKGDTSMLKPTLMAAVPEIMDRIYKNVMNKVSEMSSFQRNLFILAYNYKMEQISKGRNTPLCDSFVFRKVRSLLGGNIRLLLCGGAPLSATTQRFMNICFCCPVGQGYGLTESAGAGTISEVWDYNTGRVGAPLVCCEIKLKNWEEGGYFNTDKPHPRGEILIGGQSVTMGYYKNEAKTKADFFEDENGQRWLCTGDIGEFEPDGCLKIIDRKKDLVKLQAGEYVSLGKVEAALKNLPLVDNICAYANSYHSYVIGFVVPNQKELTELARKKGLKGTWEELCNSCEMENEVLKVLSEAAISASLEKFEIPVKIRLSPEPWTPETGLVTDAFKLKRKELKTHYQADIERMYGRK

SEQ ID NO: 7394 - protein, 605 aa, Homo sapiens
MEVRASLQKIVSNGDEQLEKAMEEILRDSEKRPSSLLVDCQSSSEISDHSFGDIPASQTNKPSLQLILDPSNTEISTPRPSSPGGLPEEDSVLFNKLTYLGCMKVSSPRNEVEALRAMATMKSSSQYPFPVTLYVPNVPEGSVRIIDQSSNVEIASFPIYKVLFCARGHDGTTESNCFAFTESSHGSEEFQIHVFSCEIKEAVSRILYSFCTAFKRSSRQVSDVKDSVIPTPDSDVFTFSVSLEVKEDDGKGNFSPVPKDRDKFYFKLKQGIEKKVVITVQQLSNKELAIERCFGMLLSPGRNVKNSDMHLLDMESMGKSYDGRAYVITGMWNPNAPVFLALNEETPKDKQVYMTVAVDMVVTEVVEPVRFLLETVVRVYPANERFWYFSRKTFTETFFMRLKQSEGKGHTNAGDAIYEVVSLQRESDKEEPVTPTSGGGPMSPQDDEAEEESDNELSSGTGDVSKDCPEKILYSWGELLGKWHSNLGARPKGLSTLVKSGVPEALRAEVWQLLAGCHDNQAMLDRYRILITKQQMKFSLTPRQTIHLVKYEGSMKVSMTPCNQLQFDIRLDVLITYTFCFSSFPEPELYKYVLKHQLIKRLNAC

SEQ ID NO: 7395 - protein, 1003 aa, Homo sapiens
MPSKFSCRQLREAGQCFESFLVVRGLDMETDRERLRTIYNRDFKISFGTPAPGFSSMLYGMKIANLAYVTKTRVRFFRLDRWADVRFPEKRRMKLGSDISKHHKSLLAKIFYDRAEYLHGKHGVDVEVQGPHEARDGQLLIRLDLNRKEVLTLRLRNGGTQSVTLTHLFPLCRTPQFAFYNEDQELPCPLGPGECYELHVHCKTSFVGYFPATVLWELLGPGESGSEGAGTFYIARFLAAVAHSPLAAQLKPMTPFKRTRITGNPVVTNRIEEGERPDRAKGYDLELSMALGTYYPPPRLRQLLPMLLQGTSIFTAPKEIAEIKAQLETALKWRNYEVKLRLLLHLEELQMEHDIRHYDLESVPMTWDPVDQNPRLLTLEVPGVTESRPSVLRGDHLFALLSSETHQEDPITYKGFVHKVELDRVKLSFSMSLLSRFVDGLTFKVNFTFNRQPLRVQHRALELTGRWLLWPMLFPVAPRDVPLLPSDVKLKLYDRSLESNPEQLQAMRHIVTGTTRPAPYIIFGPPGTGKTVTLVEAIKQVVKHLPKAHILACAPSNSGADLLCQRLRVHLPSSIYRLLAPSRDIRMVPEDIKPCCNWDAKKGEYVFPAKKKLQEYRVLITTLITAGRLVSAQFPIDHFTHIFIDEAGHCMEPESLVAIAGLMEVKETGDPGGQLVLAGDPRQLGPVLRSPLTQKHGLGYSLLERLLTYNSLYKKGPDGYDPQFITKLLRNYRSHPTILDIPNQLYYEGELQACADVVDRERFCRWAGLPRQGFPIIFHGVMGKDEREGNSPSFFNPEEAATVTSYLKLLLAPSSKKGKARLSPRSVGVISPYRKQVEKIRYCITKLDRELRGLDDIKDLKVGSVEEFQGQERSVILISTVRSSQSFVQLDLDFNLGFLKNPKRFNVAVTRAKALLIIVGNPLLLGHDPDWKVFLEFCKENGGYTGCPFPAKLDLQQGQNLLQGLSKLSPSTSGPHSHDYLPQEREGEGGLSLQVEPEWRNEL

SEQ ID NO: 7396 - protein, 1235 aa, Homo sapiens
MAHLELLLVENFKSWRGRQVIGPFRRFTCIIGPNGSGKSNVMDALSFVMGEKIANLRVKNIQELIHGAHIGKPISSSASVKIIYVEESGEEKTFARIIRGGCSEFRFNDNLVSRSVYIAELEKIGIIVKAQNCLVFQGTVESISVKKPKERTQFFEEISTSGELIGEYEEKKRKLQKAEEDAQFNFNKKKNIAAERRQAKLEKEEAERYQSLLEELKMNKIQLQLFQLYHNEKKIHLLNTKLEHVNRDLSVKRESLSHHENIVKARKKEHGMLTRQLQQTEKELKSVETLLNQKRPQYIKAKENTSHHLKKLDVAKKSIKDSEKQCSKQEDDIKALETELADLDAAWRSFEKQIEEEILHKKRDIELEASQLDRYKELKEQVRKKVATMTQQLEKLQWEQKTDEERLAFEKRRHGEVQGNLKQIKEQIEDHKKRIEKLEEYTKTCMDCLKEKKQQEETLVDEIEKTKSRMSEVNEELNLIRSELQNAGIDTHEGKRQQKRAEVLEHLKRLYPDSVFGRLFDLCHPIHKKYQLAVTKVFGRFITAIVVASEKVAKDCIRFLKEERAEPETFLALDYLDIKPINERLRELKGCKMVIDVIKTQFPQLKKVIQFVCGNGLVCETMEEARHIALSGPERQKTVALDGTLFLKSGVISGGSSDLKYKARCWDEKELKNLRDRRSQKIQELKGLMKTLRKETDLKQIQTLIQGTQTRLKYSQNELEMIKKKHLVAFYQEQSQLQSELLNIESQCIMLSEGIKERQRRIKEFQEKIDKVEDDIFQHFCEEIGVENIREFENKHVKRQQEIDQKRLEFEKQKTRLNVQLEYSRSHLKKKLNKINTLKETIQKGSEDIDHLKKAEENCLQTVNELMAKQQQLKDIRVTQNSSAEKVQTQIEEERKKFLAVDREVGKLQKEVVSIQTSLEQKRLEKHNLLLDCKVQDIEIILLSGSLDDIIEVEMGTEAESTQATIDIYEKEEAFEIDYSSLKEDLKALQSDQEIEAHLRLLLQQVASQEDILLKTAAPNLRALENLKTVRDKFQESTDAFEASRKEARLCRQEFEQVKKRRYDLFTQCFEHVSISIDQIYKKLCRNNSAQAFLSPENPEEPYLEGISYNCVAPGKRFMPMDNLSGGEKCVAALALLFAVHSFRPAPFFVLDEVDAALDNTNIGKVSSYIKEQTQDQFQMIVISLKEEFYSRADALIGIYPEYDDCMFSRVLTLDLSQYPDTEGQESSKRHGESR

SEQ ID NO: 7397 - protein, 550 aa, Homo sapiens
MVRGWEPPPGLDCAISEGHKSEGTMPPNKEASGLSSSPAGLICLPPISEELQLVWTQAAQTSELDSNEHLLKTFSYFPYPSLADIALLCLRYGLQMEKVKTWFMAQRLRCGISWSSEEIEETRARVVYRRDQLHFKSLLSFTHHAGRPPEEVPPPPVPAPEQVGIGIGPPTLSKPTQTKGLKVEPEEPSQMPPLPQSHQKLKESLMTPGSGAFPYQSDFWQHLQSSGLSKEQAGRGPNQSHGIGTASWNHSTTVPQPQARDKPPPIALIASSCKEESASSVTPSSSSTSSSFQVLANGATAASKPLQPLGCVPQSVSPSEQALPPHLEPAWPQGLRHNSVPGRVGPTEYLSPDMQRQRKTKRKTKEQLAILKSFFLQCQWARREDYQKLEQITGLPRPEIIQWFGDTRYALKHGQLKWFRDNAVPGAPSFQDPAIPTPPPSTRSLNERAETPPLPIPPPPPDIQPLERYWAAHQQLRETDIPQLSQASRLSTQQVLDWFDSRLPQPAEVVVCLDEEEEEEEEELPEDDEEEEEEEEEDDDDDDDDVIIQD

SEQ ID NO: 7398 - protein, 520 aa, Homo sapiens
MFSALKKLVGSDQAPGRDKNIPAGLQSMNQALQRRFAKGVQYNMKIVIRGDRNTGKTALWHRLQGRPFVEEYIPTQEIQVTSIHWSYKTTDDIVKVEVWDVVDKGKCKKRGDGLKMENDPQEAESEMALDAEFLDVYKNCNGVVMMFDITKQWTFNYILRELPKVPTHVPVCVLGNYRDMGEHRVILPDDVRDFIDNLDRPPGSSYFRYAESSMKNSFGLKYLHKFFNIPFLQLQRETLLRQLETNQLDMDATLEELSVQQETEDQNYGIFLEMMEARSRGHASPLAANGQSPSPGSQSPVVPAGAVSTGSSSPGTPQPAPQLPLNAAPPSSVPPVPPSEALPPPACPSAPAPRRSIISRPPPWGWRLRGALGRRGQWPPWGGGRACHCLGRHLPLYHRLCRCPVAAVCASELEEAGHWWSPGWALQVLGLQAQCEPALQEGRGQLASARLGGHPGPLGAEPPVFLRDVTEAQEGPVRVCLQRLGRGRLAVGCALPRHLLALRAHLGPQHAYGSASGREP

SEQ ID NO: 7399 - protein, 811 aa, Homo sapiens
MNVALQELGAGSNMVEYKRATLRDEDAPETPVEGGASPDAMEVGKGASPFSPGPSPGMTPGTPRSSGLFWRVTCPHLRSISGLCSRTMVGFQKGTRQLLGSRTQLELVLAGASLLLAALLLGCLVALGVQYHRDPSHSTCLTEACIRVAGKILESLDRGVSPCEDFYQFSCGGWIRRNPLPDGRSRWNTFNSLWDQNQAILKHLLENTTFNSSSEAEQKTQRFYLSCLQVERIEELGAQPLRDLIEKIGGWNITGPWDQDNFMEVLKAVAGTYRATPFFTVYISADSKSSNSNVIQVDQSGLFLPSRDYYLNRTANEKVLTAYLDYMEELGMLLGGRPTSTREQMQQVLELEIQLANITVPQDQRRDEEKIYHKMSISELQALAPSMDWLEFLSFLLSPLELSDSEPVVVYGMDYLQQVSELINRTEPSILNNYLIWNLVQKTTSSLDRRFESAQEKLLETLYGTKKSCVPRWQTCISNTDDALGFALGSLFVKATFDRQSKEIAEGMISEIRTAFEEALGQLVWMDEKTRQAAKEKADAIYDMIGFPDFILEPKELDDVYDGYEISEDSFFQNMLNLYNFSAKVMADQLRKPPSRDQWSMTPQTVNAYYLPTKNEIVFPAGILQAPFYARNHPKALNFGGIGVVMGHELTHAFDDQGREYDKEGNLRPWWQNESLAAFRNHTACMEEQYNQYQVNGERLNGRQTLGENIADNGGLKAAYNAYKAWLRKHGEEQQLPAVGLTNHQLFFVGFAQVWCSVRTPESSHEGLVTDPHSPARFRVLGTLSNSRDFLRHFGCPVGSPMNPGQLCEVW

SEQ ID NO: 7400 - protein, 368 aa, Homo sapiens
MFAKGKGSAVPSDGQAREKLALYVYEYLLHVGAQKSAQTFLSEIRWEKNITLGEPPGFLHSWWCVFWDLYCAAPERRDTCEHSSEAKAFHDYSAAAAPSPVLGNIPPNDGMPGGPIPPGFFQGPPGSQPSPHAQPPPHNPSSMMGPHSQPPGGVPGTQPLLPNSMDPTRQQGHPNMGGSMQRMNPPRGMGPMGPGPQNYGSGMRPPPNSLGPAMPGINMGPGAGRPWPNPNSANSIPYSSSSPGTYVGPPGGGGPPGTPIMPSPADSTNSSDNIYTMINPVPPGGSRSNFPMGPGSDGPMGGMGGMEPHHMNGSLGSGDIDGLPKNSPNNISGISNPPGTPRDDGELGGNFLHSFQNDNYSPSMTMSV

SEQ ID NO: 7401 - protein, 797 aa, Homo sapiens
MDELAGGGGGGPGMAAPPRQQQGPGGNLGLSPGGNGAAGGGGPPASEGAGPAAGPELSRPQQYTIPGILHYIQHEWARFEMERAHWEVERAELQARIAFLQGERKGQENLKKDLVRRIKMLEYALKQERAKYHKLKYGTELNQGDLKMPTFESEETKDTEAPTAPQNSQLTWKQGRQLLRQYLQEVGYTDTILDVRSQRVRSLLGLSNSEPNGSVETKNLEQILNGGESPKQKGQEIKRSSGDVLETFNFLENADDSDEDEENDMIEGIPEGKDKHRMNKHKIGNEGLAADLTDDPDTEEALKEFDFLVTAEDGEGAGEARSSGDGTEWDKDDLSPTAEVWDVDQGLISKLKEQYKKERKGKKGVKRANRTKLYDMIADLGDDELPHIPSGIINQSRSASTRMTDHEGARAEEAEPITFPSGGGKSFIMGSDDVLLSVLGLGDLADLTVTNDADYSYDLPANKDAFRKTWNPKYTLRSHFDGVRALAFHPVEPVLVTASEDHTLKLWNLQKTVPAKKSASLDVEPIYTFRAHIGPVLSLAISSNGEQCFSGGIDATIQWWNMPSPSVDPYDTYEPNVLAGTLVGHTDAVWGLAYSGIKNQLLSCSADGTVRLWNPQEKLPCICTYNGDKKHGIPTSVDFIGCDPAHMVTSFNTGSAVIYDLETSQSLVILSSQVDSGLQSNNHINRVVSHPTLPVTITAHEDRHIKFFDNKTGKMIHSMVAHLDAVTSLAVDPNGIYLMSGSHDCSIRLWNLDSKTCVQEITAHRKKLDESIYDVAFHSSKAYIASAGADALAKVFV

SEQ ID NO: 7402 - protein, 583 aa, Homo sapiens
MLSESKEGEEKEEVTMDTSENRPENDVPEPPMPIADQVSNDDRPEGSVEDEEKKESSLPKSFKRKISVVSATKGVPAGNSDTEGGQPGRKRRWGASTATTQKKPSISITTESLKSLIPDIKPLAGQEAVVDLHADDSRISEDETERNGDDGTHDKGLKICRTVTQVVPAEGQENGQREEEEEEKEPEAEPPVPPQVSVEVALPPPAEHEVKKVTLGDTLTRRSISQQKSGVSITIDDPVRTAQVPSPPRGKISNIVHISNLVRPFTLGQLKELLGRTGTLVEEAFWIDKIKSHCFVTYSTVEEAVATRTALHGVKWPQSNPKFLCADYAEQDELDYHRGLLVDRPSETKTEEQGIPRPLHPPPPPPVQPPQHPRAEQREQERAVREQWAEREREMERRERTRSEREWDRDKVREGPRSRSRSRDRRRKERAKSKEKKSEKKEKAQEEPPAKLLDDLFRKTKAAPCIYWLPLTDSQIVQKEAERAERAKEREKRRKEQEEEEQKEREKEAERERNRQLEREKRREHSRERDRERERERERDRGDRDRDRERDRERGRERDRRDTKRHSRSRSRSTPVRDRGGRR

SEQ ID NO: 7403 - protein, 1013 aa, Homo sapiens
MGDPGSEIIESVPPAGPEASESTTDENEDDIQFVSEGPLRPVLEYIDLVSSDDEEPSTSYTDENIKRKDHIDYQKDKVALTLARLARHVEVEKQQKEEKNRAFREKIDFQHAHGLQELEFIRGHSDTEAARLCVDQWLKMPGLKTGTINCGTKSSFRRGGHTWVSGKPILCPIMHCNKEFDNGHLLLGHLKRFDHSPCDPTITLHGPFFSSFACVVCYKKFVTQQQYRDHLFDKEATDDGHNNNLLPQIIQCFACPNCFLLFSRKEECSKHMSGKNHFHQSFKLGDNKGIAHPISFPSFAKKLLISLCKDVPFQVKCVACHKTLRSHMELTAHFRVHCRNAGPVAVAEKSITQVAEKFILRGYCPDCNQVFVDETSTQNHKQNSGHKVRVINSVEESVLLYCHSSEGNKDPSSDLHLLLDQSKFSSLKRTMSIKESSSLECIAIPKKKMNLKDKSHEGVACVQKEKSVVKTWFCECNQRFPSEDAVEKHVFSANTMGYKCVVCGKVCDDSGVIRLHMSRIHGGAHLNNFLFWCRTCKKELTRKDTIMAHVTEFHNGHRYFYEMDEVEGETLPSSSTTLDNLTANKPSSAITVIDHSPANSSPRGKWQCRICEDMFDSQEYVKQHCMSLASHKFHRYSCAHCRKPFHKIETLYRHCQDEHDNEIKIKYFCGLCDLIFNVEEAFLSHYEEHHSIDYVFVSEKTETSIKTEDDFPVIETSNQLTCGCRESYICKVNRKEDYSRCLQIMLDKGKLWFRCSLCSATAQNLTDMNTHIHQVHKEKSDEEEQQYVIKCGTCTKAFHDPESAQQHFHRKHCFLQKPSVAHFGSEKSNLYKFTASASHTERKLKQAINYSKSLDMEKGVENDLSYQNIGGNTNWKPPLNCKIYNYLNRIGCFFLHPRCSKRKDAADFAICMHAGRLDEQLPKQIPFTILSGDQGFLELENQFKKTQRPAHILNPHHLEGDMMCALLNSISDTTKECDSDDNMGAKNTSIGEEFISTEDVELEEAIRRSLEEM

SEQ ID NO: 7404 - protein, 818 aa, Homo sapiens
MPGHPGSWEMGPLTFMDVAIEFCLEEWQCLDIAQQNLYRNVMLENYRNLVFLGIAVSKPDLITCLEQEKEPWEPMRRHEMVAKPPVMCSHFTQDFWPEQHIKDPFQKATLRRYKNCEHKNVHLKKDHKSVDECKVHRGGYNGFNQCLPATQSKIFLFDKCVKAFHKFSNSNRHKISHTEKKLFKCKECGKSFCMLPHLAQHKIIHTRVNFCKCEKCGKAFNCPSIITKHKRINTGEKPYTCEECGKVFNWSSRLTTHKKNYTRYKLYKCEECGKAFNKSSILTTHKIIRTGEKFYKCKECAKAFNQSSNLTEHKKIHPGEKPYKCEECGKAFNWPSTLTKHKRIHTGEKPYTCEECGKAFNQFSNLTTHKRIHTAEKFYKCTECGEAFSRSSNLTKHKKIHTEKKPYKCEECGKAFKWSSKLTEHKLTHTGEKPYKCEECGKAFNWPSTLTKHNRIHTGEKPYKCEVCGKAFNQFSNLTTHKRIHTAEKPYKCEECGKAFSRSSNLTKHKKIHIEKKPYKCEECGKAFKWSSKLTEHKITHTGEKPYKCEECGKAFNHFSILTKHKRIHTGEKPYKCEECGKAFTQSSNLTTHKKIHTGEKFYKCEECGKAFTQSSNLTTHKKIHTGGKPYKCEECGKAFNQFSTLTKHKIIHTEEKPYKCEECGKAFKWSSTLTKHKIIHTGEKPYKCEECGKAFKLSSTLSTHKIIHTGEKPYKCEKCGKAFNRSSNLIEHKKIHTGEQPYKCEECGKAFNYSSHLNTHKRIHTKEQPYKCKECGKAFNQYSNLTTHNKIHTGEKLYKPEDVTVILTTPQTFSNIK

SEQ ID NO: 7405 - protein, 616 aa, Homo sapiens
MCLEKRYLDVLSDVTGPQVSCYITAPSYVLQQLECRIINHMSSLIVGDNEELVSNVITIECSDKEKRVPFPIGIAIPFTARYRGNYRDIMVKVCDINLQSSYLNPNSLEGMKGGYKGTCASVKVYKLGIFSVVSCLKKESFTVTKKGLALKSSMDSRISLNYPPGVFTSPVLVQLKIQPVDPALVAHLKAQQDTFYSVQSTSPLIHIQHPSTYPFQKPVTLFLPCSPYLDKNNLGSEIDHKRRASATINRITPSYFNRTKIASIRKPRKNASECLKLLGFRSQDSGWCGLDDVVKTIQSGLVSVELYEHLERFIVLHLSSTMDNSHLVTFVKSLEEAMLSTTACIVLSHQKDNPHRIAVLVVPSKDLSQVLKDLHLEGFGGPPEPSRHFQVREGEQLLLRFTGNIFASSNGKDYGKDYTLIFHLQRKPRLELQIKEVDEFGNYSCPHYKGTIVVYKVPKGKIVPNLNQSLVINENHSQLPICKLPLKLPKHKKLINRPQSTKRVSKDPVEALWDNLLHWLAEELSEENAESLSSTLPLRRSTIQLIKLKNPDDLTEQIHEFLCFWKKSLPTFTDKLRLLARHLRKIGRSDLAEELKFKWENKVFTEPQQCFDVAPE

SEQ ID NO: 7406 - protein, 737 aa, Homo sapiens
MALCSALMTIFTIKMGTAKQAIDQGRSPVIIDNTNIQAWEMKPYVEVAIGKGYRVEFHEPETWWKFDPEELEKRNKHGVSRKKIAQMLDRYEYQMSISIVMNSVEPSHKSTQRPPPPQGRQRERVLKKTGHRLSKTKQKRNRKRNKKQNSQNRIMEENSLEFLSDLTPGDQDPSQSEEEDIEKTRRESEYPFIDGLQNEVGDFVTGYKEKRWKNKDPKDSFQNVMSIVELDNTPKNYLSKEGDNLFVSLLLRPNEISVTCPILTQNLSCVTTDDCSGMKVEKHIRNRHTIALDTQDLSAETSCLFMKKREIVDKNLSHEPILCHQHGIRMSDKVLREEQVYTTKINHWAFFTTNLSDEDLQLGSDRQPYFGSWPAGPHKFICEQRPKKDRACKLAGPDSRGQWIQMIFTSVAASEPGNNPEILTDKLLIGNEDFSPPPETMDSFIETNLFRSCLPQPDIPKNALESTKNKKRRKKRIFNLVPNFDLLGQSRIGVKEREKCDLLTKNHGLKITLGEEKDRISERNSEEENKQKLMTFDHHPLWFYLDIIKATPLNIDGQRYSHCLSFNRLRCSASLYKNYIPSFVLHNLSSIWKPSFTNKKLFLTFESQTRVGNKLNDAGFISPEILHSHPDTSCSLGVTSDFHFLNERFDRKLKRWEEPKELPAEDSQDLTSTDYRSLELPLSQGFAFQLVKLFGSPGVPMESLLPDDYVVPLDWKTLKMIYLQWKMSVEKRQKKIG

SEQ ID NO: 7407 - protein, 554 aa, Homo sapiens
MGPLTFRDVKIEFSLEEWQCLDTAQRNLYRDVMLENYRNLVFLVMCSHFAQDVWPEHSIKDSFQKVILRTYGKYGHENLQLRKDHKSVDACKVYKGGYNGLNQCLTTTDSKIFQCDKYVKVFHKFPNVNRNKIRHTGKKPFKCKNRGKSFCMLSQLTQHKKIHTREYSYKCEECGKAFNWSSTLTKHKIIHTGEKPYKCEECGKAFNRSSNLTKHKIIHTGEKPYKCEECGKAFNRSSTLTKHKRIHTEEKPYKCEECGKAFNQFSILNKHKRIHMEDKPYKCEECGKAFRVFSILKKHKIIHTGEKPYKCEECGKAFNQFSNLTKHKIIHTGEKPYKCDECGKAFNQSSTLTKHKRIHTGEKPYKCEECGKAFKQSSTLTEHKIIHTGEKPYKCEKCGKAFSWSSAFTKHKRNHMEDKPYKCEECGKAFSVFSTLTKHKIIHTREKPYKCEECGKAFNQSSIFTKHKIIHTEGKSYKCEKCGNAFNQSSNLTARKIIYTGEKPYKYEECDKAFNKFSTLITHQIIYTGEKPCKHECGRAFNKSSNYTKEKLQT

SEQ ID NO: 7408 - protein, 357 aa, Homo sapiens
MTSELDIFVGNTTLIDEDVYRLWLDGYSVTDAVALRVRSGILEQTGATAAVLQSDTMDHYRTFHMLERLLHAPPKLLHQLIFQIPPSRQALLIERYYAFDEAFVREVLGKKLSKGTKKDLDDISTKTGITLKSCRRQFDNFKRVFKVVEEMRGSLVDNIQQHFLLSDRLARDYAAIVFFANNRFETGKKKLQYLSFGDFAFCAELMIQNWTLGAVDSQMDDMDMDLDKEFLQDLKELKVLVADKDLLDLHKSLVCTALRGKLGVFSEMEANFKNLSRGLVNVAAKLTHNKDVRDLFVDLVEKFVEPCRSDHWPLSDVRFFLNQYSASVHSLDGFRHQALWDRYMGTLRGCLLRLYHD

SEQ ID NO: 7409 - protein, 1711 aa, Homo sapiens
MGKKWRDAAEMERGCSDREDNAESRRRSRSASRGRFAESWKRLSSKQGSTKRSGLPSQQTPAQKSWIERAFYKRECVHIIPSTKDPHRCCCGRLIGQHVGLTPSISVLQNEKNESRLSRNDIQSEKWSISKHTQLSPTDAFGTIEFQGGGHSNKAMYVRVSFDTKPDLLLHLMTKEWQLELPKLLISVHGGLQNFELQPKLKQVFGKGLIKAAMTTGAWIFTGGVNTGVIRHVGDALKDHASKSRGKICTIGIAPWGIVENQEDLIGRDVVRPYQTMSNPMSKLTVLNSMHSHFILADNGTTGKYGAEVKLRRQLEKHISLQKINTRIGQGVPVVALIVEGGPNVISIVLEYLRDTPPVPVVVCDGSGRASDILAFGHKYSEEGGLINESLRDQLLVTIQKTFTYTRTQAQHLFIILMECMKKKELITVFRMGSEGHQDIDLAILTALLKGANASAPDQLSLALAWNRVDIARSQIFIYGQQWPVGSLEQAMLDALVLDRVDFVKLLIENGVSMHRFLTISRLEELYNTRHGPSNTLYHLVRDVKKREYPGFGWIYFKGNLPPDYRISLIDIGLVIEYLMGGAYRCNYTRKRFRTLYHNLFGPKRDDIPLRRGRKTTKKREEEVDIDLDDPEINHFPFPFHELMVWAVLMKRQKMALFFWQHGEEAMAKALVACKLCKAMAHEASENDMVDDISQELNHNSRDFGQLAVELLDQSYKQDEQLAMKLLTYELKNWSNATCLQLAVAAKHRDFIAHTCSQMLLTDMWMGRLRMRKNSGLKVILGILLPPSILSLEFKNKDDMPYMSQAQEIHLQEKEAEEPEKPTKEKEEEDMELTAMLGRNNGESSRKKDEEEVQSKHRLIPLGRKIYEFYNAPIVKFWFYTLAYIGYLMLFNYIVLVKMERWPSTQEWIVISYIFTLGIEKMREILMSEPGKLLQKVKVWLQEYWNVTDLIAILLFSVGMILRLQDQPFRSDGRVIYCVNIIYWYIRLLDIFGVNKYLGPYVMMIGKMMIDMMYFVIIMLVVLMSFGVARQAILFPNEEPSWKLAKNIFYMPYWMIYGEVFADQIDPPCGQNETREDGKIIQLPPCKTGAWIVPAIMACYLLVANILLVNLLIAVFNNTFFEVKSISNQVWKFQRYQLIMTFHERPVLPPPLIIFSHMTMIFQHLCCRWRKHESDPDERDYGLKLFITDDELKKVHDFEEQCIEEYFREKDDRFNSSNDERIRVTSERVENMSMRLEEVNEREHSMKASLQTVDIRLAQLEDLIGRMATALERLTGLERAESNKIRSRTSSDCTDAAYIVRQSSFNSQEGNTFKLQESIDPAGEETMSPTSPTLMPRMRSHSFYSVNMKDKGGIEKLESIFKERSLSLHRATSSHSVAKEPKAPAAPANTLAIVPDSRRPSSCIDIYVSAMDELHCDIDPLDNSVNILGLGEPSFSTPVPSTAPSSSAYATLAPTDRPPSRSIDFEDITSMDTRSFSSDYTHLPECQNPWDSEPPMYHTIERSKSSRYLATTPFLLEEAPIVKSHSFMFSPSRSYYANFGVPVKTAEYTSITDCIDTRCVNAPQAIADRAAFPGGLGDKVEDLTCCHPEREAELSHPSSDSEENEAKGRRATIAISSQEGDNSERTLSNNITVPKIERANSYSAEEPSAPYAHTRKSFSISDKLDRQRNTASLRNPFQRSKSSKPEGRGDSLSMRRLSRTSAFQSFESKHN

SEQ ID NO: 7410 - protein, 987 aa, Homo sapiens
MVFSVRQCGHVGRTEEVLLTFKIFLVIICLHVVLVTSLEEDTDNSSLSPPPEVETTSLNDVTLSLLPSNETGVKPQRNICNLSSICNDSAFFRGEIMFQYDKESTVPQNQHITNGTLTGVLSLSELKRSELNKTLQTLSETYFIMCATAEAQSTLNCTFTIKLNNTMNACAVIAALERVKIRPMEHCCCSVRIPCPSSPEELEKLQCDLQDPIVCLADHPRGPPFSSSQSIPVVPRATVLSQVPKATSFAEPPDYSPVTHNVPSPIGEIQPLSPQPSAPIASSPAIDMPPQSETISSPMPQTHVSGTPPPVKASFSSPTVSAPANVNTTSAPPVQTDIVNTSSISDLENQVLQMEKALSLGSLEPNLAGEMINQVSRLLHSPPDMLAPLAQRLLKVVDDIGLQLNFSNTTISLTSPSLALAVIRVNASSFNTTTFVAQDPANLQVSLETQAPENSIGTITLPSSLMNNLPAHDMELASRVQFNFFETPALFQDPSLENLSLISYVISSSVANLTVRNLTRNVTVTLKHINPSQDELTVRCVFWDLGRNGGRGGWSDNGCSVKDRRLNETICTCSHLTSFGVLLDLSRTSVLPAQMMALTFITYIGCGLSSIFLSVTLVTYIAFEKIRRDYPSKILIQLCAALLLLNLVFLLDSWIALYKMQGLCISVAVFLHYFLLVSFTWMGLEAFHMYLALVKVFNTYIRKYILKFCIVGWGVPAVVVTIILTISPDNYGLGSYGKFPNGSPDDFCWINNNAVFYITVVGYFCVIFLLNVSMFIVVLVQLCRIKKKKQLGAQRKTSIQDLRSIAGLTFLLGITWGFAFFAWGPVNVTFMYLFAIFNTLQGFFIFIFYCVAKENVRKQWRRYLCCGKLRLAENSDWSKTATNGLKKQTVNQGVSSSSNSLQSSSNSTNSTTLLVNNDCSVHASGNGNASTERNGVSFSVQNGDVCLHDFTGKQHMFNEKEDSCNGKGRMALRRTSKRGSLHFIEQM

SEQ ID NO: 7411 - protein, 433 aa, Homo sapiens
MLKVSAVLCVCAAAWCSQSLAAAAAVAAAGGRSDGGNFLDDKQWLTTISQYDKEVGQWNKFRDDDYFRTWSPGKPFDQALDPAKDPCLKMKCSRHKVCIAQDSQTAVCISHRRLTHRMKEAGVDHRQWRGPILSTCKQCPVVYPSPVCGSDGHTYSFQCKLEYQACVLGKQISVKCEGHCPCPSDKPTSTSRNVKRACSDLEFREVANRLRDWFKALHESGSQNKKTKTLLRPERSRFDTSILPICKDSLGWMFNRLDTNYDLLLDQSELRSIYLDKNEQCTKAFFNSCDTYKDSLISNNEWCYCFQRQQDPPCQTELSNIQKRQGVKKLLGQYIPLCDEDGYYKPTQCHGSVGQCWCVDRYGNEVMGSRINGVADCAIDFEISGDFASGDFHEWTDDEDDEDDIMNDEDEIEDDDEDEGDDDDGGDDHDVYI

SEQ ID NO: 7412 - protein, 319 aa, Homo sapiens
MLFWVLGLLILCGFLWTRKGKLKIEDITDKYIFITGCDSGFGNLAARTFDKKGFHVIAACLTESGSTALKAETSERLRTVLLDVTDPENVKRTAQWVKNQVGEKGLWGLINNAGVPGVLAPTDWLTLEDYREPIEVNLFGLISVTLNMLPLVKKAQGRVINVSSVGGRLAIVGGGYTPSKYAVEGFNDSLRRDMKAFGVHVSCIEPGLFKTNLADPVKVIEKKLAIWEQLSPDIKQQYGEGYIEKSLDKLKGNKSYVNMDLSPVVECMDHALTSLFPKTHYAAGKDAKIFWIPLSHMPAALQDFLLLKQKAELANPKAV

SEQ ID NO: 7413 - protein, 1530 aa, Homo sapiens
MPIRPDLQQLEKCIDDALRKNDFKPLKTLLQIDICEDVKIKCSKQFFHKVDNLICRELNKEDIHNVSAILVSVGRCGKNISVLGQAGLLTMIKQGLIQKMVAWFEKSKDIIQSQGNSKDEAVLNMIEDLVDLLLVIHDVSDEGKKQVVESFVPRICSLVIDSRVNICIQQEIIKKMNAMLDKMPQDARKILSNQEMLILMSSMGERILDAGDYDLQVGIVEALCRMTTEKQRQELAHQWFSMDFIAKAFKRIKDSEFETDCRIFLNLVNGMLGDKRRVFTFPCLSAFLDKYELQIPSDEKLEEFWIDFNLGSQTLSFYIAGDNDDHQWEAVTVPEEKVQIYSIEVRESKKLLTIILKNTVKISKREGKELLLYFDASLEITNVTQKIFGATKHRESIRKQGISVAKTSLHILFDASGSQILVPESQISPVGEELVSLKEKSKSPKEFAKPSKYIKNSDKGNRNNSQLEKTTPSKRKMSEASMIVSGADRYTMRSPVLFSNTSIPPRRRRIKPPLQMTSSAEKPSVSQTSENRVDNAASLKSRSSEGRHRRDNIDKHIKTAKCVENTENKNVEFPNQNFSELQDVIPDSQAAEKRDHTILPGVLDNICGNKIHSKWACWTPVTNIELCNNQRASTSSGDTLNQDIVINKKLTKQKSSSSISDHNSEGTGKVKYKKEQTDHIKIDKAEVEVCKKHNQQQNHPKYSGQKNTENAKQSDWPVESETTFKSVLLNKTIEESLIYRKKYILSKDVNTATCDKNPSASKNVQSHRKAEKELTSELNSWDSKQKKMREKSKGKEFTNVAESLISQINKRYKTKDDIKSTRKLKESLINSGFSNKPVVQLSKEKVQKKSYRKLKTTFVNVTSECPVNDVYNFNLNGADDPIIKLGIQEFQATAKEACADRSIRLVGPRNHDELKSSVKTKDKKIITNHQKKNLFSDTETEYRCDDSKTDISWLREPKSKPQLIDYSRNKNVKNHKSGKSRSSLEKGQPSSKMTPSKNITKKMDKTIPEGRIRLPRKATKTKKNYKDLSNSESECEQEFSHSFKENIPVKEENIHSRMKTVKLPKKQQKVFCAETEKELSKQWKNSSLLKDAIRDNCLDLSPRSLSGSPSSIEVTRCIEKITEKDFTQDYDCITKSISPYPKTSSLESLNSNSGVGGTIKSPKNNEKNFLCASESCSPIPRPLFLPRHTPTKSNTIVNRKKISSLVLTQETQNSNSYSDVSSYSSEERFMEIESPHINENYIQSKREESHLASSLSKSSEGREKTWFDMPCDATHVSGPTQHLSRKRIYIEDNLSNSNEVEMEEKGERRANLLPKKLCKIEDADHHIHKMSESVSSLSTNDFSIPWETWQNEFAGIEMTYETYERLNSEFKRRNNIRHKMLSYFTTQSWKTAQQHLRTMNHQSQDSRIKKLDKFQFIIIEELENFEKDSQSLKDLEKEFVDFWEKIFQKFSAYQKSEQQRLHLLKTSLAKSVFCNTDSEETVFTSEMCLMKEDMKVLQDRLLKDMLEEELLNVRRELMSVFMSHERNANV

SEQ ID NO: 7414 - protein, 707 aa, Homo sapiens
MVSWGRFICLVVVTMATLSLARPSFSLVEDTTLEPEDAISSGDDEDDTDGAEDFVSENSNNKRAPYWTNTEKMEKRLHAVPAANTVKFRCPAGGNPMPTMRWLKNGKEFKQEHRIGGYKVRNQHWSLIMESVVPSDKGNYTCVVENEYGSINHTYHLDVVERSPHRPILQAGLPANASTVVGGDVEFVCKVYSDAQPHIQWIKHVEKNGSKYGPDGLPYLKVLKAAGVNTTDKEIEVLYIRNVTFEDAGEYTCLAGNSIGISFHSAWLTVLPAPGREKEITASPDYLEIAIYCIGVFLIACMVVTVILCRMKNTTKKPDFSSQPAVHKLTKRIPLRRQVTVSAESSSSMNSNTPLVRITTRLSSTADTPMLAGVSEYELPEDPKWEFPRDKLTLGKPLGEGCFGQVVMAEAVGIDKDKPKEAVTVAVKMLKDDATEKDLSDLVSEMEMMKMIGKHKNIINLLGACTQDGPLYVIVEYASKGNLREYLRARRPPGMEYSYDINRVPEEQMTFKDLVSCTYQLARGMEYLASQKCIHRDLAARNVLVTENNVMKIADFGLARDINNIDYYKKTTNGRLPVKWMAPEALFDRVYTHQSDVWSFGVLMWEIFTLGGSPYPGIPVEELFKLLKEGHRMDKPANCTNELYMMMRDCWHAVPSQRPTFKQLVEDLDRILTLTTNEEEKKVSGAVDCHKPPCNPSHLPCVLAVDQ

SEQ ID NO: 7415 - protein, 621 aa, Homo sapiens
MAELTVEVRGSNGAFYKGFIKDVHEDSLTVVFENNWQPERQVPFNEVRLPPPPDIKKEISEGDEVEVYSRANDQEPCGWWLAKVRMMKGEFYVIEYAACDATYNEIVTFERLRPVNQNKTVKKNTFFKCTVDVPEDLREACANENAHKDFKKAVGACRIFYHPETTQLMILSASEATVKRVNILSDMHLRSIRTKLMLMSRNEEATKHLECTKQLAAAFHEEFVVREDLMGLAIGTHGSNIQQARKVPGVTAIELDEDTGTFRIYGESADAVKKARGFLEFVEDFIQVPRNLVGKVIGKNGKVIQEIVDKSGVVRVRIEGDNENKLPREDGMVPFVFVGTKESIGNVQVLLEYHIAYLKEVEQLRMERLQIDEQLRQIGSRSYSGRGRGRRGPNYTSGYGTNSELSNPSETESERKDELSDWSLAGEDDRDSRHQRDSRRRPGGRGRSVSGGRGRGGPRGGKSSISSVLKDPDSNPYSLLDNTESDQTADTDASESHHSTNRRRRSRRRRTDEDAVLMDGMTESDTASVNENGLVTVADYISRAESQSRQRNLPRETLAKNKKEMAKDVIEEHGPSEKAINGPTSASGDDISKLQRTPGEEKINTLKEENTQEAAVLNGVS

SEQ ID NO: 7416 - protein, 815 aa, Homo sapiens
MPTVISASVAPRTAAEPRSPGPVPHPAQSKATEAGGGNPSGIYSAIISRNFPIIGVKEKTFEQLHKKCLEKKVLYVDPEFPPDETSLFYSQKFPIQFVWKRPPEICENPRFIIDGANRTDICQGELGDCWFLAAIACLTLNQHLLFRVIPHDQSFIENYAGIFHFQFWRYGEWVDVVIDDCLPTYNNQLVFTKSNHRNEFWSALLEKAYAKLHGSYEALKGGNTTEAMEDFTGGVAEFFEIRDAPSDMYKIMKKAIERGSLMGCSIDDGTNMTYGTSPSGLNMGELIARMVRNMDNSLLQDSDLDPRGSDERPTRTIIPVQYETRMACGLVRGHAYSVTGLDEVPFKGEKVKLVRLRNPWGQVEWNGSWSDRWKDWSFVDKDEKARLQHQVTEDGEFWMSYEDFIYHFTKLEICNLTADALQSDKLQTWTVSVNEGRWVRGCSAGGCRNFPDTFWTNPQYRLKLLEEDDDPDDSEVICSFLVALMQKNRRKDRKLGASLFTIGFAIYEVPKEMHGNKQHLQKDFFLYNASKARSKTYINMREVSQRFRLPPSEYVIVPSTYEPHQEGEFILRVFSEKRNLSEEVENTISVDRPVPIIFVSDRANSNKELGVDQESEEGKGKTSPDKQKQSPQPQPGSSDQESEEQQQFRNIFKQIAGDDMEICADELKKVLNTVVNKHKDLKTHGFTLESCRSMIALMDTDGSGKLNLQEFHHLWNKIKAWQKIFKHYDTDQSGTINSYEMRNAVNDAGFHLNNQLYDIITMRYADKHMNIDFDSFICCFVRLEGMFRAFHAFDKDGDGIIKLNVLEWLQLTMYA

SEQ ID NO: 7417 - protein, 2312 aa, Homo sapiens [sequence omitted]

SEQ ID NO: 7418 - protein, 533 aa, Homo sapiens
MAAAAPVAADDDERRRRPGAALEDSRSQEGANGEAESGELSRLRAELAGALAEMETMKAVAEVSESTKAEAVAAVQRQCQEEVASLQAILKDSISSYEAQITALKQERQQQQQDCEEKERELGRLKQLLSRAYPLDSLEKQMEKAHEDSEKLREIVLPMEKEIEELKAKLLRAEELIQEIQRRPRHAPSLHGSTELLPLSRDPSPPLEPLEELSGDGGPAAEAFAHNCDDSASISSFSLGGGVGSSSSLPQSRQGLSPEQEETASLVSTGTLVPEGIYLPPPGYQLVPDTQWEQLQTEMQVLLAQVQNSEQLLRTLQGTVSQAQERVQLQMAELVTTHKCLHHEVKRLNEENQGLRAEQLPSSAPQGSQQEQGEEESLPSSVPELQQLLCCTRQEARARLQAQEHGAERLRIEIVTLREALEEETVARASLEGQLRVQREETASLCSLRTEMERVQQEQSKAQLPDLLSEQRAKVLRLQAELETSEQVQRDFVRLSQALQVRLERIRQAETLEQVRSIMDEAPLTDVRDIKDT

SEQ ID NO: 7419 - protein, 1457 aa, Homo sapiens
MAGNSLVLPIVLWGRKAPTHCISAVLLTDDGATIVTGCHDGQICLWDLSVELQINPRALLFGHTASITCLSKACASSDKQYIVSASESGEMCLWDVSDGRCIEFTKLACTHTGIQFYQFSVGNQREGRLLCHGHYPEILVVDATSLEVLYSLVSKISPDWISSMSIIRSHRTQEDTVVALSVTGILKVWIVTSEISDMQDTEPIFEEESKPIYCQNCQSISFCAFTQRSLLVVCSKYWRVFDAGDYSLLCSGPSENGQTWTGGDFVSSDKVIIWTENGQSYIYKLPASCLPASDSFRSDVGKAVENLIPPVQHILLDRKDKELLICPPVTRFFYGCREYFHKLLIQGDSSGRLNIWNISDTADKQGSEEGLAMTTSISLQEAFDKLNPCPAGIIDQLSVIPNSNEPLKVTASVYIPAHGRLVCGREDGSIVIVPATQTAIVQLLQGEHMLRRGWPPHRTLRGHRNKVTCLLYPHQVSARYDQRYLISGGVDFSVIIWDIFSGEMKHIFCVHGGEITQLLVPPENCSARVQHCICSVASDHSVGLLSLREKKCIMLASRHLFPIQVIKWRPSDDYLVVGCSDGSVYVWQMDTGALDRCVMGITAVEILNACDEAVPAAVDSLSHPAVNLKQAMTRRSLAALKNMAHHKLQTLATNLLASEASDKGNLPKYSHNSLMVQAIKTNLTDPDIHVLFFDVEALIIQLLTEEASRPNTALISPENLQKASGSSDKGGSFLTGKRAAVLFQQVKETIKENIKEHLLDDEEEDEEIMRQRREESDPEYRSSKSKPLTLLEYNLTMDTAKLFMSCLHAWGLNEVLDEVCLDRLGMLKPHCTVSFGLLSRGGHMSLMLPGYNQPACKLSHGKTEVGRKLPASEGVGKGTYGVSRAVTTQHLLSIISLANTLMSMTNATFIGDHMKKGPTRPPRPSTPDLSKARGSPPTSSNIVQGQIKQGWSQLAAMHCVMLPDLLGLDKFRPPLLEMLARRWQDRCLEVREAAQALLLAELRRIEQAGRKEAIDAWAPYLPQYIDHVISPGVTSEAAQTITTAPDASGPEAKVQEEEHDLVDDDITTGCLSSVPQMKKISTSYEERRKQATAIVLLGVIGAEFGAEIEPPKLLTRPRSSSQIPEGFGLTSGGSNYSLARHTCKALTFLLLQPPSPKLPPHSTIRRTAIDLIGRGFTVWEPYMDVSAVLMGLLELCADAEKQLANITMGLPLSPAADSARSARHALSLIATARPPAFITTIAKEVHRHTALAANTQSQQNMHTTTLARAKGEILRVIEILIEKMPTDVVDLLVEVMDIIMYCLEGSLVKKKGLQECFPAICRFYMVSYYERNHRIAVGARHGSVALYDIRTGKCQTIHGHKGPITAVAFAPDGRYLATYSNTDSHISFWQMNTSLLGSIGMLNSAPQLRCIKTYQVPPVQPASPGSHNALKLARLIWTSNRNVILMAHDGKEHRFMV

SEQ ID NO: 7420 - protein, 253 aa, Homo sapiens
MEAEGLDWLLVPLHQLVSWGAAAAMVFGGVVPYVPQYRDIRRTQNADGFSTYVCLVLLVANILRILFWFGRRFESPLLWQSAIMILTMLLMLKLCTEVRVANELNARRRSFTDFDPHHFWQWSSFSDYVQCVLAFTGVAGYITYLSIDSALFVETLGFLAVLTEAMLGVPQLYRNHRHQSTEGMSIKMVLMWTSGDAFKTAYFLLKGAPLQFSVCGLLQVLVDLAILGQAYAFARHPQKPAPHAVHPTGTKAL

SEQ ID NO: 7421 - protein, 535 aa, Homo sapiens
MATCIWLRSCGARRLGSTFPGCRLRPRAGGLVPASGPAPGPAQLRCYAGRLAGLSAALLRTDSFVGGRWLPAAATFPVQDPASGAALGMVADCGVREARAAVRAAYEAFCRWREVSAKERSSLLRKWYNLMIQNKDDLARIITAESGKPLKEAHGEILYSAFFLEWFSEEARRVYGDIIHTPAKDRRALVLKQPIGVAAVITPWNFPSAMITRKVGAALAAGCTVVVKPAEDTPFSALALAELASQAGIPSGVYNVIPCSRKNAKEVGEAICTDPLVSKISFTGSTTTGKILLHHAANSVKRVSMELGGLAPFIVFDSANVDQAVAGAMASKFRNTGQTCVCSNQFLVQRGIHDAFVKAFAEAMKKNLRVGNGFEEGTTQGPLINEKAVEKVEKQVNDAVSKGATVVTGGKRHQLGKNFFEPTLLCNVTQDMLCTHEETFGPLAPVIKFDTEEEAIAIANAADVGLAGYFYSQDPAQIWRVAEQLEVGMVGVNEGLISSVECPFGGVKQSGLGREGSKYGIDEYLELKYVCYGGL

SEQ ID NO: 7422 - protein, 949 aa, Homo sapiens
MTDSKYFTTTKKGEIFELKAELNSDKKEKKKEAVKKVIASMTVGKDVSALFPDVVNCMQTDNLELKKLVYLYLMNYAKSQPDMAIMAVNTFVKDCEDPNPLIRALAVRTMGCIRVDKITEYLCEPLRKCLKDEDPYVRKTAAVCVAKLHDINAQLVEDQGFLDTLKDLISDSNPMVVANAVAALSEIAESHPSSNLLDLNPQSINKLLTALNECTEWGQIFILDCLANYMPKDDREAQSICERVTPRLSHANSAVVLSAVKVLMKFMEMLSKDLDYYGTLLKKLAPPLVTLLSAEPELQYVALRNINLIVQKRPEILKHEMKVFFVKYNDPIYVKLEKLDIMIRLASQANIAQVLAELKEYATEVDVDFVRKAVRAIGRCAIKVEQSAERCVSTLLDLIQTKVNYVVQEAIVVIKDIFRKYPNKYESVIATLCENLDSLDEPEARAAMIWIVGEYAERIDNADELLESFLEGFHDESTQVQLQLLTAIVKLFLKKPTETQELVQQVLSLATQDSDNPDLRDRGYIYWRLLSTDPVAAKEVVLAEKPLISEETDLIEPTLLDELICYIGTLASVYHKPPSAFVEGGRGVVHKSLPPRTASSESAESPETAPTGAPPGEQPDVIPAQGDLLGDLLNLDLGPPVSGPPLATSSVQMGAVDLLGGGLDSLMGDEPEGIGGTNFVAPPTAAVPANLGAPIGSGLSDLFDLTSGVGTLSGSYVAPKAVWLPAMKAKGLEISGTFTRQVGSISMDLQLTNKALQVMTDFAIQFNRNSFGLAPAAPLQVHAPLSPNQTVEISLPLSTVGSVMKMEPLNNLQVAVKNNIDVFYFSTLYPLHILFVEDGKMDRQMFLATWKDIPNENEAQFQIRDCPLNAEAASSKLQSSNIFTVAKRNVEGQDMLYQSLKLTNGIWVLAELRIQPGNPSCTDLELSLKCRAPEVSQHVYQAYETILKN

SEQ ID NO: 7423 - protein, 292 aa, Homo sapiens
MEKRTCALCPKDVEYNVLYFAQSENIAAHENCLLYSSGLVECEDQDPLNPDRSFDVESVKKEIQRGRKLKCKFCHKRGATVGCDLKNCNKNYHFFCAKKDDAVPQSDGVRGIYKLLCQQHAQFPIIAQSAKFSGVKRKRGRKKPLSGNHVQPPETMKCNTFIRQVKEEHGRHTDATVKVPFLKKCKEAGLLNYLLEEILDKVHSIPEKLMDETTSESDYEEIGSALFDCRLFEDTFVNFQAAIEKKIHASQQRWQQLKEEIELLQDLKQTLCSFQENRDLMSSSTSISSLSY

SEQ ID NO: 7424 - protein, 1151 aa, Homo sapiens
MPCGFSPSPVAHHLVPGPPDTPAQQLRCGWTVGGWLLSLVRGLLPCLPPGARTAEGPIMVLAGPLAVSLLLPSLTLLVSHLSSSQDVSSEPSSEQQLCALSKHPTVAFEDLQPWVSNFTYPGARDFSQLALDPSGNQLIVGARNYLFRLSLANVSLLQATEWASSEDTRRSCQSKGKTEEECQNYVRVLIVAGRKVFMCGTNAFSPMCTSRQVGNLSRTIEKINGVARCPYDPRHNSTAVISSQGELYAATVIDFSGRDPAIYRSLGSGPPLRTAQYNSKWLNEPNFVAAYDIGLFAYFFLRENAVEHDCGRTVYSRVARVCKNDVGGRFLLEDTWTTFMKARLNCSRPGEVPFYYNELQSAFHLPEQDLIYGVFTTNVNSIAASAVCAFNLSAISQAFNGPFRYQENPRAAWLPIANPIPNFQCGTLPETGPNENLTERSLQDAQRLFLMSEAVQPVTPEPCVTQDSVRFSHLVVDLVQAKDTLYHVLYIGTESGTILKALSTASRSLHGCYLEELHVLPPGRREPLRSLRILHSARALFVGLRDGVLRVPLERCAAYRSQGACLGARDPYCGWDGKQQRCSTLEDSSNMSLWTQNITACPVRNVTRDGGFGPWSPWQPCEHLDGDNSGSCLCRARSCDSPRPRCGGLDCLGPAIHIANCSRNGAWTPWSSWALCSTSCGIGFQVRQRSCSNPAPRHGGRICVGKSREERFCNENTPCPVPIFWASWGSWSKCSSNCGGGMQSRRRACENGNSCLGCGVEFKTCNPEGCPEVRRNTPWTPWLPVNVTQGGARQEQRFRFTCRAPLADPHGLQFGRRRTETRTCPADGSGSCDTDALVEVLLRSGSTSPHTVSGGWAAWGPWSSCSRDCELGFRVRKRTCTNPEPRNGGLPCVGDAAEYQDCNPQACPVRGAWSCWTSWSPCSASCGGGHYQRTRSCTSPAPSPGEDICLGLHTEEALCATQACPEGWSPWSEWSKCTDDGAQSRSRHCEELLPGSSACAGNSSQSRPCPYSEIPVILPASSMEEATDCAGFNLIHLVATGISCFLGSGLLTLAVYLSCQHCQRQSQESTLVHPATPNHLHYKGGGTPKNEKYTPMEFKTLNKNNLIPDDRANFYPLQQTNVYTTTYYPSPLNKHSFRPEASPGQRCFPNS

SEQ ID NO: 7425 - protein, 1097 aa, Homo sapiens
MAAAAAEQQQFYLLLGNLLSPDNVVRKQAEETYENIPGQSKITFLLQAIRNTTAAEEARQMAAVLLRRLLSSAFDEVYPALPSDVQTAIKSELLMIIQMETQSSMRKKVCDIAAELARNLIDEDGNNQWPEGLKFLFDSVSSQNVGLREAALHIFWNFPGIFGNQQQHYLDVIKRMLVQCMQDQEHPSIRTLSARATAAFILANEHNVALFKHFADLLPGFLQAVNDSCYQNDDSVLKSLVEIADTVPKYLRPHLEATLQLSLKLCGDTSLNNMQRQLALEVIVTLSETAAAMLRKHTNIVAQTIPQMLAMMVDLEEDEDWANADELEDDDFDSNAVAGESALDRMACGLGGKLVLPMIKEHIMQMLQNPDWKYRHAGLMALSAIGEGCHQQMEGILNEIVNFVLLFLQDPHPRVRYAACNAVGQMATDFAPGFQKKFHEKVIAALLQTMEDQGNQRVQAHAAAALINFTEDCPKSLLIPYLDNLVKHLHSIMVLKLQELIQKGTKLVLEQVVTSIASVADTAEEKFVPYYDLFMPSLKHIVENAVQKELRLLRGKTIECISLIGLAVGKEKFMQDASDVMQLLLKTQTDFNDMEDDDPQISYMISAWARMCKILGKEFQQYLPVVMGPLMKTASIKPEVALLDTQDMENMSDDDGWEFVNLGDQQSFGIKTAGLEEKSTACQMLVCYAKELKEGFVEYTEQVVKLMVPLLKFYFHDGVRVAAAESMPLLLECARVRGPEYLTQMWHFMCDALIKAIGTEPDSDVLSEIMHSFAKCIEVMGDGCLNNEHFEELGGILKAKLEEHFKNQELRQVKRQDEDYDEQVEESLQDEDDNDVYILTKVSDILHSIFSSYKEKVLPWFEQLLPLIVNLICPHRPWPDRQWGLCIFDDVIEHCSPASFKYAEYFLRPMLQYVCDNSPEVRQAAAYGLGVMAQYGGDNYRPFCTEALPLLVRVIQSADSKTKENVNATENCISAVGKIMKFKPDCVNVEEVLPHWLSWLPLHEDKEEAVQTFNYLCDLIESNHPIVLGPNNTNLPKIFSIIAEGEMHEAIKHEDPCAKRLANVVRQVQTSGGLWTECIAQLSPEQQAAIQELLNSA

SEQ ID NO: 7426 - protein, 324 aa, Homo sapiens
MQKPQLLVPIIATSNGNLVHAAYFLLVGIPGLGPTIHFWLAFPLCFMYALATLGNLTIVLIIRVERRLHEPMYLFLAMLSTIDLVLSSITMPKMASLFLMGIQEIEFNICLAQMFLIHALSAVESAVLLAMAFDRFVAICHPLRHASVLTGCTVAKIGLSALTRGFVFFFPLPFILKWLSYCQTHTVTHSFCLHQDIMKLSCTDTRVNVVYGLFIILSVMGVDSLFIGFSYILILWAVLELSSRRAALKAFNTCISHLCAVLVFYVPLIGLSVVHRLGGPTSLLHVVMANTYLLLPPVVNPLVYGAKTKEICSRVLCMFSQGGK

SEQ ID NO: 7427 - protein, 904 aa, Homo sapiens
MFPALETHLKQTIPDPYEDFMYRHLQYYGYFKAQRGSLPNSATHQHVRKNNPQCLLNGSLGEKDDLIPDTLQKEKLLWPISLSSAVHRQIEAINRDFHSCLGWMQWRGLSSLQPPPPRFKDSPASAFRVAGITDSHMLSLPHLRSRQLLYDELDEVNPRLREPQELFSILSTKRPLQAPRWPIECEVIKENIHHIEWAPPQPEYFYQPKGNEKVPEIVGEKKGTVVYQLDSVPIEGSYFTSSRVGGKRGIVKELAVTLQGPEDNTLLFESRFESGNLQKAVRVDTYEYELTLRTDLYTNKHTQWFYFRVQNTRKDATYRFTIVNLLKPKSLYTVGMKPLLYSQLDANTRNIGWRREGNEIKYYKNNTDDGQQPFYCLTWTIQFPYDQDTCFFAHFYPYTYTDLQCYLLSVANNPIQSQFCKLQTLCRSLAGNTVYLLTITNPSQTPQEAAAKKAVVLSARVHPGESNGSWVMKGFLDFILSNSPDAQLLRDIFVFKVLPMLNPDGVIVGNYRCSLAGRDLNRHYKTILKESFPCIWYTRNMIKRLLEEREVLLYCDFHGHSRKNNIFLYGCNNNNRKYWLHERVFPLMLCKNAPDKFSFHSCNFKVQKCKEGTGRVVMWRMGILNSYTMESTFGGSTLGNKRDTHFTIEDLKSLGYHVCDTLLDFCDPDQMKFTQCLAELKELLRQEIHKKFHELGQDVDLEGSWSDISLSDIESRNSTSGSDSSLSDGLPVHLANIADELTQKKKMFKKKKKKSLQTRKQRNEQYQKKNLMQKLKLTEDTSEKAGFASTLQKQPTFFKNSENSSFLPMKNENPRLNETNLNRRDKDTPLDPSMATLILPKNKGRMQNKKPGFTVSCSPKRTINSSQEPAPGMKPNWPRSRYPATKRGCAAMAAYPSLHIYTYP

SEQ ID NO: 7428 - protein, 309 aa, Homo sapiens
MANLTIVTEFILMGFSTNKNMCILHSILFLLIYLCALMGNVLIIMITTLDHHLHTPVYFFLKNLSFLDLCLISVTAPKSIANSLIHNNSISFLGCVSQVFLLLSSASAELLLLTVMSFDRYTAICHPLHYDVIMDRSTCVQRATVSWLYGGLIAVMHTAGTFSLSYCGSNMVHQFFCDIPQLLAISCSENLIREIALILINVVLDFCCFIVIIITYVHVFSTVKKIPSTEGQSKAYSICLPHLLVVLFLSTGFIAYLKPASESPSILDAVISVFYTMLPPTFNPIIYSLRNKAIKVALGMLIKGKLTKK

SEQ ID NO: 7429 - protein, 634 aa, Homo sapiens
MSLVPATNYIYTPLNQLKGGTIVNVYGVVKFFKPPYLSKGTDYCSVVTIVDQTNVKLTCLLFSGNYEALPIIYKNGDIVRFHRLKIQVYKKETQGITSSGFASLTFEGTLGAPIIPRTSSKYFNFTTEDHKMVEALRVWASTHMSPSWTLLKLCDVQPMQYFDLTCQLLGKAEVDGASFLLKVWDGTRTPFPSWRVLIQDLVLEGDLSHIHRLQNLTIDILVYDNHVHVARSLKVGSFLRIYSLHTKLQSMNSENQTMLSLEFHLHGGTSYGRGIRVLPESNSDVDQLKKDLESANLTANQHSDVICQSEPDDSFPSSGSVSLYEVERCQQLSATILTDHQYLERTPLCAILKQKAPQQYRIRAKLRSYKPRRLFQSVKLHCPKCHLLQEVPHEGDLDIIFQDGATKTPDVKLQNTSLYDSKIWTTKNQKGRKVAVHFVKNNGILPLSNECLLLIEGGTLSEICKLSNKFNSVIPVRSGHEDLELLDLSAPFLIQGTIHHYGCKQCSSLRSIQNLNSLVDKTSWIPSSVAEALGIVPLQYVFVMTFTLDDGTGVLEAYLMDSDKFFQIPASEVLMDDDLQKSVDMIMDMFCPPGIKIDAYPWLECFIKSYNVTNGTDNQICYQIFDTTVAEDVI

SEQ ID NO: 7430 - protein, 931 aa, Homo sapiens
MLLFFTLGLLIHFVFFASIFDIYFTSPLVHGMTPQFTPLPPPARRLVLFVADGLRADALYELDENGNSRAPFIRNIIMHEGSWGISHTRVPTESRPGHVALIAGFYEDVSAVAKGWKENPVEFDSLFNESKYTWSWGSPDILPMFAKGASGDHVYTYSYDAKREDFGAQDATKLDTWVFDNVKDFFHHARNNQSLFSKINEEKIVFFLHLLGIDTNGHAHRPSSRDYKHNIKKVDDGVKEIVSMFNHFYGNDGKTTFIFTSDHGMTDWGSHGAGHPSETLTPLVTWGAGIKYPQRVSAQQFDDAFLKEWRLENWKRLDVNQADIAPLMTSLIGVPFPLNSVGILPVDYLNNTDLFKAESMFTNAVQILEQFKVKMTQKKEVTLPFLFTPFKLLSDSKQFNILRKARSYIKHRKFDEVVSLCKELIHLALKGLSYYHTYDRFFLGVNVVIGFVGWISYASLLIIKSHSNLIKGVSKEVKKPSHLLPCSFVAIGILVAFFLLIQACPWTYYVYGLLPLPIWYAVLREFQVIQDLVVSVLTYPLSHFVGYLLAFTLGIEVLVLSFFYRYMLTAGLTAFAAWPFLTRLWTRAKMTSLSWTFFSLLLAVFPLMPVVGRKPDISLVMGAGLLVLLLSLCVVTSLMKRKDSFIKEELLVHLLQVLSTVLSMYVVYSTQSSLLRKQGLPLMNQIISWATLASSLVVPLLSSPVLFQRLFSILLSLMSTYLLLSTGYEALFPLVLSCLMFVWINIEQETLQQSGVCCKQKLTSIQFSYNTDITQFRQLYLDDIRRAFFLVFFLVTAFFGTGNIASINSFDLASVYCFLTVFSPFMMGALMMWKILIPFVLVMCAFEAVQLTTQLSSKSLFLIVLVISDIMALHFFFLVKDYGSWLDIGTSISHYVIVMSMTIFLVFLNGLAQLLTTKKLRLCGKPKSHFM

SEQ ID NO: 7431 - protein, 875 aa, Homo sapiens [sequence omitted]

SEQ ID NO: 7432 - protein, 1205 aa, Homo sapiens
MRKPRRKSRQNAEGRRSPSPYSLKCSPTRETLTYAQAQRIVEVDIDGRLHRISIYDPLKIITEDELTAQDITECNSNKENSEQPQFPGKSKKPSSKGKKKESCSKHASGTSFHLPQPSFRMVDSGIQPEAPPLPAAYYRYIEKPPEDLDAEVEYDMDEEDLAWLDMVNEKRRVDGHSLVSADTFELLVDRLEKESYLESRSSGAQQSLIDEDAFCCVCLDDECHNSNVILFCDICNLAVHQECYGVPYIPEGQWLCRCCLQSPSRPVDCILCPNKGGAFKQTSDGHWAHVVCAIWIPEVCFANTVFLEPIEGIDNIPPARWKLTCYICKQKGLGAAIQCHKVNCYTAFHVTCAQRAGLFMKIEPMRETSLNGTIFTVRKTAYCEAHSPPGAATARRKGDSPRSISETGDEEGLKEGDGEEEEEEEVEEEEQEAQGGVSGSLKGVPKKSKMSLKQKIKKEPEEAGQDTPSTLPMLAVPQIPSYRLNKICSGLSFQRKNQFMQRLHNYWLLKRQARNGVPLIRRLHSHLQSQRNAEQREQDEKTSAVKEELKYWQKLRHDLERARLLIELIRKREKLKREQVKVQQAAMELELMPFNVLLRTTLDLLQEKDPAHIFAEPVNLSEVPDYLEFISKPMDFSTMRRKLESHLYRTLEEFEEDFNLIVTNCMKYNAKDTIFHRAAVRLRDLGGAILRHARRQAENIGYDPERGTHLPESPKLEDFYRFSWEDVDNILIPENRAHLSPEVQLKELLEKLDLVSAMRSSGARTRRVRLLRREINALRQKLAQPPPPQPPSLNKTVSNGELPAGPQGDAAVLEQALQEEPEDDGDRDDSKLPPPPTLEPTGPAPSLSEQESPPEPPTLKPINDSKPPSRFLKPRKVEEDELLEKSPLQLGNEPLQRLLSDNGINRLSLMAPDTPAGTPLSGVGRRTSVLFKKAKNGVKLQRSPDRVLENGEDHGVAGSPASPASIEEERHSRKRPRSRSCSESEGERSPQQEEETGMTNGFGKHTESGSDSECSLGLSGGLAFEACSGLTPPKRSRGKPALSRVPFLEGVNGDSDYNGSGRSLLLPFEDRGDLEPLELVWAKCRGYPSYPALIIDPKMPREGLLHNGVPIPVPPLDVLKLGEQKQAEAGEKLFLVLFFDNKRTWQWLPRDKVLPLGVEDTVDKLKMLEGRKTSIRKSVQVAYDRAMIHLSRVRGPHSFVTSSYL

SEQ ID NO: 7433 - protein, 4551 aa, Homo sapiens
MSGAGGAFASPREVLLERPCWLDGGCEPARRGYLYQQLCCVDERDRVQKKTFTKWVNKHLIKAQRHISDLYEDLRDGHNLISLLEVLSGDSLPREKGRMRFHKLQNVQIALDYLRHRQVKLVNIRNDDIADGNPKLTLGLIWTIILHFQISDIQVSGQSEDMTAKEKLLLWSQRMVEGYQGLRCDNFTSSWRDGRLFNAIIHRHKPLLIDMNKVYRQTNLENLDQAFSVAERDLGVTRLLDPEDVDVPQPDEKSIITYVSSLYDAMPRVPDVQDGVRANELQLRWQEYRELVLLLLQWMRHHTAAFEERRFPSSFEEIEILWSQFLKFKEMELPAKEADKNRSKGIYQSLEGAVQAGQLKVPPGYHPLDVEKEWGKLHVAILEREKQLRSEFERLECLQRIVTKLQMEAGLCEEQLNQADALLQSDVRLLAAGKVPQRAGEVERDLDKADSMIRLLFNDVQTLKDGRHPQGEQMYRRVYRLHERLVAIRTEYNLRLKAGVAAPATQVAQVTLQSVQRRPELEDSTLRYLQDLLAWVEENQHRVDGAEWGVDLPSVEAQLGSHRGLHQSIEEFRAKIERARSDEGQLSPATRGAYRDCLGRLDLQYAKLLNSSKARLRSLESLHSFVAAATKELMWLNEKEEEEVGFDWSDRNTNMTAKKESYSALMRELELKEKKIKELQNAGDRLLREDHPARPTVESFQAALQTQWSWMLQLCCCIEAHLKENAAYFQFFSDVREAEGQLQKLQEALRRKYSCDRSATVTRLEDLLQDAQDEKEQLNEYKGHLSGLAKRAKAVVQLKPRHPAHPMRGRLPLLAVCDYKQVEVTVHKGDECQLVGPAQPSHWKVLSSSGSEAAVPSVCFLVPPPNQEAQEAVTRLEAQHQALVTLWHQLHVDMKSLLAWQSLRRDVQLIRSWSLATFRTLKPEEQRQALHSLELHYQAFLRDSQDAGGFGPEDRLMAEREYGSCSHHYQQLLQSLEQGAQEESRCQRCISELKDIRLQLEACETRTVHRLRLPLDKEPARECAQRIAEQQKAQAEVEGLGKGVARLSAEAEKVLALPEPSPAAPTLRSELELTLGKLEQVRSLSAIYLEKLKTISLVIRGTQGAEEVLRAHEEQLKEAQAVPATLPELEATKASLKKLRAQAEAQQPTFDALRDELRGAQEVGERLQQRHGERDVEVERWRERVAQLLERWQAVLAQTDVRQRELEQLGRQLRYYRESADPLGAWLQDARRRQEQIQAMPLADSQAVREQLRQEQALLEEIERHGEKVEECQRFAKQYINAIKDYELQLVTYKAQLEPVASPAKKPKVQSGSESVIQEYVDLRTHYSELTTLTSQYIKFISETLRRMEEEERLAEQQRAEERERLAEVEAALEKQRQLAEAHAQAKAQAEREAKELQQRMQEEVVRREEAAVDAQQQKRSIQEELQQLRQSSEAEIQAKARQAEAAERSRLRIEEEIRVVRLQLEATERQRGGAEGELQALRARAEEAEAQKRQAQEEAERLRRQVQDESQRKRQAEVELASRVKAEAEAAREKQRALQALEELRLQAEEAERRLRQAEVERARQVQVALETAQRSAEAELQSKRASFAEKTAQLERSLQEEHVAVAQLREEAERRAQQQAEAERAREEAERELERWQLKANEALRLRLQAEEVAQQKSLAQAEAEKQKEEAEREARRRGKAEEQAVRQRELAEQELEKQRQLAEGTAQQRLAAEQELIRLRAETEQGEQQRQLLEEELARLQREAAAATQKRQELEAELAKVRAEMEVLLASKARAEEESRSTSEKSKQRLEAEAGRFRELAEEAARLRALAEEAKRQRQLAEEDAARQRAEAERVLAEKLAAIGEATRLKTEAEIALKEKEAENERLRRLAEDEAFQRRRLEEQAAQHKADIEERLAQLRKASDSELERQKGLVEDTLRQRRQVEEEILALKASFEKAAAGKAELELELGRIRSNAEDTLRSKEQAELEAARQRQLAAEEERRRREAEERVQKSLAAEEEAARQRKAALEEVERLKAKVEEARRLRERAEQESARQLQLAQEAAQKRLQAEEKAHAFAVQQKEQELQQTLQQEQSVLDQLRGEAEAARRAAEEAEEARVQAEREAAQSRRQVEEAERLKQSAEEQAQARAQAQAAAEKLRKEAEQEAARRAQAEQAALRQKQAADAEMEKHKKFAEQTLRQKAQVEQELTTLRLQLEETDHQKNLLDEELQRLKAEATEAARQRSQVEEELFSVRVQMEELSKLKARIEAENRALILRDKDNTQRFLQEEAEKMKQVAEEAARLSVAAQEAARLRQLAEEDLAQQRALAEKMLKEKMQAVQEATRLKAEAELLQQQKELAQEQARRLQEDKEQMAQQLAEETQGFQRTLEAERQRQLEMSAEAERLKLRVAEMSRAQARAEEDAQRFRKQAEEIGEKLHRTELATQEKVTLVQTLEIQRQQSDHDAERLREAIAELEREKEKLQQEAKLLQLKSEEMQTVQQEQLLQETQALQQSFLSEKDSLLQRERFIEQEKAKLEQLFQDEVAKAQQLREEQQRQQQQMEQERQRLVASMEEARRRQHEAEEGVRRKQEELQQLEQQRRQQEELLAEENQRLREQLQLLEEQHRAALAHSEEVTASQVAATKTLPNGRDALDGPAAEAEPEHSFDGLRRKVSAQRLQEAGILSAEELQRLAQGHTTVDELARREDVRHYLQGRSSIAGLLLKATNEKLSVYAALQRQLLSPGTALILLEAQAASGFLLDPVRNRRLTVNEAVKEGVVGPELHHKLLSAERAVTGYKDPYTGQQISLFQAMQKGLIVREHGIRLLEAQIATGGVIDPVHSHRVPVDVAYRRGYFDEEMNRVLADPSDDTKGFFDPNTHENLTYLQLLERCVEDPETGLCLLPLTDKAAKGGELVYTDSEARDVFEKATVSAPFGKFQGKTVTIWEIINSEYFTAEQRRDLLRQFRTGRITVEKIIKIIITVVEEQEQKGRLCFEGLRSLVPAAELLESRVIDRELYQQLQRGERSVRDVAEVDTVRRALRGANVIAGVWLEEAGQKLSIYNALKKDLLPSDMAVALLEAQAGTGHIIDPATSARLTVDEAVRAGLVGPEFHEKLLSAEKAVTGYRDPYTGQSVSLFQALKKGLIPREQGLRLLDAQLSTGGIVDPSKSHRVPLDVACARGCLDEETSRALSAPRADAKAYSDPSTGEPATYGELQQRCRPDQLTGLSLLPLSEKAARARQEELYSELQARETFEKTPVEVPVGGFKGRTVTVWELISSEYFTAEQRQELLRQFRTGKVTVEKVIKILITIVEEVETLRQERLSFSGLRAPVPASELLASGVLSRAQFEQLKDGKTTVKDLSELGSVRTLLQGSGCLAGIYLEDTKEKVSIYEAMRRGLLRATTAALLLEAQAATGFLVDPVRNQRLYVHEAVKAGVVGPELHEQLLSAEKAVTGYRDPYSGSTISLFQAMQKGLVLRQHGIRLLEAQIATGGIIDPVHSHRVPVDVAYQRGYFSEEMNRVLADPSDDTKGFFDPNTHENLTYRQLLERCVEDPETGLRLLPLKGAEKAEVVETTQVYTEEETRRAFEETQIDIPGGGSHGGSTMSLWEVMQSDLIPEEQRAQLMADFQAGRVTKERMIIIIIEIIEKTEIIRQQGLASYDYVRRRLTAEDLFEARIISLETYNLLREGTRSLREALEAESAWCYLYGTGSVAGVYLPGSRQTLSIYQALKKGLLSAEVARLLLEAQAATGFLLDPVKGERLTVDEAVRKGLVGPELHDRLLSAERAVTGYRDPYTEQTISLFQAMKKELIPTEEALRLLDAQLATGGIVDPRLGFHLPLEVAYQRGYLNKDTHDQLSEPSEVRSYVDPSTDERLSYTQLLRRCRRDDGTGQLLLPLSDARKLTFRGLRKQITMEELVRSQVMDEATALQLREGLTSIEEVTKNLQKFLEGTSCIAGVFVDATKERLSVYQAMKKGIIRPGTAFELLEAQAATGYVIDPIKGLKLTVEEAVRMGIVGPEFKDKLLSAERAVTGYKDPYSGKLISLFQAMKKGLILKDHGIRLLEAQIATGGIIDPEESHRLPVEVAYKRGLFDEEMNEILTDPSDDTKGFFDPNTEENLTYLQLMERCITDPQTGLCLLPLKEKKRERKTSSKSSVRKRRVVIVDPETGKEMSVYEAYRKGLIDHQTYLELSEQECEWEEITISSSDGVVKSMIIDRRSGRQYDIDDAIAKNLIDRSALDQYRAGTLSITEFADMLSGNAGGFRSRSSSVGSSSSYPISPAVSRTQLASWSDPTEETGPVAGILDTETLEKVSITEAMHRNLVDNITGQRLLEAQACTGGIIDPSTGERFPVTDAVNKGLVDKIMVDRINLAQKAFCGFEDPRTKTKMSAAQALKKGWLYYEAGQRFLEVQYLTGGLIEPDTPGRVPLDEALQRGTVDARTAQKLRDVGAYSKYLTCPKTKLKISYKDALDRSMVEEGTGLRLLEAAAQSTKGYYSPYSVSGSGSTAGSRTGSRTGSRAGSRRGSFDATGSGFSMTFSSSSYSSSGYGRRYASGSSASLGGPESAVA

SEQ ID NO: 7434 - protein, 1863 aa, Homo sapiens
MDLSALRVEEVQNVINAMQKILECPICLELIKEPVSTKCDHIFCKFCMLKLLNQKKGPSQCPLCKNDITKRSLQESTRFSQLVEELLKIICAFQLDTGLEYANSYNFAKKENNSPEHLKDEVSIIQSMGYRNRAKRLLQSEPENPSLQETSLSVQLSNLGTVRTLRTKQRIQPQKTSVYIELGSDSSEDTVNKATYCSVGDQELLQITPQGTRDEISLDSAKKAACEFSETDVTNTEHHQPSNNDLNTTEKRAAERHPEKYQGSSVSNLHVEPCGTNTHASSLQHENSSLLLTKDRMNVEKAEFCNKSKQPGLARSQHNRWAGSKETCNDRRTPSTEKKVDLNADPLCERKEWNKQKLPCSENPRDTEDVPWITLNSSIQKVNEWFSRSDELLGSDDSHDGESESNAKVADVLDVLNEVDEYSGSSEKIDLLASDPHEALICKSERVHSKSVESNIEDKIFGKTYRKKASLPNLSHVTENLIIGAFVTEPQIIQERPLTNKLKRKRRPTSGLHPEDFIKKADLAVQKTPEMINQGTNQTEQNGQVMNITNSGHENKTKGDSIQNEKNPNPIESLEKESAFKTKAEPISSSISNMELELNIHNSKAPKKNRLRRKSSTRHIHALELVVSRNLSPPNCTELQIDSCSSSEEIKKKKYNQMPVRHSRNLQLMEGKEPATGAKKSNKPNEQTSKRHDSDTFPELKLTNAPGSFTKCSNTSELKEFVNPSLPREEKEEKLETVKVSNNAEDPKDLMLSGERVLQTERSVESSSISLVPGTDYGTQESISLLEVSTLGKAKTEPNKCVSQCAAFENPKGLIHGCSKDNRNDTEGFKYPLGHEVNHSRETSIEMEESELDAQYLQNTFKVSKRQSFAPFSNPGNAEEECATFSAHSGSLKKQSPKVTFECEQKEENQGKNESNIKPVQTVNITAGFPVVGQKDKPVDNAKCSIKGGSRFCLSSQFRGNETGLITPNKHGLLQNPYRIPPLFPIKSFVKTKCKKNLLEENFEEHSMSPEREMGNENIPSTVSTISRNNIRENVFKEASSSNINEVGSSTNEVGSSINEIGSSDENIQAELGRNRGPKLNAMLRLGVLQPEVYKQSLPGSNCKHPEIKKQEYEEVVQTVNTDFSPYLISDNLEQPMGSSHASQVCSETPDDLLDDGEIKEDTSFAENDIKESSAVFSKSVQKGELSRSPSPFTHTHLAQGYRRGAKKLESSEENLSSEDEELPCFQHLLFGKVNNIPSQSTRHSTVATECLSKNTEENLLSLKNSLNDCSNQVILAKASQEHHLSEETKCSASLFSSQCSELEDLTANTNTQDPFLIGSSKQMRHQSESQGVGLSDKELVSDDEERGTGLEENNQEEQSMDSNLGEAASGCESETSVSEDCSGLSSQSDILTTQQRDTMQHNLIKLQQEMAELEAVLEQHGSQPSNSYPSIISDSSALEDLRNPEQSTSEKAVLTSQKSSEYPISQNPEGLSADKFEVSADSSTSKNKEPGVERSSPSKCPSLDDRWYMHSCSGSLQNRNYPSQEELIKVVDVEEQQLEESGPHDLTETSYLPRQDLEGTPYLESGISLFSDDPESDPSEDRAPESARVGNIPSSTSALKVPQLKVAESAQSPAAAHTTDTAGYNAMEESVSREKPELTASTERVNKRMSMVVSGLTPEEFMLVYKFARKHHITLTNLITEETTHVVMKTDAEFVCERTLKYFLGIAGGKWVVSYFWVTQSIKERKMLNEHDFEVRGDVVNGRNHQGPKRARESQDRKIFRGLEICCYGPFTNMPTDQLEWMVQLCGASVVKELSSFTLGTGVHPIVVVQPDAWTEDNGFHAIGQMCEAPVVTREWVLDSVALYQCQELDTYLIPQIPHSHY

SEQ ID NO: 7435 - protein, 651 aa, Homo sapiens
MLREEATKKSKEKEPGMALPQGRLTFRDVAIEFSLEEWKCLNPAQRALYRAVMLENYRNLEFVDSSLKSMMEFSSTRHSITGEVIHTGTLQRHKSHHIGDFCFPEMKKDIHHFEFQWQEVERNGHEAPMTKIKKLTGSTDRSDHRHAGNKPIKDQLGLSFHSHLPELHMFQTKGKISNQLDKSIGASSASESQRISCRLKTHISNKYGKNFLHSSFTQIQEICMREKPCQSNECGKAFNYSSLLRRHHITHSREREYKCDVCGKIFNQKQYIVYHHRCHTGEKTYKCNECGKTFTQMSSLVCHRRLHTGEKPYKCNECGKTFSEKSSLRCHRRLHTGEKPYKCNECGKTFGRNSALVIHKAIHTGEKPYKCNECGKTFSQKSSLQCHHILHTGEKPYKCEECDNVYIRRSHLERHRKIHTGEGSYKCKVCDKVFRSDSYLAEHQRVHTGEKPYKCNKCGRSFSRKSSLQYHHTLHTGEKPYTCNECGKVFSRRENLARHHRLHAGEKPYKCEECDKVFSRRSHLERHRRIHTGEKPYKCKVCDKAFRSDSCLANHTRVHTGEKPYKCNKCAKVFNQKGILAQHQRVHTGEKPYKCNECGKVFNQKASLAKHQRVHTAEKPYKCNECGKAFTGQSTLIHHQAIHGCRETLQM

SEQ ID NO: 7436 - protein, 1122 aa, Homo sapiens
MVSNLKRIMAQKWMPDQISVSEFIAETTEDYNSPTTSSFTTRLHNCRNTVTLLEEALDQDRTALQKVKKSVKAIYNSGQDHVQNEENYAQVLDKFGSNFLSRDNPDLGTAFVKFSTLTKELSTLLKNLLQGLSHNVIFTLDSLLKGDLKGVKGDLKKPFDKAWKDYETKFTKIEKEKREHAKQHGMIRTEITGAEIAEEMEKERRLFQLQMCEYLIKVNEIKTKKGVDLLQNLIKYYHAQCNFFQDGLKTADKLKQYIEKLAADLYNIKQTQDEEKKQLTALRDLIKSSLQLDQKEDSQSRQGGYSMHQLQGNKEYGSEKKGYLLKKSDGIRKVWQRRKCSVKNGILTISHATSNRQPAKLNLLTCQVKPNAEDKKSFDLISHNRTYHFQAEDEQDYVAWISVLTNSKEEALTMAFRGEQSAGENSLEDLTKAIIEDVQRLPGNDICCDCGSSEPTWLSTNLGILTCIECSGIHREMGVHISRIQSLELDKLGTSELLLAKNVGNNSFNDIMEANLPSPSPKPTPSSDMTVRKEYITAKYVDHRFSRKTCSTSSAKLNELLEAIKSRDLLALIQVYAEGVELMEPLLEPGQELGETALHLAVRTADQTSLHLVDFLVQNCGNLDKQTALGNTVLHYCSMYSKPECLKLLLRSKPTVDIVNQAGETALDIAKRLKATQCEDLLSQAKSGKFNPHVHVEYEWNLRQEEIDESDDDLDDKPSPIKKERSPRPQSFCHSSSISPQDKLALPGFSTPRDKQRLSYGAFTNQIFVSTSTDSPTSPTTEAPPLPPRNAGKGPTGPPSTLPLSTQTSSGSSTLSKKRPPPPPPGHKRTLSDPPSPLPHGPPNKGAVPWGNDGGPSSSSKTTNKFEGLSQQSSTSSAKTALGPRVLPKLPQKVALRKTDHLSLDKATIPPEIFQKSSQLAELPQKPPPGDLPPKPTELAPKPQIGDLPPKPGELPPKPQLGDLPPKPQLSDLPPKPQMKDLPPKPQLGDLLAKSQTGDVSPKAQQPSEVTLKSHPLDLSPNVQSRDAIQKQASEDSNDLTPTLPETPVPLPRKINTGKNKVRRVKTIYDCQADNDDELTFIEGEVIIVTGEEDQEWWIGHIEGQPERKGVFPVSFVHILSD

SEQ ID NO: 7437 - protein, 893 aa, Homo sapiens
MPVRKQDTQRALHLLEEYRSKLSQTEDRQLRSSIERVINIFQSNLFQALIDIQEFYEVTLLDNPKCIDRSKPSEPIQPVNTWEISSLPSSTVTSETLPSSLSPSVEKYRYQDEDTPPQEHISPQITNEVIGPELVHVSEKNLSEIENVHGFVSHSHISPIKANPPPVLVNTDSLETPTYVNGTDADYEYEEITLERGNSGLGFSIAGGTDNPHIGDDSSIFITKIITGGAAAQDGRLRVNDCILRVNEVDVRDVTHSKAVEALKEAGSIVRLYVKRRKPVSEKIMEIKLIKGPKGLGFSIAGGVGNQHIPGDNSIYVTKIIEGGAAHKDGKLQIGDKLLAVNNVCLEEVTHEEAVTALKNTSDFVYLKVAKPTSMYMNDGYAPPDITNSSSQPVDNHVSPSSFLGQTPASPARYSPVSKAVLGDDEITREPRKVVLHRGSTGLGFNIVGGEDGEGIFISFILAGGPADLSGELRKGDRIISVNSVDLRAASHEQAAAALKNAGQAVTIVAQYRPEEYSRFEAKIHDLREQMMNSSISSGSGSLRTSQKRSLYVRALFDYDKTKDSGLPSQGLNFKFGDILHVINASDDEWWQARQVTPDGESDEVGVIPSKRRVEKKERARLKTVKFNSKTRDKGQSFNDKRKKNLFSRKFPFYKNKDQSEQETSDADQHVTSNASDSESSYRGQEEYVLSYEPVNQQEVNYTRPVIILGPMKDRINDDLISEFPDKFGSCVPHTTRPKRDYEVDGRDYHFVTSREQMEKDIQEHKFIEAGQYNNHLYGTSVQSVREVAEKGKHCILDVSGNAIKRLQIAQLYPISIFIKPKSMENIMEMNKRLTEEQARKTFERAMKLEQEFTEHFTAIVQGDTLEDIYNQVKQIIEEQSGSYIWVPAKEKL

SEQ ID NO: 7438 - protein, 1205 aa, Homo sapiens
MTNPSDRVLPANSMAESREGDFGCTVMELRKLMELRSRDALTQINVHYGGVQNLCSRLKTSPVEGLSGNPADLEKRRQVFGHNVIPPKKPKTFLELVWEALQDVTLIILEIAAIISLVLSFYRPAGEENELCGQVATTPEDENEAQAGWIEGAAILFSVIIVVLVTAFNDWSKEKQFRGLQCRIEQEQKFSIIRNGQLIQLPVAEIVVGDIAQVKYGDLLPADGILIQGNDLKIDESSLTGESDHVKKSLDKDPMLLSGTHVMEGSGRMVVTAVGVNSQTGIILTLLGVNEDDEGEKKKKGKKQGVPENRNKAKTQDGVALEIQPLNSQEGIDNEEKDKKAVKVPKKEKSVLQGKLTRLAVQIGKAGLLMSALTVFILILYFVIDNFVINRRPWLPECTPIYIQYFVKFFIIGITVLVVAVPEGLPLAVTISLAYSVKKMMKDNNLVRHLDACETMGNATAICSDKTGTLTMNRMTVVQAYIGGIHYRQIPSPDVFLPKVLDLIVNGISINSAYTSKILPPEKEGGLPRQVGNKTECALLGFVTDLKQDYQAVRNEVPEEKLYKVYTFNSVRKSMSTVIRNPNGGFRMYSKGASEIILRKCNRILDRKGEAVPFKNKDRDDMVRTVIEPMACDGLRTICIAYRDFDDTEPSWDNENEILTELTCIAVVGIEDPVRPEVPDAIAKCKQAGITVRMVTGDNINTARAIATKCGILTPGDDFLCLEGKEFNRLIRNEKGEVEQEKLDKIWPKLRVLARSSPTDKHTLVKGIIDSTVGEHRQVVAVTGDGTNDGPALKKADVGFAMGIAGTDVAKEASDIILTDDNFTSIVKAVMWGRNVYDSISKFLQFQLTVNVVAVIVAFTGACITQDSPLKAVQMLWVNLIMDTFASLALATEPPTESLLKRRPYGRNKPLISRTMMKNILGHAFYQLIVIFILVFAGEKFFDIDSGRKAPLHSPPSQHYTIVFNTFVLMQLFNEINSRKIHGEKNVFSGIYRNIIFCSVVLGTFICQIFIVEFGGKPFSCTSLSLSQWLWCLFIGIGELLWGQFISAIPTRSLKFLKEAGHGTTKEEITKDAEGLDEIDHAEMELRRGQILWFRGLNRIQTQIKVVKAFHSSLHESIQKPYNQKSIHSFMTHPEFAIEEELPRTPLLDEEEEENPDKASKFGTRVLLLDGEVTPYANTNNNAVDCNQVQLPQSDSSLQSLETSV

SEQ ID NO: 7439 - protein, 278 aa, Homo sapiens
MEPRAADGCFLGDVGFWVERTPVHEAAQRGESLQLQQLIESGACVNQVTVDSITPLHAASLQGQARCVQLLLAAGAQVDARNIDGSTPLCDACASGSIECVKLLLSYGAKVNPPLYTASPLHEACMSGSSECVRLLIDVGANLEAHDCHFGTPLHVACAREHLDCVKVLLNAGANVNAAKLHETALHHAAKVKNVDLIEMLIEFGGNIYARDNRGKKPSDYTWSSSAPAKCFEYYEKTPLTLSQLCRVNLRKATGVRGLEKIAKLNIPPRLIDYLSYN
